United States Patent Application Publication US 2006/0150283 A1 - sequence listing, part 26

SEQ ID NO: 99912 - DNA, 869 bp, Arabidopsis thaliana
  misc_feature (1)..(869): Ceres Seq. ID no. 13603920
  misc_feature (1)..(869): Ortholog of  Ceres SEQ ID NO 15176177 as cited in SEQ ID NO 0
aaaattagttcgtcgaagcatcgagaaaatgatcgtactttctgttggttccgcttcttcatctccgatcgtcgtcgtcttttccgtcgcgcttcttctgttctacttctctgaaacttctctaggagctccttgtcccatcaatggcttgccaatcgtgaggaatattagtgaccttcctcaggataactatggaagaccaggtctttcccacatgactgttgctggctccgtattgcatggaatgaaagaggttgaaatatggcttcagacatttgctccaggttcagagacaccaattcacaggcactcctgtgaagaggtttttgttgtcctaaagggcagtggtactctgtatctcgctgaaacacatggaaatttccctgggaaaccaatcgaatttccaatctttgccaacagtacaattcatattccgatcaatgatgctcatcaggtcaaaaacaccggtcatgaggacctgcaggtgttggttatcatatctcggccgcctattaaaatcttcatctacgaagactggtttatgccacacactgctgcaaggctgaagttcccttactattgggatgagcaatgcattcaagaatcacaaaaagacgagctttaaagcaaagtccgaggctaaaagcaagcacaacctttagatagtaaaatcatagttgaggttttgtgacactacgtagatactggtaaattggcaaggattttacatgaatgttgttgttaccagaaagtaaataaatgttcaatctttgatgttcttaagtaagtgagtcctattggtcatgaaaatatgtaagtgtgcacatcttgattgcatttgcgataaatttatagagtttcactcactt

SEQ ID NO: 99913 - protein, 207 aa, Arabidopsis thaliana
  peptide (1)..(207): Ceres Seq. ID no. 13603921
KLVRRSIEKMIVLSVGSASSSPIVVVFSVALLLFYFSETSLGAPCPINGLPIVRNISDLPQDNYGRPGLSHMTVAGSVLHGMKEVEIWLQTFAPGSETPIHRHSCEEVFVVLKGSGTLYLAETHGNFPGKPIEFPIFANSTIHIPINDAHQVKNTGHEDLQVLVIISRPPIKIFIYEDWFMPHTAARLKFPYYWDEQCIQESQKDEL

SEQ ID NO: 99914 - protein, 198 aa, Arabidopsis thaliana; identical to SEQ ID NO: 22651
  peptide (1)..(198): Ceres Seq. ID no. 13603922

SEQ ID NO: 99915 - protein, 136 aa, Arabidopsis thaliana; identical to SEQ ID NO: 22652
  peptide (1)..(136): Ceres Seq. ID no. 13603923

SEQ ID NO: 99916 - DNA, 902 bp, Arabidopsis thaliana
  misc_feature (1)..(902): Ceres Seq. ID no. 13603924
  misc_feature (1)..(902): Ortholog of  Ceres SEQ ID NO 13656068 as cited in SEQ ID NO 69047
ccctctttgcactttcttcttcccgtcgctaccgaaagcttctgtctctctcactcgcagggttctctggaactttctgaacgatgccgaggtattactgtgattattgcgatacttatctcactcacgattccccatcagtaaggaagcagcacaatgctggttacaaacacaaggcgaatgtgagaatatactatcagcaatttgaggaacaacaaacccaaagtttgattgatcagagaattaaggaacatcttggccaaactggagggtatcaacaggttggtgctgtgtttaatcagcatatgcttgcaagacctcgccctcccatgatgctaccacctggaagtatgcctatgggtatgcgacctcctgttctgcctagacccatgatgcctcctcaaggttatatgcctcctccaggagtaccacagatgatggcaccgcctggtgctcctctacctccacctccacaaaatggtattctgaggccaccaggaatggctcccataccaggtcaaggtggcggaccaccaggaatggctcccataccaggtcaaggtggcggaccacctcccaattataatggactacctcctcctcctccttatcatacaaatccagctgctccaccaagtggtaatttcaacaatccaaacctcaacaatccgaatcccagtgctgaatctcctgaaagcaatgagtagagttagtaggtctgaatgaatcatttttctcctgccaaaaaattctcagagctcttgtttaacacaatatcctaccttttctactccaatttttatgaagaggtttagaactaacgtatgtgaaatgagttttatgtgttagatgattgtatccattagagtcatgaaaaggaaaatctgaggtttcttatctct

SEQ ID NO: 99917 - protein, 207 aa, Arabidopsis thaliana
  peptide (1)..(207): Ceres Seq. ID no. 13603925
MPRYYCDYCDTYLTHDSPSVRKQHNAGYKHKANVRIYYQQFEEQQTQSLIDQRIKEHLGQTGGYQQVGAVFNQHMLARPRPPMMLPPGSMPMGMRPPVLPRPMMPPQGYMPPPGVPQMMAPPGAPLPPPPQNGILRPPGMAPIPGQGGGPPGMAPIPGQGGGPPPNYNGLPPPPPYHTNPAAPPSGNFNNPNLNNPNPSAESPESNE

SEQ ID NO: 99918 - protein, 133 aa, Arabidopsis thaliana; identical to SEQ ID NO: 34753
  peptide (1)..(133): Ceres Seq. ID no. 13603926

SEQ ID NO: 99919 - protein, 125 aa, Arabidopsis thaliana; identical to SEQ ID NO: 34754
  peptide (1)..(125): Ceres Seq. ID no. 13603927

SEQ ID NO: 99920 - DNA, 2332 bp, Arabidopsis thaliana
  misc_feature (1)..(2332): Ceres Seq. ID no. 13603928
  misc_feature (1)..(2332): Ortholog of  Ceres SEQ ID NO 14306279 as cited in SEQ ID NO 56860
acataaagattcctagtcttatactctgtctctctctctctctctctttttcacactcacacacaaactaaaccggaatggccaccgccgacgaattctccgacgaagatacatcaccgattgaagaagtccgtttaacggtaacaaacaccgacgatccaacactaccggtttggacattcaggatgtggttcttgggtctaatctcatgttctctcctctctttccttaaccaattcttctcgtaccgaaccgaaccgctcgtaatcactcaaatcacggttcaggtggctacactacctatcggtcatttcttggccaaggtgcttcccaaaacccggtttgggttacccggttgtggatcggcccggttctcgctgaacccgggtccgtttaacatgaaagagcatgttttgatatcgatatttgcgaatgcgggtagtgctttcggatccgggtcggcttatgcggttggtatcatcacaattattaaagctttttatggccggagtatctcttttattgccggctggctcctcatcatcactacacaggtattgggatatggctgggccggtttactgaggaaatatgtggtcgaaccggctcatatgtggtggcctagcactctggttcaagtgtcactgtttagggcattgcatgagaaggacgaccaaaggatgacgagagcaaaattctttgtgatagcattagtctgtagttttggatggtacatagtccctggctatctcttcacaacactcacaagcatctcatgggtttgttgggcatttccaagatcagtcactgctcaacagattggttctggaatgagaggtcttggtcttggagcctttacactagactggaccgcggttgcctctttcttgtttagtccacttatcagccccttcttcgccatcgctaatgttttcatcggttatgttcttttgatctacttcgtcttgcctttagcctattggggatttgattcttataacgctacgaggtttcctatattttcgtcgcatcttttcacatcggttggtaatacatatgatattcctgcgatcgtgaatgataactttgagctcgatttagctaagtatgagcaacaaggaaggattaacttgagcatgttctttgctcttacctatgggcttggtttcgccaccattgcttctacgctcactcatgtagctctcttctatggcaaggaaatttctgagaggtttcgagtttcatacaaaggcaaggaagatatacacactaggttaatgaagagatataaagacataccttcatggtggttttactcaatgttggctgcgacactacttatctctcttgcattatgtgttttcttgaacgatgaggttcaaatgccttggtggggacttgtgttcgcaagcgcgatggctttcgtcttcacactcccgataagcatcataaccgcaacaactaaccaaacaccgggattgaatataataacagagtacgcaatgggactcatttacccgggacgacctatcgcaaacgtatgcttcaaagtctatggatacatgagtatggcacaagcagtctctttcttaaatgacttcaaacttggtcattacatgaagatcccacctagatccatgttcttggttcaattcatcggtacaattcttgccggaacaatcaacataacggtcgcatggtggcagttaaactctatcaaaaacatatgtcaagaggaacttctacctcccaacagtccatggacatgtccgggtgaccgtgttttcttcgatgcatcggtcatttggggattggtcggaccaaaacggatttttggttctcagggaaactatgcggccatgaactggtttttcctcggaggtgcattaggaccagtcatagtgtggtcattgcacaaagcgttcccaaaacgttcttggattccacttgtaaatctccctgttcttctaggagcaaccgcaatgatgccacctgcgaccgcggtgaactacaactcgtggatattggtggggacgatattcaacttgtttgtgttccggtacaggaaaagttggtggcagaggtataactacgttctctcagccgctatggatgccggtgtagctttcatggcggttttgttgtacttctcggtggggatggaggaaaagagtttggactggtggggaacaagaggtgaacattgtgatctagctaaatgtccaaccgctagaggagtaattgttgatggttgtccggttaaataatcttaaaggatccattggtgtgtttcaacaatgtatgatacacaaagtaactaattaagaatttc

SEQ ID NO: 99921 - protein, 729 aa, Arabidopsis thaliana; identical to SEQ ID NO: 26588
  peptide (1)..(729): Ceres Seq. ID no. 13603929

SEQ ID NO: 99922 - protein, 693 aa, Arabidopsis thaliana; identical to SEQ ID NO: 26589
  peptide (1)..(693): Ceres Seq. ID no. 13603930

SEQ ID NO: 99923 - protein, 622 aa, Arabidopsis thaliana; identical to SEQ ID NO: 26590
  peptide (1)..(622): Ceres Seq. ID no. 13603931

SEQ ID NO: 99924 - DNA, 1215 bp, Arabidopsis thaliana
  misc_feature (1)..(1215): Ceres Seq. ID no. 13603936
  misc_feature (1)..(1215): Ortholog of  Ceres SEQ ID NO 12608945 as cited in SEQ ID NO 51209
  misc_feature (1)..(1215): Ortholog of  Ceres SEQ ID NO 12619999 as cited in SEQ ID NO 66123
  misc_feature (1)..(1215): Ortholog of  Ceres SEQ ID NO 13656436 as cited in SEQ ID NO 69154
gtataaaaaagttgtttctttcttctctgtttttttgctttcgtcttcaagagagagagagagagagatacaaagagagaaatttggttgtttgttgacggaagcttcttcggtctctcttctccgtcttacgattgtcaacgcgtggttccatcttcaattttgtttctattttagcagaagtttctcgagcttcaaatactgtttcagatcaatcaatcagtcaatcatggctagctctggaaacaagaacatcaacgccaaattggtattactaggagatgttggagctggaaaatcaagtcttgtgctacggtttgtgaaagatcagtttgttgaatttcaggaatcaaccattggtgcagcttttttctctcaaacattggctgtgaatgatgcgactgtgaagtttgagatatgggatacagctggtcaggaacgataccacagtttggctccaatgtactacaggggtgcagctgctgctattattgtctttgacattactaatcaagcctcatttgagagggcgaagaaatgggttcaggaactgcaggcacaaggtaaccctaatatggtgatggctcttgctggaaacaaagctgatttattagacgcaaggaaggtgtctgcagaggaggcagagatatatgctcaagagaacagccttttctttatggaaacctcagcgaagaccgcaacaaatgtcaaagacatattctacgaaatagcgaaaaggctaccacgtgtacagccagctgaaaacccgacaggaatggttctcccaaacgggccaggggctacggcagtgagttcatcgtgttgtgcttagattcgtacctgaagagagatctcatttggttagtcacatagtagagaacatctggactttcatgtgtttgcttcttcttcgtctttgttactttactttgcttgcattgacaacaacaacagtgtatatcatgatgatacttattctgcctttgtgaaatctgaagatatttgtatttggagagatttatatatatatatctcttttgtaattagaaaacaaaacttagtccgaaaaaaatgtgcttatctttcgtttatgttttaagtgaatgctcagatttataggcttattatcttttgtattacttaaatctccaaaatgttttttccattgttggaatgctgtaatatgaatgtatatatcaataaaagaaacacctt

SEQ ID NO: 99925 - protein, 276 aa, Arabidopsis thaliana
  peptide (1)..(276): Ceres Seq. ID no. 13603937
YKKVVSFFSVFLLSSSREREREIQREKFGCLLTEASSVSLLRLTIVNAWFHLQFCFYFSRSFSSFKYCFRSINQSIMASSGNKNINAKLVLLGDVGAGKSSLVLRFVKDQFVEFQESTIGAAFFSQTLAVNDATVKFEIWDTAGQERYHSLAPMYYRGAAAAIIVFDITNQASFERAKKWVQELQAQGNPNMVMALAGNKADLLDARKVSAEEAEIYAQENSLFFMETSAKTATNVKDIFYEIAKRLPRVQPAENPTGMVLPNGPGATAVSSSCCA

SEQ ID NO: 99926 - protein, 200 aa, Arabidopsis thaliana; identical to SEQ ID NO: 24213
  peptide (1)..(200): Ceres Seq. ID no. 13603938

SEQ ID NO: 99927 - DNA, 1408 bp, Arabidopsis thaliana
  misc_feature (1)..(1408): Ceres Seq. ID no. 13603939
  misc_feature (1)..(1408): Ortholog of  Ceres SEQ ID NO 13656404 as cited in SEQ ID NO 65806
  misc_feature (1)..(1408): Ortholog of  Ceres SEQ ID NO 12779935 as cited in SEQ ID NO 66774
  misc_feature (1)..(1408): Ortholog of  Ceres SEQ ID NO 13598695 as cited in SEQ ID NO 67368
  misc_feature (1)..(1408): Ortholog of  Ceres SEQ ID NO 13591174 as cited in SEQ ID NO 68289
gaacttgtaaaccttactctcgaagagtcctctgttactcatttttacattgtaaaaaaaaacttcttttcttctctacgtgaataagaatctgaagagtcattttctcaagaatgacgtggctaaaacaaatgtggtcaagcattttagtgctagccgtggtggtgatcggagccagagctgtgcccatcacgtatcttgaatctgcagtggctaaaggagctgtgtgtttggatggtagcgcgccagcataccatttcgataagggatcgggctcaggagtgaacaattggatcgttcatatggaaggaggaggatggtgcactgatatagctacatgcgttcaacgtaaaagtacaatgaagggttcttctaagcttatgaacaaagactttggtttctccggtatcttgggtggcaagcaaagcaccaatccagacttttacaattggaatagaatcaaagttcggtattgcgatggttcatctttcaccggtgatatagaagctgttgatccgacgcacaagctgttctttcgcggtgctagggtttggcgtgcggtgatcgatgatcttatggctaagggaatgagcaacgctcaaaacgctatactctccggttgttcagctggagcattggctgcgattctacattgcgaccagttcaagtccactctccctaaaacggctaaggtcaaatgtgtttctgacgctggttacttcatccacggtaaggatatcactggaggatcttacatccaatcctactacgccaaagtcgtagcgacccacggatctgcaaagagtctacctgcttcttgcacctcaagtatgaagcctgatttgtgtttcttccctcaatacgttgctaagaccttacaaacaccgcttttcgtcatcaatgccgccttcgattcttggcagatcaagaatgtattggcaccaacctctgttgataaaagcaaagcatggaagacttgtaagcttgatcttaagaagtgtacggccgctcagcttcaaaccgttcaaggatatagagaccaagtgttggctgcgttggcgcctgttcgatccgcgacgacgaacggattgttcttggactcgtgccatgctcattgccaaggtggaagcgctgccacttggtccggcgacaaaggtcccacagtcgcgaatacgaaaatggctaaggcggttggagattggttctttgagaggagtacgtttcagaacgtagattgttcatcgcttaattgcaaccctacttgccctgcagtatctactgaagactaaaatttattcattgatgtcttaaaatttattcatctttggaatattgttcttgaaatttaaaagtaaaataatataattgatacaatttcattcgaataaataaaatcctttgcccttct

SEQ ID NO: 99928 - protein, 391 aa, Arabidopsis thaliana; identical to SEQ ID NO: 24787
  peptide (1)..(391): Ceres Seq. ID no. 13603940

SEQ ID NO: 99929 - protein, 385 aa, Arabidopsis thaliana; identical to SEQ ID NO: 24788
  peptide (1)..(385): Ceres Seq. ID no. 13603941

SEQ ID NO: 99930 - protein, 328 aa, Arabidopsis thaliana; identical to SEQ ID NO: 24789
  peptide (1)..(328): Ceres Seq. ID no. 13603942

SEQ ID NO: 99931 - DNA, 772 bp, Arabidopsis thaliana
  misc_feature (1)..(772): Ceres Seq. ID no. 13603962
  misc_feature (1)..(772): Ortholog of  Ceres SEQ ID NO 12608262 as cited in SEQ ID NO 57800
ggatagagaagataatgagctccttggggttttcagttggaacttgttctcctccaagtgagaaaagaaaatgcagatttcttgtgaataatagcttaaacaaagcagaggctattaacttgagaaacaagcaaaaagtttcttctgatcctgagttaagttttgcccaattatcctcatgtggtagaagagaagcaattattggttttggtttctctattggcttgcttgataatgtttctgcattagccgaaacaacttcttgtgaattctctgtgtctccttctggtcttgctttttgtgataaagttgttggttatggtcctgaagctgttaaagggcaactaatcaaggcacattatgtagggaagttggagaatgggaaagtctttgatagtagctataatcgagggaaacctcttactttccgaattggtgttggtgaggtgataaaaggttgggatcaaggaatccttggctctgatggaattcctcctatgcttactggtgggaaacgaacattgaggattcctccagaactcgcgtatggtgatcgaggcgcaggttgcaaaggaggctcatgccttattcctccagcttcggttcttctctttgacattgagtacataggtaaagcttgagagagcttttttgcttttgctttgccttttctgagccatatcatactcttgtttgaatcatccttatagaagaaaaaaatatgtctattattttttctactatgtaatcaagtgaatatctcagctttttc

SEQ ID NO: 99932 - protein, 212 aa, Arabidopsis thaliana
  peptide (1)..(212): Ceres Seq. ID no. 13603963
IEKIMSSLGFSVGTCSPPSEKRKCRFLVNNSLNKAEAINLRNKQKVSSDPELSFAQLSSCGRREAIIGFGFSIGLLDNVSALAETTSCEFSVSPSGLAFCDKVVGYGPEAVKGQLIKAHYVGKLENGKVFDSSYNRGKPLTFRIGVGEVIKGWDQGILGSDGIPPMLTGGKRTLRIPPELAYGDRGAGCKGGSCLIPPASVLLFDIEYIGKA

SEQ ID NO: 99933 - protein, 208 aa, Arabidopsis thaliana
  peptide (1)..(208): Ceres Seq. ID no. 13603964
MSSLGFSVGTCSPPSEKRKCRFLVNNSLNKAEAINLRNKQKVSSDPELSFAQLSSCGRREAIIGFGFSIGLLDNVSALAETTSCEFSVSPSGLAFCDKVVGYGPEAVKGQLIKAHYVGKLENGKVFDSSYNRGKPLTFRIGVGEVIKGWDQGILGSDGIPPMLTGGKRTLRIPPELAYGDRGAGCKGGSCLIPPASVLLFDIEYIGKA

SEQ ID NO: 99934 - DNA, 1056 bp, Arabidopsis thaliana
  misc_feature (1)..(1056): Ceres Seq. ID no. 13603965
  misc_feature (1)..(1056): Ortholog of  Ceres SEQ ID NO 12558659 as cited in SEQ ID NO 20727
  misc_feature (1)..(1056): Ortholog of  Ceres SEQ ID NO 14314534 as cited in SEQ ID NO 52434
  misc_feature (1)..(1056): Ortholog of  Ceres SEQ ID NO 15175034 as cited in SEQ ID NO 62432
  misc_feature (1)..(1056): Ortholog of  Ceres SEQ ID NO 12619999 as cited in SEQ ID NO 66123
  misc_feature (1)..(1056): Ortholog of  Ceres SEQ ID NO 13656436 as cited in SEQ ID NO 69154
gtttgatattttccaattccgcgtctttctctgttgaaatcgaaaaaattttcaaaacaaaatctaaggaaaaaagagcaacaagtttcaaatctcatttgggtttttcattttgaaaagaaggacccatttttatctctctctttgttttgttttctcgaatctgaaggagtaaagttaaaagctttgaaggagagaatcaatggcgggttacagagcagatgatgaatacgattacctattcaaggttgttctgataggtgattcaggtgtgggcaaatccaatttgctttcacgattcacgaagaacgagtttagtctcgagtcaaaatccacgatcggggtcgagttcgcgactcggagtttgaatgttgatgataaagtcatcaaagctcagatttgggatactgctggtcaagaaaggtaccgagccatcactagtgcgtattaccgaggagctgttggagcgcttcttgtctacgatgtaacccgacactcaacatttgaaaacgttgagacttggctgaaagaactcagaaaccacactgatccaaacattgtagtcatgctcgtgggcaacaaatctgaccttcgccatctcgtggctgttcagactgaagatgctaagtcattcgccgagaaagaatctctctacttcatggaaacctcggctctcgaagccaccaatgttgagaacgctttcgccgaagtcctcactcagattcaccacattgtgagcaagaaggcgatggaagctgcgagcgaatccgctaatgttccatcgaaaggagacaagatcgatatcggtaaagatgtttcagctgtgaagaaaggtggatgctgctcgaactaatcagagagtagaattattgttaacaacctaaggatcggtttttgttaacggttctatcgaatatgaagattgcttttaggttgagtaatgcccatttggtgtatttctgttatttatctgatctatcaatgttattgtttgaaaatgctatgtcaaattttcagaaccctaaattatatttatctcaaacaatagaattgttg

SEQ ID NO: 99935 - protein, 216 aa, Arabidopsis thaliana; identical to SEQ ID NO: 39012
  peptide (1)..(216): Ceres Seq. ID no. 13603966

SEQ ID NO: 99936 - DNA, 1239 bp, Arabidopsis thaliana
  misc_feature (1)..(1239): Ceres Seq. ID no. 13603971
  misc_feature (1)..(1239): Ortholog of  Ceres SEQ ID NO 13502952 as cited in SEQ ID NO 62271
  misc_feature (1)..(1239): Ortholog of  Ceres SEQ ID NO 13502973 as cited in SEQ ID NO 68052
  misc_feature (1)..(1239): Ortholog of  Ceres SEQ ID NO 13596000 as cited in SEQ ID NO 68188
  misc_feature (1)..(1239): Ortholog of  Ceres SEQ ID NO 15179420 as cited in SEQ ID NO 0
aatcaaattaagagcaaaagtcatttaactttcctaaaacaatggctttaaaacatatgcaaatctttctcttcgtcgctatattttcatcattctgtttctccatcactctttctcgtccactcgacaatgaactcatcatgcaaaagaggcacatcgagtggatgactaaacacggccgtgtctacgcggatgtgaaggaggaaaacaatcgctacgttgtgttcaaaaacaacgtcgaacgcattgaacatttaaatagcattcctgccggaagaactttcaaacttgcggtaaatcagtttgctgatttaaccaatgacgaatttcgttccatgtacactggtttcaaaggtgtctcggcattatctagccaaagccaaactaaaatgtcgccgtttaggtaccaaaacgtttcttctggtgctttgccggtttctgttgactggaggaagaaaggagctgtgacccctatcaagaatcaaggcagctgcggatgttgttgggcgttttcagcggttgcggctattgaaggagcaacacaaataaagaaagggaaacttatatctttgtcagaacaacagcttgttgattgcgacacaaacgattttggctgcgaaggcggtttaatggatactgcgtttgagcatataaaagcgactggcggcttgacaactgagtcaaattatccttacaaaggcgaagacgctacttgcaattccaaaaagaccaatccaaaagcaacttctattacaggttatgaggatgtcccggttaatgatgagcaagcactgatgaaggcagtggcacaccaaccggttagcgttggaattgaaggaggtggttttgatttccaattctattcgtctggtgtgttcactggagagtgcactacgtatcttgatcatgcagtaactgcgattggatacggcgaatctactaacggatcaaagtattggatcatcaagaattcatggggaacaaaatggggagaaagtggatatatgaggattcaaaaagatgtcaaggataaacaaggactatgtggtcttgccatgaaagcttcttacccaactatatgaattcaaaaccgtgttaagcttttaattgtgtatgtttgtgtgggattgatgtctaaaaataatttgaattgttttatgtaaaaaaattgtatttagactgttgtatgcattttatgaaattgtaagcttatgtaatgcaaaggattgataattttcg

SEQ ID NO: 99937 - protein, 346 aa, Arabidopsis thaliana; identical to SEQ ID NO: 36431
  peptide (1)..(346): Ceres Seq. ID no. 13603972

SEQ ID NO: 99938 - protein, 341 aa, Arabidopsis thaliana; identical to SEQ ID NO: 36432
  peptide (1)..(341): Ceres Seq. ID no. 13603973

SEQ ID NO: 99939 - protein, 313 aa, Arabidopsis thaliana; identical to SEQ ID NO: 36433
  peptide (1)..(313): Ceres Seq. ID no. 13603974

SEQ ID NO: 99940 - DNA, 1277 bp, Arabidopsis thaliana
  misc_feature (1)..(1277): Ceres Seq. ID no. 13603975
  misc_feature (1)..(1277): Ortholog of  Ceres SEQ ID NO 13592961 as cited in SEQ ID NO 20522
  misc_feature (1)..(1277): Ortholog of  Ceres SEQ ID NO 12583469 as cited in SEQ ID NO 51031
  misc_feature (1)..(1277): Ortholog of  Ceres SEQ ID NO 13596527 as cited in SEQ ID NO 62582
  misc_feature (1)..(1277): Ortholog of  Ceres SEQ ID NO 15226378 as cited in SEQ ID NO 62741
  misc_feature (1)..(1277): Ortholog of  Ceres SEQ ID NO 13597389 as cited in SEQ ID NO 63426
  misc_feature (1)..(1277): Ortholog of  Ceres SEQ ID NO 15169639 as cited in SEQ ID NO 64624
  misc_feature (1)..(1277): Ortholog of  Ceres SEQ ID NO 14303071 as cited in SEQ ID NO 67114
  misc_feature (1)..(1277): Ortholog of  Ceres SEQ ID NO 13595998 as cited in SEQ ID NO 68161
  misc_feature (1)..(1277): Ortholog of  Ceres SEQ ID NO 14303635 as cited in SEQ ID NO 68503
aactgaatttgaaagaaaaaaaaaaagaaatcataaaatgagaatcaatatgttattcatagtggcattctcatttttagtctctgttcggtcattaccgatgagaccaactctaaagtacgagtcaatctttaattttggcgattctttaagcgataccggaaactttttattatccggtgatgttgactctccgaacattggaagactaccgtacggacaaaccttttttaaccgttccaccggtcgttgctctgacggacgtctcatcatcgatttcatcgctgaggctagtggactaccgtacattccaccgtatctccaaagcttacggacgaatgattcggtagatttcaagagaggtgcaaattttgcggtggctggagcaacagcgaacgaatttagcttctttaaaaacagaggtctttcagtaacattgttgacaaacaagacactggatattcaacttgattggttcaagaagttgaaaccttctctgtgtaaaaccaagccagaatgtgaacaatattttagaaaatctctatttctcgttggagaaattggtggaaacgattataactaccctcttttggcattccgaagtttcaaacatgctatggatttggtaccatttgttattaacaaaatcatggacgtcacaagtgcattgatagaggaaggtgccatgacactaatagttccaggaaaccttccaatcggttgttctgcggctctactagagcggtttaatgataatagtggatggctttatgactcgaggaaccaatgctacatgccattgaacaatttggctaagcttcacaatgataagctcaagaaaggcctcgcggctctaagaaaaaagtacccttatgccaaaattatatatgctgattattacagttctgccatgcaattcttcaactcaccttccaaatacggtttcactggaagtgtcctaaaggcatgttgtggaggaggagatggaagatacaacgtgcaaccaaacgtgcggtgcggagaaaagggttcaaccacttgcgaagatccatcaacgtacgcaaattgggacggaattcacctcactgaagcggcttaccgccacattgcaactggtctcatctccggccgtttcaccatgcctacttataattaataacaattaagttactcataagttgtaactttttttttaacacacaaacttttcatataactcctaattgaaaacctataaatcgatcatatttatatcaagctcgttcgagagcataagc

SEQ ID NO: 99941 - protein, 384 aa, Arabidopsis thaliana
  peptide (1)..(384): Ceres Seq. ID no. 13603976
TEFERKKKRNHKMRINMLFIVAFSFLVSVRSLPMRPTLKYESIFNFGDSLSDTGNFLLSGDVDSPNIGRLPYGQTFFNRSTGRCSDGRLIIDFIAEASGLPYIPPYLQSLRTNDSVDFKRGANFAVAGATANEFSFFKNRGLSVTLLTNKTLDIQLDWFKKLKPSLCKTKPECEQYFRKSLFLVGEIGGNDYNYPLLAFRSFKHAMDLVPFVINKIMDVTSALIEEGAMTLIVPGNLPIGCSAALLERFNDNSGWLYDSRNQCYMPLNNLAKLHNDKLKKGLAALRKKYPYAKIIYADYYSSAMQFFNSPSKYGFTGSVLKACCGGGDGRYNVQPNVRCGEKGSTTCEDPSTYANWDGIHLTEAAYRHIATGLISGRFTMPTYN

SEQ ID NO: 99942 - protein, 372 aa, Arabidopsis thaliana
  peptide (1)..(372): Ceres Seq. ID no. 13603977
MRINMLFIVAFSFLVSVRSLPMRPTLKYESIFNFGDSLSDTGNFLLSGDVDSPNIGRLPYGQTFFNRSTGRCSDGRLIIDFIAEASGLPYIPPYLQSLRTNDSVDFKRGANFAVAGATANEFSFFKNRGLSVTLLTNKTLDIQLDWFKKLKPSLCKTKPECEQYFRKSLFLVGEIGGNDYNYPLLAFRSFKHAMDLVPFVINKIMDVTSALIEEGAMTLIVPGNLPIGCSAALLERFNDNSGWLYDSRNQCYMPLNNLAKLHNDKLKKGLAALRKKYPYAKIIYADYYSSAMQFFNSPSKYGFTGSVLKACCGGGDGRYNVQPNVRCGEKGSTTCEDPSTYANWDGIHLTEAAYRHIATGLISGRFTMPTYN

SEQ ID NO: 99943 - protein, 368 aa, Arabidopsis thaliana
  peptide (1)..(368): Ceres Seq. ID no. 13603978
MLFIVAFSFLVSVRSLPMRPTLKYESIFNFGDSLSDTGNFLLSGDVDSPNIGRLPYGQTFFNRSTGRCSDGRLIIDFIAEASGLPYIPPYLQSLRTNDSVDFKRGANFAVAGATANEFSFFKNRGLSVTLLTNKTLDIQLDWFKKLKPSLCKTKPECEQYFRKSLFLVGEIGGNDYNYPLLAFRSFKHAMDLVPFVINKIMDVTSALIEEGAMTLIVPGNLPIGCSAALLERFNDNSGWLYDSRNQCYMPLNNLAKLHNDKLKKGLAALRKKYPYAKIIYADYYSSAMQFFNSPSKYGFTGSVLKACCGGGDGRYNVQPNVRCGEKGSTTCEDPSTYANWDGIHLTEAAYRHIATGLISGRFTMPTYN

SEQ ID NO: 99944 - DNA, 1245 bp, Arabidopsis thaliana
  misc_feature (1)..(1245): Ceres Seq. ID no. 13603979
  misc_feature (1)..(1245): Ortholog of  Ceres SEQ ID NO 13593955 as cited in SEQ ID NO 54278
  misc_feature (1)..(1245): Ortholog of  Ceres SEQ ID NO 13597380 as cited in SEQ ID NO 64054
  misc_feature (1)..(1245): Ortholog of  Ceres SEQ ID NO 12625474 as cited in SEQ ID NO 64169
  misc_feature (1)..(1245): Ortholog of  Ceres SEQ ID NO 13597502 as cited in SEQ ID NO 64681
atatgacatttacattctctcaaaagaaactttctacataatataaaaagtcacacattctctctattaattaaacatgttgcttgttgcgtttgtgactcttttggtagcagtagctttgcagccactaccgtcagtgttgtctttggacgttcaccttcttcggcagctagccgcaaagcacaatgtgacatcgatacttgtgtttggagattctagtgtcgatccagggaacaataatttcattaaaaccgaaatgaaagggaattttccaccttatggtgaaaatttcatcaaccataaacccaccggtagattatgcgatggattactcgctcccgattatattgcggaggccatgggttaccctcccataccggcttttcttgatccatccctaacccaagctgatctaactcgcggtgcaagttttgcctctgctggttctggctatgacgatctcacagctaatatatcaaacgtatggagtttcactacacaagccaattactttctacattacaagattcatctgactaaattggtcggtccattagagagcgctaaaatgataaataatgctatatttcttatgagtatgggatcaaatgactttcttcaaaattacttagtcgattttactcgacaaaagcaattcacggttgagcaatacatcgagtttctctcccaccgtatgctttacgacgccaagatgttgcataggcttggagctaaaaggttggtggtagtgggagttcctcccatgggatgcatgcctttaattaaatacctacgaggccaaaaaacttgtgtagatcaactaaaccaaatcgctttctcctttaacgccaaaatcatcaaaaatctagagcttcttcagtctaaaatcggtttgaaaaccatctacgttgatgcttattcgaccatccaagaagccattaaaaatccgagaaaatttggtttcgtcgaggcttcgctaggctgttgtggaacaggtacatacgaatatggagagacatgcaaagatatgcaagtatgcaaagatcctaccaaatacgttttttgggacgctgtccatccaacacaaagaatgtatcaaatcattgttaagaaggcaatcgcatccatcagtgaagagtttcttgtttagaaatattatatgtttgtattttactatcatgatttatgaaaaattctagatgtaattgaaaagcattcaaaatgttaaatttaatggttcaaatc

SEQ ID NO: 99945 - protein, 357 aa, Arabidopsis thaliana
  peptide (1)..(357): Ceres Seq. ID no. 13603980
MLLVAFVTLLVAVALQPLPSVLSLDVHLLRQLAAKHNVTSILVFGDSSVDPGNNNFIKTEMKGNFPPYGENFINHKPTGRLCDGLLAPDYIAEAMGYPPIPAFLDPSLTQADLTRGASFASAGSGYDDLTANISNVWSFTTQANYFLHYKIHLTKLVGPLESAKMINNAIFLMSMGSNDFLQNYLVDFTRQKQFTVEQYIEFLSHRMLYDAKMLHRLGAKRLVVVGVPPMGCMPLIKYLRGQKTCVDQLNQIAFSFNAKIIKNLELLQSKIGLKTIYVDAYSTIQEAIKNPRKFGFVEASLGCCGTGTYEYGETCKDMQVCKDPTKYVFWDAVHPTQRMYQIIVKKAIASISEEFLV

SEQ ID NO: 99946 - protein, 297 aa, Arabidopsis thaliana; identical to SEQ ID NO: 34920
  peptide (1)..(297): Ceres Seq. ID no. 13603981

SEQ ID NO: 99947 - protein, 263 aa, Arabidopsis thaliana; identical to SEQ ID NO: 34921
  peptide (1)..(263): Ceres Seq. ID no. 13603982

SEQ ID NO: 99948 - DNA, 1318 bp, Arabidopsis thaliana
  misc_feature (1)..(1318): Ceres Seq. ID no. 13603983
  misc_feature (1)..(1318): Ortholog of  Ceres SEQ ID NO 13593955 as cited in SEQ ID NO 54278
  misc_feature (1)..(1318): Ortholog of  Ceres SEQ ID NO 13655302 as cited in SEQ ID NO 63307
  misc_feature (1)..(1318): Ortholog of  Ceres SEQ ID NO 13597380 as cited in SEQ ID NO 64054
  misc_feature (1)..(1318): Ortholog of  Ceres SEQ ID NO 12625474 as cited in SEQ ID NO 64169
  misc_feature (1)..(1318): Ortholog of  Ceres SEQ ID NO 13597502 as cited in SEQ ID NO 64681
cagactactcatttgtctccactccaaactttcacaacaatgagaagtcatcacagacatttttcttcatatgtttccttcatcctcttcctattcctgttcttcatctccttctcatcctcaacatcaaaactcgaacccgcaaagtctgaacctaaaagaaaacattcagtttcagctattctcgtgttcggagattcaacagtggatccgggcaataacaactacattgacacagtattcaagtgtaattttccgccctatggactcgatttcagaaacaaaactccgaccggtagattttgcaacggtcgactcgtcacagattttatcgcttcatacattggtgtgaaggagaatgtgccaccgtatttggacccaaatcttggaataaatgagttaataagtggagttagctttgcttcagctggctctggatatgatcctctcactccaaccataactaacgtgatagacattccgactcagctagagtatttcagagaatacaagagaaaattggagggtaaaatgggaaaacaagaaatggaaaaacacatagaagaagctatgttttgtgtaagtgcaggaaccaacgatttcgtcattaattatttcacaattcccatacgaaggaagacttttactatcgaagcttatcaacaattcgttatttccaatctcaagcaatttatccagggtttgtggaaagaaggagcaagaaagataacagtggcaggtttaccaccgattgggtgtttgccgattgttataacattattctccggcgaagcattgaccaaccgtcgttgcattgaccgtttctccactgtggccacaaactacaatttcctcttacaaaaacaattggccctcatgcaagtgggtttggcccatcttggatccaaaatcttttacctcgacgtctataacccagtttatgaggtcattcgtgaccctcgaaaattcgggttcgaggaagtcttcagtggatgttgtggaagtggatacctagaggcatcgtttttgtgtaatccaaagtcatatgtgtgtcccaatacatctgcttatgtcttctttgactctatccatccaagtgagaagacttacttcagtctttttagatctctccgaccaatttatgattctattctcggttctttctgaaatttttaattaatattatgatcactattagctaattgataagttaatttcaatttacatacacctctttcttccattatgagtgacgaaatgtaatgttggtctatgtgttaatatttcagtttgaaatgcaaaataattagtgtacttg

SEQ ID NO: 99949 - protein, 388 aa, Arabidopsis thaliana
  peptide (1)..(388): Ceres Seq. ID no. 13603984
QTTHLSPLQTFTTMRSHHRHFSSYVSFILFLFLFFISFSSSTSKLEPAKSEPKRKHSVSAILVFGDSTVDPGNNNYIDTVFKCNFPPYGLDFRNKTPTGRFCNGRLVTDFIASYIGVKENVPPYLDPNLGINELISGVSFASAGSGYDPLTPTITNVIDIPTQLEYFREYKRKLEGKMGKQEMEKHIEEAMFCVSAGTNDFVINYFTIPIRRKTFTIEAYQQFVISNLKQFIQGLWKEGARKITVAGLPPIGCLPIVITLFSGEALTNRRCIDRFSTVATNYNFLLQKQLALMQVGLAHLGSKIFYLDVYNPVYEVIRDPRKFGFEEVFSGCCGSGYLEASFLCNPKSYVCPNTSAYVFFDSIHPSEKTYFSLFRSLRPIYDSILGSF

SEQ ID NO: 99950 - protein, 375 aa, Arabidopsis thaliana
  peptide (1)..(375): Ceres Seq. ID no. 13603985
MRSHHRHFSSYVSFILFLFLFFISFSSSTSKLEPAKSEPKRKHSVSAILVFGDSTVDPGNNNYIDTVFKCNFPPYGLDFRNKTPTGRFCNGRLVTDFIASYIGVKENVPPYLDPNLGINELISGVSFASAGSGYDPLTPTITNVIDIPTQLEYFREYKRKLEGKMGKQEMEKHIEEAMFCVSAGTNDFVINYFTIPIRRKTFTIEAYQQFVISNLKQFIQGLWKEGARKITVAGLPPIGCLPIVITLFSGEALTNRRCIDRFSTVATNYNFLLQKQLALMQVGLAHLGSKIFYLDVYNPVYEVIRDPRKFGFEEVFSGCCGSGYLEASFLCNPKSYVCPNTSAYVFFDSIHPSEKTYFSLFRSLRPIYDSILGSF

SEQ ID NO: 99951 - protein, 211 aa, Arabidopsis thaliana
  peptide (1)..(211): Ceres Seq. ID no. 13603986
MGKQEMEKHIEEAMFCVSAGTNDFVINYFTIPIRRKTFTIEAYQQFVISNLKQFIQGLWKEGARKITVAGLPPIGCLPIVITLFSGEALTNRRCIDRFSTVATNYNFLLQKQLALMQVGLAHLGSKIFYLDVYNPVYEVIRDPRKFGFEEVFSGCCGSGYLEASFLCNPKSYVCPNTSAYVFFDSIHPSEKTYFSLFRSLRPIYDSILGSF

SEQ ID NO: 99952 - DNA, 889 bp, Arabidopsis thaliana
  misc_feature (1)..(889): Ceres Seq. ID no. 13603987
  misc_feature (1)..(889): Ortholog of  Ceres SEQ ID NO 15172893 as cited in SEQ ID NO 51869
  misc_feature (1)..(889): Ortholog of  Ceres SEQ ID NO 12610734 as cited in SEQ ID NO 56268
  misc_feature (1)..(889): Ortholog of  Ceres SEQ ID NO 13655072 as cited in SEQ ID NO 62639
agggttttcgtctctttcactcgtaaccggaagagaggacaagatcctccactaatttcacaaaaagctcatctttttattcgttttcgaatcgattcgttatctgggttcaagtatcaaattctctggtttcgtttttcgtttttgatttgttctctctctttcggaaaaagtttggttttttttttgtttgaaacaatgggaagaggcaagttcaagggtaaacctaccggccaacgccgattctctagtgctgctgatattcttgctggcacatctgctgcacgtcctcgatcattcaaacagaaagaagctgagtacgaagaagatgttgaagaagagtcagaggaggaatctgaagaagaatccgaagatgaagctgatgtgaagaagaaaggagctgaagctgttatcgaagttgataaccctaacagagtaagacaaaagaccttgaaagcaaaagacctcgatgctagtaaaaccactgaactctcaaggcgtgaaagagaggagctagagaagcagcgagctcatgagcgatacatgaggttgcaagagcaaggcaaaaccgaacaagcaaggaaggacttggatcgtttggctctgattcgccaacagagagaagaagctgccaagaagcgagaagaggaaaaagccgcaagagacgctaagaaagtcgaagggcgcaaatgagaagtgatcacactcaaaagacctgcctactatgcgattaagatgtgttgtttttactttgttctttttcgattgataaaagataaaacctctgctatttactctgttatctctcgattttaagttcggtttaaaaggattggatgtagttcaaaatataaactcgtttaagatttatgcgtggaagcttcctcag

SEQ ID NO: 99953 - protein, 230 aa, Arabidopsis thaliana
  peptide (1)..(230): Ceres Seq. ID no. 13603988
RVFVSFTRNRKRGQDPPLISQKAHLFIRFRIDSLSGFKYQILWFRFSFLICSLSFGKSLVFFLFETMGRGKFKGKPTGQRRFSSAADILAGTSAARPRSFKQKEAEYEEDVEEESEEESEEESEDEADVKKKGAEAVIEVDNPNRVRQKTLKAKDLDASKTTELSRREREELEKQRAHERYMRLQEQGKTEQARKDLDRLALIRQQREEAAKKREEEKAARDAKKVEGRK

SEQ ID NO: 99954 - protein, 164 aa, Arabidopsis thaliana; identical to SEQ ID NO: 40513
  peptide (1)..(164): Ceres Seq. ID no. 13603989

SEQ ID NO: 99955 - DNA, 1430 bp, Arabidopsis thaliana
  misc_feature (1)..(1430): Ceres Seq. ID no. 13603990
  misc_feature (1)..(1430): Ortholog of  Ceres SEQ ID NO 13597805 as cited in SEQ ID NO 64186
aaattcaaaaaaaaatcttagatcaggtggaatctaccagagagcacgcgattctagatcgatccaccggtgagagacgccggagtttttatccccgcggcggagtaaaccatttcttcttcccgatgtatcagtgaagttaagtagtcgagagaggggataatgatggaagtggaaggatcgatgaatcgtgctcctgatcaatcatccttcttacgatcaagacgatccaaagctctgtatcagtttaagcagcagaaactcccagcttgtaagccagtcttaacaccaatatcggttataacagtgtttatgttaatgggttttgttttcattcccattggtctcattactcttcgtgcttctcgtgatgctattgaaattatagaccggtatgatgttgagtgcattcctgaagaatatagaaccaacaaactgttgtatataactgattcatctatcccaaagaattgtacgcgctacttgaaggtacaaaagtatatgaaagctcccatttttatctactaccagcttgataactactatcaaaaccatcgccggtatgtaaagagtagaagtgatcagcaactattacatggactggagtatagccacacaagttcttgtgaacccgaggagtcatctaatggtctcccaattgttccttgtgggttaattgcttggagtatgttcaatgatacatttacgttttctcgcgaaagaacaaaactgaatgtgagccggaataacattgcgtggaagagtgaccgcgagcacaagtttggaaagaatgtgtatcctatcaatttccagaacggaactttgattggtggagcaaagttggatccaaaaattccactaagtgaccaagaggactttatagtgtggatgcgagcagctgctttactaagcttccggaaattatatggaagaatcgaagaggacttggaaccaggaaaagttgttgaagtaaatttgatgaacaattacaacacttatagctttagtgggcagaagaagcttattctctccacatcaaattggttaggaggaagaaatgatttcctgggtatcacctatcttgtcgttggttcctcttccatagtcatatccatcatcttcatgttgctccatttgaaaaatccaaggccatacggtgacaattcttggaacaagaaaagcctttcaagttgagaagctgttacattctttctctaacagattcatattccaggttcatatatattcctacatactcaagagccatactttgtctatatatatatgatcatctaggtttaaggagtatataacgtatgtatgagcctatagttctagaaaactgataaggttcctctgttttctttacgatccttgtgtgttcggattgcgggttctaaagattcaacaaaaagataattgtttgaccc

SEQ ID NO: 99956 - protein, 343 aa, Arabidopsis thaliana
  peptide (1)..(343): Ceres Seq. ID no. 13603991
MMEVEGSMNRAPDQSSFLRSRRSKALYQFKQQKLPACKPVLTPISVITVFMLMGFVFIPIGLITLRASRDAIEIIDRYDVECIPEEYRTNKLLYITDSSIPKNCTRYLKVQKYMKAPIFIYYQLDNYYQNHRRYVKSRSDQQLLHGLEYSHTSSCEPEESSNGLPIVPCGLIAWSMFNDTFTFSRERTKLNVSRNNIAWKSDREHKFGKNVYPINFQNGTLIGGAKLDPKIPLSDQEDFIVWMRAAALLSFRKLYGRIEEDLEPGKVVEVNLMNNYNTYSFSGQKKLILSTSNWLGGRNDFLGITYLVVGSSSIVISIIFMLLHLKNPRPYGDNSWNKKSLSS

SEQ ID NO: 99957 - protein, 342 aa, Arabidopsis thaliana
  peptide (1)..(342): Ceres Seq. ID no. 13603992
MEVEGSMNRAPDQSSFLRSRRSKALYQFKQQKLPACKPVLTPISVITVFMLMGFVFIPIGLITLRASRDAIEIIDRYDVECIPEEYRTNKLLYITDSSIPKNCTRYLKVQKYMKAPIFIYYQLDNYYQNHRRYVKSRSDQQLLHGLEYSHTSSCEPEESSNGLPIVPCGLIAWSMFNDTFTFSRERTKLNVSRNNIAWKSDREHKFGKNVYPINFQNGTLIGGAKLDPKIPLSDQEDFIVWMRAAALLSFRKLYGRIEEDLEPGKVVEVNLMNNYNTYSFSGQKKLILSTSNWLGGRNDFLGITYLVVGSSSIVISIIFMLLHLKNPRPYGDNSWNKKSLSS

SEQ ID NO: 99958 - protein, 336 aa, Arabidopsis thaliana
  peptide (1)..(336): Ceres Seq. ID no. 13603993
MNRAPDQSSFLRSRRSKALYQFKQQKLPACKPVLTPISVITVFMLMGFVFIPIGLITLRASRDAIEIIDRYDVECIPEEYRTNKLLYITDSSIPKNCTRYLKVQKYMKAPIFIYYQLDNYYQNHRRYVKSRSDQQLLHGLEYSHTSSCEPEESSNGLPIVPCGLIAWSMFNDTFTFSRERTKLNVSRNNIAWKSDREHKFGKNVYPINFQNGTLIGGAKLDPKIPLSDQEDFIVWMRAAALLSFRKLYGRIEEDLEPGKVVEVNLMNNYNTYSFSGQKKLILSTSNWLGGRNDFLGITYLVVGSSSIVISIIFMLLHLKNPRPYGDNSWNKKSLSS

SEQ ID NO: 99959 - DNA, 1459 bp, Arabidopsis thaliana
  misc_feature (1)..(1459): Ceres Seq. ID no. 13603994
  misc_feature (1)..(1459): Ortholog of  Ceres SEQ ID NO 15177858 as cited in SEQ ID NO 51624
  misc_feature (1)..(1459): Ortholog of  Ceres SEQ ID NO 15171249 as cited in SEQ ID NO 52276
  misc_feature (1)..(1459): Ortholog of  Ceres SEQ ID NO 13594189 as cited in SEQ ID NO 58890
atcgcatttcagttgttcaacttcttcgtcgtcgtcttcttcctttgctccgtcgtcgagatctcgtcgaacctcaaatctcaaatctcctgtaaccagatcgtctaattatccgatctgcgtttcgaatctcagatcgaagatgccggtggctgcttccgccatctattttctgaatctccgtggcgatgtactcataaatcgcacctaccgagatgacgtcgggggaaacatggtggatgcatttcgtacgcatataatgcagacgaaagagttagggaattgtcctgtgcgtcagattggtggctgctcctttgtttatatgcgaatcagcaatgtctacatcgtcattgttgtcagtagcaatgctaatgttgcttgtggattcaaatttgttgttgaggctgtagctttgttcaaatcatactttggtggagcttttgatgaagacgctattagaaataactttgttctgatttatgaattgttggatgagattatggactttggctatccacaaaatctctcacctgaaattttaaaactttatatcactcaggaaggtgtacggtcaccattttcatcgaagccaaaagacaaacctgttccaaatgcaacattacaagttacaggtgctgttggttggagaagagagggccttgcttacaaaaagaatgaggtgtttctggatattgtggaaagtgtaaaccttctgatgtcctctaaaggcaatgttcttcggtgtgatgtgacggggaaggttttaatgaaatgtttcctttcgggaatgcctgatttgaagttggggttgaatgataaaattggtcttgagaaggaatcagaaatgaaatctcgcccagctaagagtggtaaaaccattgagcttgatgatgtcacatttcaccagtgtgtgaacctgaccagattcaactccgagaagactgttagttttgtaccaccggatggagagtttgaactgatgaagtatcgaataacagagggtgtaaatctgcctttccgtgtattaccaacaatcaaagaacttggtcgtacacgtatggaagtaaatgtcaaggtcaaaagtgtgtttggtgctaaaatgtttgcccttggggtcgtggttaaaattccagtgccaaaacaaacagccaagaccaatttccaagtgacaactggtcgcgctaaatacaatccatcaatcgattgcttggtttggaagataagaaaattcccagggcaaacagagtccacgctaagtgcagaaattgagttgatctcaacaatgggagagaagaaatcttggacaaggccaccgatccaaatggaatttcaggtgccaatgttcacagcatctggtctgcgagttcgttttctcaaggtttgggagaagagcggttacaacacggtcgagtgggttcgatacataacgaaagcgggatcttacgagatcagatgctga

SEQ ID NO: 99960 - protein, 485 aa, Arabidopsis thaliana
  peptide (1)..(485): Ceres Seq. ID no. 13603995
SHFSCSTSSSSSSSFAPSSRSRRTSNLKSPVTRSSNYPICVSNLRSKMPVAASAIYFLNLRGDVLINRTYRDDVGGNMVDAFRTHIMQTKELGNCPVRQIGGCSFVYMRISNVYIVIVVSSNANVACGFKFVVEAVALFKSYFGGAFDEDAIRNNFVLIYELLDEIMDFGYPQNLSPEILKLYITQEGVRSPFSSKPKDKPVPNATLQVTGAVGWRREGLAYKKNEVFLDIVESVNLLMSSKGNVLRCDVTGKVLMKCFLSGMPDLKLGLNDKIGLEKESEMKSRPAKSGKTIELDDVTFHQCVNLTRFNSEKTVSFVPPDGEFELMKYRITEGVNLPFRVLPTIKELGRTRMEVNVKVKSVFGAKMFALGVVVKIPVPKQTAKTNFQVTTGRAKYNPSIDCLVWKIRKFPGQTESTLSAEIELISTMGEKKSWTRPPIQMEFQVPMFTASGLRVRFLKVWEKSGYNTVEWVRYITKAGSYEIRC

SEQ ID NO: 99961 - protein, 438 aa, Arabidopsis thaliana; identical to SEQ ID NO: 76506
  peptide (1)..(438): Ceres Seq. ID no. 13603996

SEQ ID NO: 99962 - protein, 408 aa, Arabidopsis thaliana; identical to SEQ ID NO: 76507
  peptide (1)..(408): Ceres Seq. ID no. 13603997

SEQ ID NO: 99963 - DNA, 1209 bp, Arabidopsis thaliana
  misc_feature (1)..(1209): Ceres Seq. ID no. 13603998
  misc_feature (1)..(1209): Ortholog of  Ceres SEQ ID NO 13597019 as cited in SEQ ID NO 64303
  misc_feature (1)..(1209): Ortholog of  Ceres SEQ ID NO 13654191 as cited in SEQ ID NO 68235
aaggaataaacttcgtgaagagaaatgactctagaagctttatcatcaaacggtcttttaaactttttgctctctgaaactctttcaccaactccattcaagtctctcgtcgatctcgagccattgccggaaaatgatgtcatcatatcgaagaacacaatttcggagatatctaatcaagaaccgccaccacagcgacaaccaccagctacgaatcgagggaagaagcggcggaggaggaagcctagggtttgcaaaaacgaggaagaagctgagaatcaacgaatgactcacattgccgtcgaaagaaatcgaagaagacaaatgaatcaacatctctctgtcttgcgatctctcatgcctcaaccttttgctcacaagggtgatcaagcttcaatagttggtggagccatagatttcatcaaagaacttgaacacaaattactatctcttgaagctcaaaaacatcataatgctaaattaaaccagtcggttacttcttcaacaagtcaagactcaaatggtgaacaagagaatcctcatcaaccatcttcactatctctatcgcagttctttcttcattcatacgatccgagccaagagaataggaacggctcaacaagctcggtgaaaacccctatggaagatcttgaggtgactctaatcgaaactcatgctaacatcagaatcttgtcgagaagaagaggtttccggtggagcacgttggccaccaccaaaccgccgcagctttcgaagctggtggcttctctacaatcgctgtccctctccattcttcaccttagtgtcacaacattggacaattatgctatttactccatcagcgctaaggtggaagagagttgccagctaagttcagtagatgacattgcaggagcagttcaccacatgctaagtatcattgaagaggagcctttttgttgctcatcaatgtcagaattaccatttgacttctctttgaatcactcaaatgtcactcattctctctgagaaatctcttttttgttgttgttattccttcttttaattttatcacatagcacatctttagtttttttttttcagaatgaagaaacacataagctttcttttaaaatcctaggttctttttctgactttgtaaaggctaaatgtgaatttataatggcacataacatattagttgttttactcttaattttatgcattttc

SEQ ID NO: 99964 - protein, 327 aa, Arabidopsis thaliana
  peptide (1)..(327): Ceres Seq. ID no. 13603999
MTLEALSSNGLLNFLLSETLSPTPFKSLVDLEPLPENDVIISKNTISEISNQEPPPQRQPPATNRGKKRRRRKPRVCKNEEEAENQRMTHIAVERNRRRQMNQHLSVLRSLMPQPFAHKGDQASIVGGAIDFIKELEHKLLSLEAQKHHNAKLNQSVTSSTSQDSNGEQENPHQPSSLSLSQFFLHSYDPSQENRNGSTSSVKTPMEDLEVTLIETHANIRILSRRRGFRWSTLATTKPPQLSKLVASLQSLSLSILHLSVTTLDNYAIYSISAKVEESCQLSSVDDIAGAVHHMLSIIEEEPFCCSSMSELPFDFSLNHSNVTHSL

SEQ ID NO: 99965 - protein, 240 aa, Arabidopsis thaliana
  peptide (1)..(240): Ceres Seq. ID no. 13604000
MTHIAVERNRRRQMNQHLSVLRSLMPQPFAHKGDQASIVGGAIDFIKELEHKLLSLEAQKHHNAKLNQSVTSSTSQDSNGEQENPHQPSSLSLSQFFLHSYDPSQENRNGSTSSVKTPMEDLEVTLIETHANIRILSRRRGFRWSTLATTKPPQLSKLVASLQSLSLSILHLSVTTLDNYAIYSISAKVEESCQLSSVDDIAGAVHHMLSIIEEEPFCCSSMSELPFDFSLNHSNVTHSL

SEQ ID NO: 99966 - protein, 227 aa, Arabidopsis thaliana
  peptide (1)..(227): Ceres Seq. ID no. 13604001
MNQHLSVLRSLMPQPFAHKGDQASIVGGAIDFIKELEHKLLSLEAQKHHNAKLNQSVTSSTSQDSNGEQENPHQPSSLSLSQFFLHSYDPSQENRNGSTSSVKTPMEDLEVTLIETHANIRILSRRRGFRWSTLATTKPPQLSKLVASLQSLSLSILHLSVTTLDNYAIYSISAKVEESCQLSSVDDIAGAVHHMLSIIEEEPFCCSSMSELPFDFSLNHSNVTHSL

SEQ ID NO: 99967 - DNA, 1109 bp, Arabidopsis thaliana
  misc_feature (1)..(1109): Ceres Seq. ID no. 13604002
  misc_feature (1)..(1109): Ortholog of  Ceres SEQ ID NO 13639514 as cited in SEQ ID NO 55736
  misc_feature (1)..(1109): Ortholog of  Ceres SEQ ID NO 14312254 as cited in SEQ ID NO 59148
  misc_feature (1)..(1109): Ortholog of  Ceres SEQ ID NO 13662804 as cited in SEQ ID NO 65394
  misc_feature (1)..(1109): Ortholog of  Ceres SEQ ID NO 13656519 as cited in SEQ ID NO 69226
tacattgtcgacattggtaggataagtaggactctttctcattgcttttcgcttcgtcttcttctctctaaaactctttctctgcaagaaaaccaatctctctctctttcactttcttaaaccctttatctctctaaaaccctcctttttaggtaaaaaagttttggtgctgactcaaaaaaggttgggtcttttactgcattttgaaatggcgattgaagattacgagaacccaaatcgagaaatcaaacctaagaacagaagattcatggaaggagagaatcagtggcctatatggctcaaacctttactaaaccaacacttttttgctcaatgcaagtttcatggacacttacctagaaccgaatgcaaaatgtattgcttagactgtaccaatgactcgttttgttctctctgtctttctgaacacgagaatcatcgtaccattcagataaggatatcatcttatcataatgtgacaaaggtcgatgagatacagaaatacttagacatatcaagcattcagacatatgtgatcaatagctcaaaggttttgttcttgaatgagaggcctcagtctaagcctggtaaaggttttactaatgcctgcatggtctgttatcgtggccttgccgaaaactgcttccgcttctgctctattggctgcaaggttgcaggaacatctggagtcttccagaagagagtgaagcatacaacgaatgactcagataattcaaacaacagttctggagtggagaataacagttctggagcagagaatggtaattcaaatctgcagagtctcagtccacctacacctcaatttcctcctcgttctctgcgaaagcgactaaggaagggaattcctcaccgagctccatttagttgagattgtgatcaagaaaaagaagaagaagcttgtgttacgtagtgctatggattagtcaaacaactagtaagtgtatatatatatatacaatatcttcttgtaaagttttggtgtgatgcaatgagactagacagtgagtggtttatggtgtttttatgactatttccttgttctaaattttgtttttgattagattatatgacaaaaatagataattagt

SEQ ID NO: 99968 - protein, 226 aa, Arabidopsis thaliana; identical to SEQ ID NO: 37799
  peptide (1)..(226): Ceres Seq. ID no. 13604003

SEQ ID NO: 99969 - protein, 206 aa, Arabidopsis thaliana; identical to SEQ ID NO: 37800
  peptide (1)..(206): Ceres Seq. ID no. 13604004

SEQ ID NO: 99970 - protein, 171 aa, Arabidopsis thaliana; identical to SEQ ID NO: 37801
  peptide (1)..(171): Ceres Seq. ID no. 13604005

SEQ ID NO: 99971 - DNA, 783 bp, Arabidopsis thaliana
  misc_feature (1)..(783): Ceres Seq. ID no. 13604010
  misc_feature (1)..(783): Ortholog of  Ceres SEQ ID NO 13582388 as cited in SEQ ID NO 56812
  misc_feature (1)..(783): Ortholog of  Ceres SEQ ID NO 14305353 as cited in SEQ ID NO 57710
aaagaaaagatgttgtgtagaatggtggtggtgactggccggaaaaagaaacccggttcggttccggtttatctgaatgtatacgatctcacacccatcaatggctacgcttactggttaggacttgggatctatcactctggtgttgaagttcatggagttgaatatggttttggagctcacgatcattcgactaccgggatattcgaggtggaaccgaagcaatgtccgggtttcacatttaggaagtctatattgattggaagaactgatttagatcctgaaaacgttcgtgtctttatggagaaacttgcggaagaatatagtggaaacagttatcatttgattactaagaattgcaatcacttttgcaatgatgtttgtgtgcaactgactcgaagatcgatccctagttgggttaaccgtcttgctcgctttggtttgttttgcaactgtgttctgccggcggagttgaatgagactaaggtgaggcaggtgagatcaaaggaagagaagattccggaagtagagaagaagaaacttcggagtagatcaagtaggtttccacctggtccttcgctttcttcgtcgggttctttaaaccgaagcagaagaggagaaaggagaagacaatgtcttcctccatcaccaactgtgagtgtttagctctagtcctagtaaaattatacctttttgtttcgcaatttgattcggtagtaatgtttaagctacaagatatggattgaacaaacattttcttgatagtaatggtataagattttc

SEQ ID NO: 99972 - protein, 221 aa, Arabidopsis thaliana
  peptide (1)..(221): Ceres Seq. ID no. 13604011
KEKMLCRMVVVTGRKKKPGSVPVYLNVYDLTPINGYAYWLGLGIYHSGVEVHGVEYGFGAHDHSTTGIFEVEPKQCPGFTFRKSILIGRTDLDPENVRVFMEKLAEEYSGNSYHLITKNCNHFCNDVCVQLTRRSIPSWVNRLARFGLFCNCVLPAELNETKVRQVRSKEEKIPEVEKKKLRSRSSRFPPGPSLSSSGSLNRSRRGERRRQCLPPSPTVSV

SEQ ID NO: 99973 - protein, 218 aa, Arabidopsis thaliana
  peptide (1)..(218): Ceres Seq. ID no. 13604012
MLCRMVVVTGRKKKPGSVPVYLNVYDLTPINGYAYWLGLGIYHSGVEVHGVEYGFGAHDHSTTGIFEVEPKQCPGFTFRKSILIGRTDLDPENVRVFMEKLAEEYSGNSYHLITKNCNHFCNDVCVQLTRRSIPSWVNRLARFGLFCNCVLPAELNETKVRQVRSKEEKIPEVEKKKLRSRSSRFPPGPSLSSSGSLNRSRRGERRRQCLPPSPTVSV

SEQ ID NO: 99974 - protein, 214 aa, Arabidopsis thaliana
  peptide (1)..(214): Ceres Seq. ID no. 13604013
MVVVTGRKKKPGSVPVYLNVYDLTPINGYAYWLGLGIYHSGVEVHGVEYGFGAHDHSTTGIFEVEPKQCPGFTFRKSILIGRTDLDPENVRVFMEKLAEEYSGNSYHLITKNCNHFCNDVCVQLTRRSIPSWVNRLARFGLFCNCVLPAELNETKVRQVRSKEEKIPEVEKKKLRSRSSRFPPGPSLSSSGSLNRSRRGERRRQCLPPSPTVSV

SEQ ID NO: 99975 - DNA, 1727 bp, Arabidopsis thaliana
  misc_feature (1)..(1727): Ceres Seq. ID no. 13604018
  misc_feature (1)..(1727): Ortholog of  Ceres SEQ ID NO 14312293 as cited in SEQ ID NO 58744
  misc_feature (1)..(1727): Ortholog of  Ceres SEQ ID NO 15177596 as cited in SEQ ID NO 59731
tctgtgtctttttttttttttttggtgataattgaaacatatgaaacaatcgtcgtcatagaagcagcagagattcaccttctttctttatctttccctctcagaaacaggaaacaaaattcaaaaagaacaaaaaaaaaaaggtcaaaccaaaacgatggcgtttcatcacaatcatctctcacaagacctctccttcaatcatttcaccgaccaacaccaacctccacctccgcaaccgcctcctcctcctccgcaacagcaacaacatttccaagaagcaccgcctcctaattggttaaacacagcgcttcttcgttcctcagataacaacaataacttcctcaacctccacacagccaccgctaacaccacaaccgcaagcagctccgattctccttcctccgccgccgccgccgccgctgctaaccagtggctatctcgctcctcctctttcctccaacgaaacaacaacaacaacgcttccatagtcggagatgggatcgatgatgtcaccggaggagcagacactatgattcagggagagatgaaaaccggcggtggagaaaacaaaaacgacggcggaggagctacggcggcggatggagtagtgagctggcagaatgcgagacacaaggcggagatcctttcgcatcctctttacgagcagcttttgtcggcgcacgttgcttgtttgagaatcgcgactccggttgatcagcttccgagaatcgatgctcagcttgctcagtctcaacacgtcgtcgctaaatactcagctttaggcgccgccgctcaaggtctcgtcggcgacgataaagaacttgaccagttcatgacacattatgtgttgctactgtgttcatttaaagagcaattgcaacaacatgtgcgtgttcatgcaatggaagctgtgatggcttgttgggagattgagcagtctcttcaaagcttaacaggagtgtctcctggagaagggatgggagcaacaatgtctgacgatgaagatgaacaagtagagagtgatgctaatatgttcgatgggggattagatgtgttgggttttggtcctttgattcctactgagagtgagaggtcgttgatggaaagagttagacaagaacttaaacatgaactcaaacagggttacaaggagaagatagtagacataagagaggagatattaaggaagagaagagctgggaagttaccaggagataccacctctgttctcaaagcttggtggcaatctcattccaaatggccttaccctactgaggaagataaggcgaggttggtgcaagagacaggtttgcagctaaaacagataaacaattggttcatcaatcagagaaagaggaactggcatagcaatccatcttcttccactgtattgaagaacaaacgcaaaagcaatgcaggtgacaatagcggaagagagcggttcgcgtagaaacaacaaacatatgatgtgaattggggaggtggaagatgggatttgaaagcagggttttagggatttaaagttgagaattttatggaggagtttggattatacagagagaggggacagtattagaaagtaactttttgtgcaattacatagtaacgtagtttggttatgtgattatgcccatatattttattaagtagcacacaaaccaaaaagaaaatatgaaaactgaagatgcaggcttttgtttaatgttttttgtttgtttgtctgc

SEQ ID NO: 99976 - protein, 431 aa, Arabidopsis thaliana; identical to SEQ ID NO: 34946
  peptide (1)..(431): Ceres Seq. ID no. 13604019

SEQ ID NO: 99977 - protein, 306 aa, Arabidopsis thaliana; identical to SEQ ID NO: 34947
  peptide (1)..(306): Ceres Seq. ID no. 13604020

SEQ ID NO: 99978 - protein, 301 aa, Arabidopsis thaliana; identical to SEQ ID NO: 34948
  peptide (1)..(301): Ceres Seq. ID no. 13604021

SEQ ID NO: 99979 - DNA, 1433 bp, Arabidopsis thaliana
  misc_feature (1)..(1433): Ceres Seq. ID no. 13604025
  misc_feature (1)..(1433): Ortholog of  Ceres SEQ ID NO 13598741 as cited in SEQ ID NO 62749
  misc_feature (1)..(1433): Ortholog of  Ceres SEQ ID NO 12587535 as cited in SEQ ID NO 64020
  misc_feature (1)..(1433): Ortholog of  Ceres SEQ ID NO 15176854 as cited in SEQ ID NO 64525
  misc_feature (1)..(1433): Ortholog of  Ceres SEQ ID NO 12586366 as cited in SEQ ID NO 68983
  misc_feature (1)..(1433): Ortholog of  Ceres SEQ ID NO 15178891 as cited in SEQ ID NO 0
aattacattttacactcatctcgttctctcttccgtcaatatggaaggcgtcaccgtcgtgtctttcttccttcttttcatcgccaccgccatggccgccaagtccaccgtctccttccgtgacggcatgttaccaaacggagacttcgagctaggaccaaaaccatcagacatgaaaggaacagaaatactaaacaaactagcaataccaaactgggaagtcacaggattcgtcgaatacattaaatcaggacataaacaaggagacatgcttctcgttgttcccgccggtaaattcgctgtaagacttgggaacgaagcatcgatcaaacaaagacttaaagtggttaaaggaatgtattactcactcacttttagtgctgctagaacttgtgcacaagacgagagacttaacatatctgtagcacctgactccggtgtgattccgattcagacggtttatagtagtagtggttgggatttatatgcttgggcgtttcaagctgagagtgatgttgctgaagttgtgattcataatcctggtgttgaggaagatccagcttgtggtccacttattgatggtgttgctatgagatctctttaccctcctagaccaactaataagaacattttgaaaaacggaggatttgaagaaggtccattagtattacccggctcgacaactggagttttgatcccaccgtttatagaagacgaccactctcctttacctggatggatggtggagtctctcaaagctgtcaagtacgtagacgttgaacatttctcagtcccacagggtcgcagagctattgagcttgtagcgggtaaagagagtgccatcgctcaagtggttcggactgtcattgggaagacttacgtgctgtcttttgcggttggagacgccaacaatgcttgcaaaggatcaatggtggttgaggcttttgcaggaaaagatacacttaaggtcccttacgagtcgaaaggcacaggagggtttaaacgagcttctattcgatttgtggcggtttcgacccgatcaagaattatgttctacagcactttctatgccatgaggagcgatgatttctcgtcattgtgtgggcctgtgatcgatgatgtcaagcttataagcgttcgtaaaccatagatgaatcaccaatcctattacaagaaaatgcatcgtgtggtcttcttttattttccttaaactgtctttggtgtgtgttggattttattgaaacgagaaggtgaaaaaaacagagttttatttacgagagttagggttttatataggcagatgggcctttgcttatattgtattttcttgtatgagaaggcaaaagaaacgttgcctatatcttatgtatctaggccttttaatttttatggaagagttacaaaacttacaataaagttgtatgcatatttta

SEQ ID NO: 99980 - protein, 382 aa, Arabidopsis thaliana; identical to SEQ ID NO: 25994
  peptide (1)..(382): Ceres Seq. ID no. 13604026

SEQ ID NO: 99981 - protein, 369 aa, Arabidopsis thaliana; identical to SEQ ID NO: 25995
  peptide (1)..(369): Ceres Seq. ID no. 13604027

SEQ ID NO: 99982 - protein, 352 aa, Arabidopsis thaliana; identical to SEQ ID NO: 25996
  peptide (1)..(352): Ceres Seq. ID no. 13604028

SEQ ID NO: 99983 - DNA, 1390 bp, Arabidopsis thaliana
  misc_feature (1)..(1390): Ceres Seq. ID no. 13604029
  misc_feature (1)..(1390): Ortholog of  Ceres SEQ ID NO 13597161 as cited in SEQ ID NO 63998
aataagaacaataaccaaaaactcccaaattaattttgcttaagcagcagcagaagaagaagcatggcggaacaagaattacagagaatcaatgagaagaagccatggcaagttctcgagttctacagtggaatcggtggaatgagatactctttaatggcgtcaggcatcgtctcagaagtagtagaagcttttgagatcaatgattctgctaatgatgtttatcaacataatttcaaacatcgtccctatcaggggaatattcagagtctcactgctgctgatttagataagtataatgcagatgcttggcttctttctcctccttgtcaaccttatactagacaaggccttcagaaacactctggtgatgctcgggctttttcgtttctcaggattcttgagcttataccgcatacaacaaagcctccacaaatgttatttgtagagaatgttgttggatttgagacttcggatacacatatggaaatgattggtacattaacaaaattagattatgtcacacaagagtttatattgagtccgctgcagtttggtgtgccgtattcaagaccacgttatttctgcctggccaaaagaaaacctctgccatttaagtcccaacacagtaataacaaactactctggtctccagacccgttatatgggcgtgatgatcaggttgagtttggaaaatgtcaagcagaagaaggattggataaattacttgagttttgcaaaccagtagagaagtttctcgagttagctgcacatgttgatggcgagccaagtagtgttgatgactctgaaaatgggtccaaagattgttgtggacaagaaggcgattctgtcccagactctgtacatcagtatctagtaccagttagtttgatagagagatggggaaacgcaatggacattgtttaccctgattcaaagagatgttgttgtttcacaaagagttattatcgatacgtgaagggcacaggttccctattggcaactgtccagccaaaaatcaagggtaaggaatcttgtttgaaggagcaacggcttagatacttcacccctagagaggtagctaactttcactcattccctgaagattttgagttccccaagcacataagccttcgacaaagatacgcaatgcttggaaacagtttaagtgtagcagtggtggctcctctgcttcggtatctattcgattcttgactacacaatttgatgcactaagtgacgcgaccaattaccggaatcagttattctcctgaacaagcttctactacttttttgtttactgataaagttcaaactgatgaacttacgttttgttatcgatccttaactttatgggccagtattttaaatgggccttattcggcccgtt

SEQ ID NO: 99984 - protein, 383 aa, Arabidopsis thaliana
  peptide (1)..(383): Ceres Seq. ID no. 13604030
MAEQELQRINEKKPWQVLEFYSGIGGMRYSLMASGIVSEVVEAFEINDSANDVYQHNFKHRPYQGNIQSLTAADLDKYNADAWLLSPPCQPYTRQGLQKHSGDARAFSFLRILELIPHTTKPPQMLFVENVVGFETSDTHMEMIGTLTKLDYVTQEFILSPLQFGVPYSRPRYFCLAKRKPLPFKSQHSNNKLLWSPDPLYGRDDQVEFGKCQAEEGLDKLLEFCKPVEKFLELAAHVDGEPSSVDDSENGSKDCCGQEGDSVPDSVHQYLVPVSLIERWGNAMDIVYPDSKRCCCFTKSYYRYVKGTGSLLATVQPKIKGKESCLKEQRLRYFTPREVANFHSFPEDFEFPKHISLRQRYAMLGNSLSVAVVAPLLRYLFDS

SEQ ID NO: 99985 - protein, 357 aa, Arabidopsis thaliana
  peptide (1)..(357): Ceres Seq. ID no. 13604031
MRYSLMASGIVSEVVEAFEINDSANDVYQHNFKHRPYQGNIQSLTAADLDKYNADAWLLSPPCQPYTRQGLQKHSGDARAFSFLRILELIPHTTKPPQMLFVENVVGFETSDTHMEMIGTLTKLDYVTQEFILSPLQFGVPYSRPRYFCLAKRKPLPFKSQHSNNKLLWSPDPLYGRDDQVEFGKCQAEEGLDKLLEFCKPVEKFLELAAHVDGEPSSVDDSENGSKDCCGQEGDSVPDSVHQYLVPVSLIERWGNAMDIVYPDSKRCCCFTKSYYRYVKGTGSLLATVQPKIKGKESCLKEQRLRYFTPREVANFHSFPEDFEFPKHISLRQRYAMLGNSLSVAVVAPLLRYLFDS

SEQ ID NO: 99986 - protein, 352 aa, Arabidopsis thaliana
  peptide (1)..(352): Ceres Seq. ID no. 13604032
MASGIVSEVVEAFEINDSANDVYQHNFKHRPYQGNIQSLTAADLDKYNADAWLLSPPCQPYTRQGLQKHSGDARAFSFLRILELIPHTTKPPQMLFVENVVGFETSDTHMEMIGTLTKLDYVTQEFILSPLQFGVPYSRPRYFCLAKRKPLPFKSQHSNNKLLWSPDPLYGRDDQVEFGKCQAEEGLDKLLEFCKPVEKFLELAAHVDGEPSSVDDSENGSKDCCGQEGDSVPDSVHQYLVPVSLIERWGNAMDIVYPDSKRCCCFTKSYYRYVKGTGSLLATVQPKIKGKESCLKEQRLRYFTPREVANFHSFPEDFEFPKHISLRQRYAMLGNSLSVAVVAPLLRYLFDS

SEQ ID NO: 99987 - DNA, 2153 bp, Arabidopsis thaliana
  misc_feature (1)..(2153): Ceres Seq. ID no. 13604033
  misc_feature (1)..(2153): Ortholog of  Ceres SEQ ID NO 14306375 as cited in SEQ ID NO 59766
  misc_feature (1)..(2153): Ortholog of  Ceres SEQ ID NO 13599322 as cited in SEQ ID NO 0
gagacaaaaaggaaaaaaacaaaattaaaattaggaaagttaaaataattttcctgcaaatttcttctttctcagaaatctaaaaaaaaacaatgaagaaaacaccgtaacgaatcataaaatttctcaaaatccaaactctgttttttgttcttcctcttccagatttggtttctttttttgaaaaactctctagcttcagttttttttttctctctctctctctctctaggaatgtttttgttcgtggatactggaatcatgagaataagattttgaaggagaaagcaagatccatgttctttgtcggagaatttagggctaatatgtggatttgagcttctttgattcccaatttgtgaaagttttgaaatttttgggaaagagagaatgtttaagcagtttctgagtaaacttccgaggaagtcttcaaaatctgattcaggagagctgaatcgttcgagttcgggtccggtatcgtctccggttcagagatccggtactagtggtggtggttcgggtccggttcgatctaactcagggaagcgtatgtcatctgctgtgttcccagctagtgttgttgctggtattgagcctttggtaccgtttaaggatgtaccaagctctgagaagttgaatctctttgtgagtaaagttagtctctgttgtgtgacatttgatttctctgaccctggtaaaaactctatagagaaagatgttaaaaggcagacattgttggagcttttggattttgtagcttcagggtctgttaagttcactgagccagctattcttgcaatgtgtagaatgtgtgctgttaatctctttagggtctttcctccgaattatcggtctagttctggtggcgaaaacgatgatgatgaaccgatgtttgaccctgcttggcctcatttgcagattgtgtatgatttgttgcttaagtttatcacttctccgtgtcttgatgctaaagtggcaaaaaagtatttagatcatgctttcattgtgaggttgcttgacttgtttgattcggaggatcctagagaacgggagtgtttgaagacgattctgcatcgggtatatgggaagttcatggttcataggccatttgtacgcaagtccatgagcaatatattctaccggtttgtgtttgagacagagaagcatagcggaatcgctgagcttttggagattttcgggagtatagtgagtggatttgcgttgcctttgaaagaagagcataagatcttcttgtggagagtgttgattccattgcacaagcctaaatctgttggaaactactttcagcagctttcttattgtatcactcagttcatagataaagagccgaaactaggcagtgttgtgataaagggtttgttgaagttctggcctatcacgaatagtcagaaggaagtgatgtttctcggggaggtcgaagaaattgtagaagcaatgagtgtgatggagtttcaaaagatcatggtccctttgttcttgcggattgcttgttgtgtcaccagttcccactttcaggtttctgaaagagctttattcttgtggaacaacgatcaaattgtaaacttgattggacataaccggcaagccatcctaccaatcatgttcactgctttagaaaagaatgctcagaaccactggaaccaatccgtgctaaacttaaccttaaacgtacgaaaaatgttctgcgaaatggacgaggctctgttcatgtcttgccacgcccgctttaaggaggacgaagcaaagcaatgttctgctgcggaaaagaggaaagaagtatgggcaaggctagagaatgcagcaagtatgaagccgataacaggaaagactgctgttctggtaactcctcgagcaacctccatcgcctgctaaatagcgtttaaaccaattcacagacagtttatccaaagcaacaacatcgagaagatgatggagtggctgttgcttaagctatagtcttgggaacttttcatcgaggttgatctctgtaatattatataactttgatgttgttagctgtgtgggttttaatgctaattctattgctttcttttaaagcaatgaaaccatgctgcagatttttatcaaactctttgtatcaatcaattaagtttatatatcctttttctttc

SEQ ID NO: 99988 - protein, 500 aa, Arabidopsis thaliana; identical to SEQ ID NO: 40478
  peptide (1)..(500): Ceres Seq. ID no. 13604034

SEQ ID NO: 99989 - protein, 447 aa, Arabidopsis thaliana; identical to SEQ ID NO: 40479
  peptide (1)..(447): Ceres Seq. ID no. 13604035

SEQ ID NO: 99990 - protein, 364 aa, Arabidopsis thaliana; identical to SEQ ID NO: 40480
  peptide (1)..(364): Ceres Seq. ID no. 13604036

SEQ ID NO: 99991 - DNA, 1937 bp, Arabidopsis thaliana
  misc_feature (1)..(1937): Ceres Seq. ID no. 13604041
  misc_feature (1)..(1937): Ortholog of  Ceres SEQ ID NO 13657677 as cited in SEQ ID NO 66119
atttcgttgcagaaaacatatacttttccgacaaaacatggaagatgttaatcaggagaagaagaaagtacctccaatgtctgaaccagaaagatccacaccgattaagactacaggaggacagtatcgtttctgcaagtcatgtgttgaaggaagtagttgcaggacagtgaggtcaagaaccaagcttatgaacgttttgatagaacgtggaagacctcacgaggctcaaactgttttcaaaacattggcagagacgggacatagaccgtctttgatcagttacacaactcttttagctgcaatgacggttcagaaacagtatggttccataagctctatagtctctgaggtggaacagagcggaaccaaacttgattctatattcttcaatgctgttattaacgctttctctgagtccggtaacatggaagatgcggtgcaagctctgttgaaaatgaaagaacttggtctaaatccgactacgagtacttacaacactttgattaaagggtatgggattgcaggtaagcctgagagatcatctgagttactggatcttatgttggaagagggcaacgtcgatgttggaccgaatataaggacgtttaatgtgttggtgcaagcctggtgcaagaagaagaaggtggaggaggcgtgggaagtggtgaagaagatggaggagtgtggagttaggccggatacggtgacttataacacgattgcaacttgttatgtgcagaaaggagagaccgtgagagctgagagtgaggtggttgagaagatggttatgaaggagaaggcgaaaccgaacggaagaacgtgtgggattgttgtgggagggtattgcagagaagggagagtgagagatggtttgaggtttgtgcggagaatgaaggaaatgagagtggaagcgaatcttgtggtcttcaattctttgatcaatggctttgttgaagtcatggaccgtgatggtatcgatgaggttcttaccttgatgaaggagtgtaacgtgaaggcagatgtaatcacgtacagtactgtgatgaacgcttggagctcagctggatacatggagaaagctgcacaagtgtttaaagaaatggttaaagcaggagtcaaaccagacgctcacgcgtacagcattttagctaaagggtacgttagagcaaaagagccaaagaaagcagaggagcttcttgagacattgatagttgaatccaggcctaacgttgtgatcttcaccactgtgattagcgggtggtgtagcaatggaagtatggatgatgcaatgagggttttcaacaagatgtgcaagttcggggtttcgccaaatataaagacgtttgagactctgatgtggggttacctagaggtgaagcaaccatggaaagcagaagaagttttgcagatgatgagaggatgtggtgtaaagcctgagaattctaccttcttgctgttagcagaagcttggcgtgtcgcgggactcactgatgagtcgaacaaagctatcaatgcattgaaatgtaaagacatagagatcgcaaagttagagaagctgtaccaaaaacagtcctctggtagtagttttaacctattgcagattccagtcgggaaacgggagcttccaaccgcaaaagcgatgaatctttctgcttgtaaactcggagctcgagtgccaatcatatgccagaagcagtcccaagcacagtttgggatcagtggacagtttgtacattcttgtacagtgttcttgagctgaaaggacaaaactgaagccagagatttggtttttctattcttctgttgaaatttgagagtcaatactttgagaactctcactatgtgtaaattacaacagaatagtcttgtatataagaaaaagtattgtacagttgctgttttcaataactgcagactcatagatttggagaaag

SEQ ID NO: 99992 - protein, 586 aa, Arabidopsis thaliana
  peptide (1)..(586): Ceres Seq. ID no. 13604042
FRCRKHILFRQNMEDVNQEKKKVPPMSEPERSTPIKTTGGQYRFCKSCVEGSSCRTVRSRTKLMNVLIERGRPHEAQTVFKTLAETGHRPSLISYTTLLAAMTVQKQYGSISSIVSEVEQSGTKLDSIFFNAVINAFSESGNMEDAVQALLKMKELGLNPTTSTYNTLIKGYGIAGKPERSSELLDLMLEEGNVDVGPNIRTFNVLVQAWCKKKKVEEAWEVVKKMEECGVRPDTVTYNTIATCYVQKGETVRAESEVVEKMVMKEKAKPNGRTCGIVVGGYCREGRVRDGLRFVRRMKEMRVEANLVVFNSLINGFVEVMDRDGIDEVLTLMKECNVKADVITYSTVMNAWSSAGYMEKAAQVFKEMVKAGVKPDAHAYSILAKGYVRAKEPKKAEELLETLIVESRPNVVIFTTVISGWCSNGSMDDAMRVFNKMCKFGVSPNIKTFETLMWGYLEVKQPWKAEEVLQMMRGCGVKPENSTFLLLAEAWRVAGLTDESNKAINALKCKDIEIAKLEKLYQKQSSGSSFNLLQIPVGKRELPTAKAMNLSACKLGARVPIICQKQSQAQFGISGQFVHSCTVFLS

SEQ ID NO: 99993 - protein, 574 aa, Arabidopsis thaliana
  peptide (1)..(574): Ceres Seq. ID no. 13604043
MEDVNQEKKKVPPMSEPERSTPIKTTGGQYRFCKSCVEGSSCRTVRSRTKLMNVLIERGRPHEAQTVFKTLAETGHRPSLISYTTLLAAMTVQKQYGSISSIVSEVEQSGTKLDSIFFNAVINAFSESGNMEDAVQALLKMKELGLNPTTSTYNTLIKGYGIAGKPERSSELLDLMLEEGNVDVGPNIRTFNVLVQAWCKKKKVEEAWEVVKKMEECGVRPDTVTYNTIATCYVQKGETVRAESEVVEKMVMKEKAKPNGRTCGIVVGGYCREGRVRDGLRFVRRMKEMRVEANLVVFNSLINGFVEVMDRDGIDEVLTLMKECNVKADVITYSTVMNAWSSAGYMEKAAQVFKEMVKAGVKPDAHAYSILAKGYVRAKEPKKAEELLETLIVESRPNVVIFTTVISGWCSNGSMDDAMRVFNKMCKFGVSPNIKTFETLMWGYLEVKQPWKAEEVLQMMRGCGVKPENSTFLLLAEAWRVAGLTDESNKAINALKCKDIEIAKLEKLYQKQSSGSSFNLLQIPVGKRELPTAKAMNLSACKLGARVPIICQKQSQAQFGISGQFVHSCTVFLS

SEQ ID NO: 99994 - protein, 561 aa, Arabidopsis thaliana
  peptide (1)..(561): Ceres Seq. ID no. 13604044
MSEPERSTPIKTTGGQYRFCKSCVEGSSCRTVRSRTKLMNVLIERGRPHEAQTVFKTLAETGHRPSLISYTTLLAAMTVQKQYGSISSIVSEVEQSGTKLDSIFFNAVINAFSESGNMEDAVQALLKMKELGLNPTTSTYNTLIKGYGIAGKPERSSELLDLMLEEGNVDVGPNIRTFNVLVQAWCKKKKVEEAWEVVKKMEECGVRPDTVTYNTIATCYVQKGETVRAESEVVEKMVMKEKAKPNGRTCGIVVGGYCREGRVRDGLRFVRRMKEMRVEANLVVFNSLINGFVEVMDRDGIDEVLTLMKECNVKADVITYSTVMNAWSSAGYMEKAAQVFKEMVKAGVKPDAHAYSILAKGYVRAKEPKKAEELLETLIVESRPNVVIFTTVISGWCSNGSMDDAMRVFNKMCKFGVSPNIKTFETLMWGYLEVKQPWKAEEVLQMMRGCGVKPENSTFLLLAEAWRVAGLTDESNKAINALKCKDIEIAKLEKLYQKQSSGSSFNLLQIPVGKRELPTAKAMNLSACKLGARVPIICQKQSQAQFGISGQFVHSCTVFLS

SEQ ID NO: 99995 - DNA, 1164 bp, Arabidopsis thaliana
  misc_feature (1)..(1164): Ceres Seq. ID no. 13604064
  misc_feature (1)..(1164): Ortholog of  Ceres SEQ ID NO 12611829 as cited in SEQ ID NO 56771
  misc_feature (1)..(1164): Ortholog of  Ceres SEQ ID NO 15171735 as cited in SEQ ID NO 57234
  misc_feature (1)..(1164): Ortholog of  Ceres SEQ ID NO 13597018 as cited in SEQ ID NO 64288
  misc_feature (1)..(1164): Ortholog of  Ceres SEQ ID NO 14305124 as cited in SEQ ID NO 0
atctctctcctctctttgtctctctcgcttctgtgatttgggctttttcagatgggaaatgcgaacggcaaagacgaagacgccgccgccggtagcggtggtgcagatgttacctcgtcctcggcgagatctaatggcggcgatccttctgcacgcagtcgtcaccgtcgtccttcttcagactctatgagcagttctcctcccggaagtcctgctcgatctccatctcctttcttattcgctcctcagcccacattgttattccacgttacatcttacaacatttgctcacctatgcgtcacctcttccattgtttaggcttaacatgtgtacctaatggctgcatttcgtgtcggatggttcccgtggctccattgcagagagcaaacgcccctcctcctaataacatccaatggaaccaatcacagagagtttttgataatcccccagagcaaggaatccctaccatcattacatggaaccaaggaggtaatgatgtggcggtggaaggatcatgggacaattggagatcaaggaagaagctgcagaaatcagggaaagaccactcgattctctttgtccttccatctggcatataccactacaaggtgattgtggacggtgaatccaaatacatcccagatttaccctttgtagcagacgaagttggcaatgtctgtaacattctcgatgttcataactttgtgccagaaaacccagaaagcatagtggagtttgaggcgccaccatcacctgatcatagctacggtcaaaccctaccagccgcagaagattacgcgaaagagccactggcggtgccacctcagcttcatctaacacttcttggcactactgaagagacagccatagccacaaagcctcaacatgtggtgcttaaccatgtgttcatagagcaaggatggactcctcaatccatagtagctttgggtttaacccacaggttcgagtctaagtacataactgttgtcctctacaaaccgctcacacggtaaccctaaaaattcagtgccacattgttctctctctttctttctttttcatctctcaattatgtgaaaacatgttctttgttcatagtgactagtgagtgcccaacatttgagtttattaacctctttcttacctggtttgtggtgcttgtg

SEQ ID NO: 99996 - protein, 320 aa, Arabidopsis thaliana
  peptide (1)..(320): Ceres Seq. ID no. 13604065
MGNANGKDEDAAAGSGGADVTSSSARSNGGDPSARSRHRRPSSDSMSSSPPGSPARSPSPFLFAPQPTLLFHVTSYNICSPMRHLFHCLGLTCVPNGCISCRMVPVAPLQRANAPPPNNIQWNQSQRVFDNPPEQGIPTIITWNQGGNDVAVEGSWDNWRSRKKLQKSGKDHSILFVLPSGIYHYKVIVDGESKYIPDLPFVADEVGNVCNILDVHNFVPENPESIVEFEAPPSPDHSYGQTLPAAEDYAKEPLAVPPQLHLTLLGTTEETAIATKPQHVVLNHVFIEQGWTPQSIVALGLTHRFESKYITVVLYKPLTR

SEQ ID NO: 99997 - protein, 275 aa, Arabidopsis thaliana
  peptide (1)..(275): Ceres Seq. ID no. 13604066
MSSSPPGSPARSPSPFLFAPQPTLLFHVTSYNICSPMRHLFHCLGLTCVPNGCISCRMVPVAPLQRANAPPPNNIQWNQSQRVFDNPPEQGIPTIITWNQGGNDVAVEGSWDNWRSRKKLQKSGKDHSILFVLPSGIYHYKVIVDGESKYIPDLPFVADEVGNVCNILDVHNFVPENPESIVEFEAPPSPDHSYGQTLPAAEDYAKEPLAVPPQLHLTLLGTTEETAIATKPQHVVLNHVFIEQGWTPQSIVALGLTHRFESKYITVVLYKPLTR

SEQ ID NO: 99998 - protein, 239 aa, Arabidopsis thaliana
  peptide (1)..(239): Ceres Seq. ID no. 13604067
MRHLFHCLGLTCVPNGCISCRMVPVAPLQRANAPPPNNIQWNQSQRVFDNPPEQGIPTIITWNQGGNDVAVEGSWDNWRSRKKLQKSGKDHSILFVLPSGIYHYKVIVDGESKYIPDLPFVADEVGNVCNILDVHNFVPENPESIVEFEAPPSPDHSYGQTLPAAEDYAKEPLAVPPQLHLTLLGTTEETAIATKPQHVVLNHVFIEQGWTPQSIVALGLTHRFESKYITVVLYKPLTR

SEQ ID NO: 99999 - DNA, 1075 bp, Arabidopsis thaliana
  misc_feature (1)..(1075): Ceres Seq. ID no. 13604068
  misc_feature (1)..(1075): Ortholog of  Ceres SEQ ID NO 12562983 as cited in SEQ ID NO 53309
  misc_feature (1)..(1075): Ortholog of  Ceres SEQ ID NO 14309224 as cited in SEQ ID NO 0
atggctccctcgtttctaagcgtcgcaagattcgttgaggcactactccgccggagattctcctccgctggtctctccttacaaaccctatccatcgactccgaaaccaccatacagttctggggaccaccaccgtcttcatcatcggaaaatacacaaaaaccgtcgctcctcctcctccatggttttggaccttccgctgtatggcaatggagccatcaggtcaagccactctctcacttctttcgtctctacgtccccgacctagtcttcttcggcggctcctcttcctccggtgagaaccggtcggagatgtttcaagcgttgtgcatggggaagcttatggagaagctcgaggtcgagagattcagtgtcgttgggacgagctacggcgggtttgtggcgtataatatggcgaaaatgtttccggagaaagtggagaaggtggtgcttgcgagctccggtgttaatttgcggaggagtgacaacgaggcgtttatcgctagggctaagtgccaccgtatcaaggaggtgatgcttcctgcttctgcaacagatcttaggagattctctgggatggtttcttctaagagactcgattatgtcccagattttgtcttgaacgacttttgccagaaaatgtattcggaaaagagagaggaaaaagcagaacttctcgaggggctgagtattgggaaggatgacaaaaccaacgtttctccaattcaacaggatgtaatgctgatatggggtgagcaagatcaagtttttcctttaaaaatggcccatgacctcaaagagatgttggggactaaggcgacgctaaaagttatacaaaagacatcacatatacctcaaacggagaagtccaaagaattcaatggctttgtcatgtctttcttattacctccttctccatcaccataaatgtaacatccatattaaactataaattacaatttttttctgatttcgtcgatgttagaagtatttatgatgcatatgtcagttcatgatacatttgagaatatttgtaacattgttattgatgatgcatatgtcaaattagttcacc

SEQ ID NO: 100000 - protein, 308 aa, Arabidopsis thaliana
  peptide (1)..(308): Ceres Seq. ID no. 13604069
MAPSFLSVARFVEALLRRRFSSAGLSLQTLSIDSETTIQFWGPPPSSSSENTQKPSLLLLHGFGPSAVWQWSHQVKPLSHFFRLYVPDLVFFGGSSSSGENRSEMFQALCMGKLMEKLEVERFSVVGTSYGGFVAYNMAKMFPEKVEKVVLASSGVNLRRSDNEAFIARAKCHRIKEVMLPASATDLRRFSGMVSSKRLDYVPDFVLNDFCQKMYSEKREEKAELLEGLSIGKDDKTNVSPIQQDVMLIWGEQDQVFPLKMAHDLKEMLGTKATLKVIQKTSHIPQTEKSKEFNGFVMSFLLPPSPSP

SEQ ID NO: 100001 - protein, 204 aa, Arabidopsis thaliana
  peptide (1)..(204): Ceres Seq. ID no. 13604070
MFQALCMGKLMEKLEVERFSVVGTSYGGFVAYNMAKMFPEKVEKVVLASSGVNLRRSDNEAFIARAKCHRIKEVMLPASATDLRRFSGMVSSKRLDYVPDFVLNDFCQKMYSEKREEKAELLEGLSIGKDDKTNVSPIQQDVMLIWGEQDQVFPLKMAHDLKEMLGTKATLKVIQKTSHIPQTEKSKEFNGFVMSFLLPPSPSP

SEQ ID NO: 100002 - protein, 198 aa, Arabidopsis thaliana
  peptide (1)..(198): Ceres Seq. ID no. 13604071
MGKLMEKLEVERFSVVGTSYGGFVAYNMAKMFPEKVEKVVLASSGVNLRRSDNEAFIARAKCHRIKEVMLPASATDLRRFSGMVSSKRLDYVPDFVLNDFCQKMYSEKREEKAELLEGLSIGKDDKTNVSPIQQDVMLIWGEQDQVFPLKMAHDLKEMLGTKATLKVIQKTSHIPQTEKSKEFNGFVMSFLLPPSPSP

SEQ ID NO: 100003 - DNA, 1792 bp, Arabidopsis thaliana
  misc_feature (1)..(1792): Ceres Seq. ID no. 13604072
  misc_feature (1)..(1792): Ortholog of  Ceres SEQ ID NO 15176959 as cited in SEQ ID NO 52610
  misc_feature (1)..(1792): Ortholog of  Ceres SEQ ID NO 15176571 as cited in SEQ ID NO 54430
aaagagtctttgtcattgtcttccttcttcttcctttttctctccccccccccattatcttcggcgaatcatgaatctagggttttgttttctcccataaccctagattttcttccatcaatcttatatttttctcatttcttcttctccgttttagctcatctcccgattcatctcgatttccatggagggagcgggagagacgacgacgtcggaggggcatttgacttcggcagcagcttttgtggaagggggaattcaagatgcttgtgatgatgcttgtagcatttgtcttgaatccttctgcgaaagcgatccttctactttgactagttgcaagcatgagtatcatcttcaatgcattcttgagtggtgtcaaagaagctcacagtgccctatgtgttggcaatcaattagtctcaaagaccccacaagtcaggagttgcttgaggctgtggaacaggagaggaatttccgcttcaatccaactagaaatgccaccatatttcgtcatccaactcttggtgattttgaattacaacatcttccagtgggggtggataatgctgagattgaagaacgaatcattcagcacttggctgctgctgctgctatgggacgagcaagacatggggtaagaagggaaggccacagaagcaggtcgtcaagtcaaggacatcaacagttcatggtgttctcttcgcaacctaatgcttcttctcctccacctcatcctcccatgccttcttctccatctcagagagatgagagtgacacagtgtcaaaccttcctcacaatgctttaggggagggttctcatcagtcaaacacgcagccaccaacttcttctcatccccgccaggtttctccctcagcatctgattcaaacagcaggcctcttaatcaatcttccccaagtgaacaagatagagctggaccatcagaactccagtcattttcggaatcacttaagtctcgattaaacgctgtctccacgagatacaaagaatcgatatcaaagaatacaaggaactggaaagatagacttttttctcgcaacacgtccatggcagatcttggctctgaggttaaaagagaggtcagtgccggaatcgccactgtgtcccgcatgatggaacgtttagaaacgagagaaaacagtagacccagcactgcatctgtatcagatgtctctgaaaatcacactcctgaaacaaacaatgagcacaatagagcagcagcgggtgatgaacattctgtgaatgaaagaggtgttaaagaaacatgtgcgactggttctggttcaagctaataagtgagtgccagcatcttgttggcaaagagagaggaagatgttgtccattgtgaaattctgataatatatatatacagagtcagaagtctcaaaagtgtggagcataggaagaaggttattattgataaagaaaaagagttttccgattatcaataaataagaaaagttatatatgaccaaaaggaggccttaaagacgcctctttctgtgttatgtcaaacaaacaaaaaaaaaactaaagagaaaaattagagtaaaagacctgtgtggggttgttggttatttggtcggtctgttgtaaattcacattgtcgttcacattacggatttctatgaatttctacttatgtatcttcaaaaacttggtctagcaaaaccaatttaatgtatcgattccagtgtactatagttatgatggtgtcgtgtgacttctgtcgaacaaacaaaattatggtgcttaataatggttttcgattt

SEQ ID NO: 100004 - protein, 375 aa, Arabidopsis thaliana; identical to SEQ ID NO: 41738
  peptide (1)..(375): Ceres Seq. ID no. 13604073

SEQ ID NO: 100005 - protein, 304 aa, Arabidopsis thaliana; identical to SEQ ID NO: 41739
  peptide (1)..(304): Ceres Seq. ID no. 13604074

SEQ ID NO: 100006 - protein, 232 aa, Arabidopsis thaliana; identical to SEQ ID NO: 41740
  peptide (1)..(232): Ceres Seq. ID no. 13604075

SEQ ID NO: 100007 - DNA, 1387 bp, Arabidopsis thaliana
  misc_feature (1)..(1387): Ceres Seq. ID no. 13604088
  misc_feature (1)..(1387): Ortholog of  Ceres SEQ ID NO 13582619 as cited in SEQ ID NO 56520
  misc_feature (1)..(1387): Ortholog of  Ceres SEQ ID NO 13660872 as cited in SEQ ID NO 60830
atggaaagtcttgtggagcagttgaaatccatcaagaaggataagttttcttgtaatgataagtggttaacccttaagcttcaaatcaacaaaaactttgagctccctgagcaagtgagaagagaccacactgagaagaaaaatccttcaggttatcgaaaattcccggattttactctttgggcggtggccgatttcttacgcgctctttttgtggcgactgttgtatacgcgcgagccttcatggacacgaaggcggttggagtttctaaggatacggcggcgtcgatggaagcgtcgacggtgtttcctgggtttaaattctcgccgacggatgtggagttgatttcgtattacctgaagcggaagatggatggcttggagaggtccgttgaggttataccggaccttgagatttacaatttcgagccttgggatttacccgataagtcgattgtgaaatctgatagcgagtggttcttcttctgtgcgcgtgggaaaaagtatccacatggttcacagaacaggagagcaacgaagatgggatactggaaagcaactgggaaagagcgtgatgtgaagtctggttctgaggtcattggaacaaagaggacgcttgttttccatattggtcgtgcaccaaaaggcgaaagaactgactggattatgcacgagtactgcgtgaaaggagtatctctggatgatgctatggttgtttgccgggttaggaggaacaaagaatacaatagtggtacaagtcagaaggcaccaaagccaaattcatcagccgagaagcatgcgaaagtccaaaatggcgctacgagttcagggagcccgtctgattgggacaacttggttgatttttacctagcaggtgaatcaggggagaaactactcgctgagatggcagagtcatcagaaaatctacaggtggataatgacgaggatttctttgcggatatcctaagagacgaaatcatcaatctcgatgaagcggtgatgacagggaacacaccaaacgaagtgccaacactagaatcagcatcaatggagataagggtacttcctttaccaaacatgatagacaaacaaatgtcatcactgttagaggaaagaccatcacagaagaagaaaggaaaagacgccacggaatcattgtcgagctgcttcgtgggtttatactcgatcaaatcagtgaacaaggcacgatgggatgttattataggtgtagtggctctgatagcaatgttgttttatctagaataagaggcttatggaagtagcgaaaaacagtgtcctagctatgtttgtatcatcttttctcggacattgacaaggattatatgatgtttttgtgtaaacggtttatgttttacacttctacttc

SEQ ID NO: 100008 - protein, 421 aa, Arabidopsis thaliana
  peptide (1)..(421): Ceres Seq. ID no. 13604089
MESLVEQLKSIKKDKFSCNDKWLTLKLQINKNFELPEQVRRDHTEKKNPSGYRKFPDFTLWAVADFLRALFVATVVYARAFMDTKAVGVSKDTAASMEASTVFPGFKFSPTDVELISYYLKRKMDGLERSVEVIPDLEIYNFEPWDLPDKSIVKSDSEWFFFCARGKKYPHGSQNRRATKMGYWKATGKERDVKSGSEVIGTKRTLVFHIGRAPKGERTDWIMHEYCVKGVSLDDAMVVCRVRRNKEYNSGTSQKAPKPNSSAEKHAKVQNGATSSGSPSDWDNLVDFYLAGESGEKLLAEMAESSENLQVDNDEDFFADILRDEIINLDEAVMTGNTPNEVPTLESASMEIRVLPLPNMIDKQMSSLLEERPSQKKKGKDATESLSSCFVGLYSIKSVNKARWDVIIGVVALIAMLFYLE

SEQ ID NO: 100009 - protein, 340 aa, Arabidopsis thaliana; identical to SEQ ID NO: 41503
  peptide (1)..(340): Ceres Seq. ID no. 13604090

SEQ ID NO: 100010 - protein, 325 aa, Arabidopsis thaliana; identical to SEQ ID NO: 41504
  peptide (1)..(325): Ceres Seq. ID no. 13604091

SEQ ID NO: 100011 - DNA, 913 bp, Arabidopsis thaliana
  misc_feature (1)..(913): Ceres Seq. ID no. 13604104
  misc_feature (1)..(913): Ortholog of  Ceres SEQ ID NO 13646254 as cited in SEQ ID NO 20314
  misc_feature (1)..(913): Ortholog of  Ceres SEQ ID NO 13639196 as cited in SEQ ID NO 56195
  misc_feature (1)..(913): Ortholog of  Ceres SEQ ID NO 15179459 as cited in SEQ ID NO 0
ttttggttcctttaataatcatttctttcttttatataaacctaagatacgttccccatatttcactcactcaagaagacatctaaagccatcaaaaatatatccatagaagcttcatcgaaatggcgaatcaagcagctgctgcagcattcttccttttcgctttagccgtcttctccaacttggagctctcagcttcttcacttgtcagtggcaagatctcttgccttgactgccaccgcgatttcgacttctcaggcattaaggtcctccttaaatgcgacggagagaagaaacaaataaccgcggtggcagctgcagacggatctttccggtcagtgcttccaacggctgacaaaaaaggctccataaattgtcttgcaaagctcttgggaggccctgagcaactctatgctcacaaacacaacttggtctctgaattggtcaaatctaaacacgattccaaagttttaactacctcaaacccacttgccttctctctctcctgccccaaaccatcccgagatgatatcggaagtatgatcggagattccaagactattaattttccgggggcaggaggttttggattcccacctgccagcttctttcccttcttaccaatcattggtatcccatgatttaaataagtgttacttttaagtccttaaagacatatgtatacatatgttttgttgtttacgtgaatgaagccagccaagacaagacacaaatatttagcaaattacattactttgtttagtgagatataaggtttgtttatgtgctaagaaaatgttatttattggctttatttagtttaaatcagttgcttttgtatcaagtttgtaataagaaggttgggttaatccaacaacatacgctttattgtgaacattcatgcttctatgat

SEQ ID NO: 100012 - protein, 172 aa, Arabidopsis thaliana; identical to SEQ ID NO: 42548
  peptide (1)..(172): Ceres Seq. ID no. 13604105

SEQ ID NO: 100013 - DNA, 816 bp, Arabidopsis thaliana
  misc_feature (1)..(816): Ceres Seq. ID no. 13604113
  misc_feature (1)..(816): Ortholog of  Ceres SEQ ID NO 14314867 as cited in SEQ ID NO 58301
  misc_feature (1)..(816): Ortholog of  Ceres SEQ ID NO 14308084 as cited in SEQ ID NO 58549
ggagacggaagaaaattcgaatcatcagtgtttgtttcctcctctcttaaagcttagcccttctcaggtcattgttcttcaatggcttcgagcaacacgactactggggttgataatacgtttagaaagaagtttgatgtggaagagtttaaggagcgtgctcgtgaacgcgaaaagaaggaatcggatcggtctaaatctcggtccaaaggtcctcctgtgcaaagagcccctttgaagcatagagattatcatgtagacctagaatctcgtctgggcaagacacaggtcgttacaccggtagcgcctctaagtcagcaggctggttatttctgtcgcgtttgtgattgtgttgttaaagattcggcaaactacttggatcacataaatgggaaaaaacatcaaagggcattggggatgtctatgcgggtggagagatcgtcacttgaacaagtccaagagcggttcgaggttttaaagaagcggaaagcgccaggaactttcacagaacaagatctggacgaacgcatccgaaaacagcaagaagaagaggaagaactaaaaaggcagcgtagagagaaaaagaaagagaagaagaaagggaaggtggtggaagaagagcctgagatggatcctgaggttgcagagatgatgggatttgggggctttggatcttcaaaaaaatcatgatgattatatgatcacttgtatctttgtcttgtagcgtttttgatccaaagtttgcaactttgtaatctgacacatcataacgatatttttctcattgtgcaagaagaggaatttgatggcaattta

SEQ ID NO: 100014 - protein, 202 aa, Arabidopsis thaliana; identical to SEQ ID NO: 35753
  peptide (1)..(202): Ceres Seq. ID no. 13604114

SEQ ID NO: 100015 - DNA, 1226 bp, Arabidopsis thaliana
  misc_feature (1)..(1226): Ceres Seq. ID no. 13604118
  misc_feature (1)..(1226): Ortholog of  Ceres SEQ ID NO 14304823 as cited in SEQ ID NO 54902
gttcacatgcacccgcaaaaaaaaaaactaattttttttcttttttcttctcctcatcttcagagttttgagatttgtgattgcctccatgcaagagctgaattagccgaatctggatgtcttattctgaaaaaacgacggtggatccacttctgagagatttggatgagaagaaagagagtttccggcgaaacgtggtgtctctggctacggagctgaagcaagtgaggggccgtttggtttctcaagaacaatcttttcttaaagagaccattactagaaaagaagcagagaaaaggggaaagaatatggaaatggagatttgtaaattgcagaagagactggaagaaaggaattgtcagcttgaagcttctgcatctgctgctgataagtttatcaaagagttggaggaatttagattaaagcttgatacaaccaagcaaaccgcagaggcaagtgctgattctgctcaatctacaaagatccaatgctcaatgctaaagcaacaacttgacgacaaaacacgttctctcagagaacaagaagaccgtatgactcagcttggtcatcagcttgatgatctacagagaggtctgagcttgagagagtgctcagaaaagcagcttagagaagaagttaggagaatcgagcgtgaggttactgaggccattgcaaaagcgggaataggtggcatggacagcgagctccagaaacttctagaagatgtgtctccaatgaaatttgagaggatgaataggctagttgaagtaaaagacgaagagattacaaaactgaaagatgagataaggttaatgtcaggtcaatggaaacataagactaaggaactcgaatctcagctggagaaacagagaagaactgatcaagatttgaagaagaaggtattgaagctagagttctgtttacaagaagctcgaagccagacaagaaagctgcagaggaaaggggaaagaagggacatggagatcaaagagataagagatcttatatcggagaagcaaaaccttaacaatgagtcttgggataaacagaagttctgggacaattcagggttcaagattgttgtatcaatgtctatgttgatgttagtggtagtctccaagagatgatgaattttgtaatgtataaatttagttgcagatagttgatgaggataatctaactcatgtatgtgtcgtcttcaggtctaatataacagccatgtactt

SEQ ID NO: 100016 - protein, 336 aa, Arabidopsis thaliana; identical to SEQ ID NO: 39866
  peptide (1)..(336): Ceres Seq. ID no. 13604119

SEQ ID NO: 100017 - protein, 272 aa, Arabidopsis thaliana; identical to SEQ ID NO: 39867
  peptide (1)..(272): Ceres Seq. ID no. 13604120

SEQ ID NO: 100018 - protein, 270 aa, Arabidopsis thaliana; identical to SEQ ID NO: 39868
  peptide (1)..(270): Ceres Seq. ID no. 13604121

SEQ ID NO: 100019 - DNA, 1718 bp, Arabidopsis thaliana
  misc_feature (1)..(1718): Ceres Seq. ID no. 13604122
  misc_feature (1)..(1718): Ortholog of  Ceres SEQ ID NO 13655298 as cited in SEQ ID NO 68914
  misc_feature (1)..(1718): Ortholog of  Ceres SEQ ID NO 13656501 as cited in SEQ ID NO 69206
attcttattattattattcatcagaccaacaacaaaaaggagataaagagaagaggattcatcatcatcaatcaatccttcattttatggatctactcatatcttgattcttccttctatctctcccttttcttccatctctttttctctgggtttccccggattgagttttttaatctctgattgacagatttgaagagcgtgacaaaggaagaatcttttattaaaacaaattcttctgttttaatcttgggatggcctcggtgggcatagagcctagtgccgcggttagagaatctactggaaacgttactgatgctgatagattacccgaggagatgaaggacatgaaaattcaagatgataaagaaatggaagctacgattgttaatggcaatgtgactgagactggccatataatagtaactactataggaggaagaaatggccagccaaaacagacaatcagttacatggcggagcgagttgttggacatggctcctttggtgttgtgtttcaggccaaatgtttagaaacaggagaaactgttgctataaagaaagttctacaagatcggaggtacaagaatcgtgagcttcaaacaatgaggctacttgaccatccaaatgttgtgtctttgaaacattgtttcttctctacaaccgaaaaagatgagctttatctcaacttggttctggaatacgttccggaaactgtgcaccgcgtcatcaaacactacaacaaacttaaccaacgaatgcctctcgtttacgtcaaactttacacttatcagatttttaggtccttatcctacattcaccgatgtatcggcgtatgtcatcgagacatcaaacctcaaaacttgttggtaaatccacacactcatcaagtgaaactatgcgattttggaagtgcgaaagtattggttaaaggagagccaaacatttcatacatttgctcgaggtattacagagcacctgagctcatttttggagccaccgagtatactacagccattgatgtctggtctgcaggatgtgttctcgccgagcttcttctcgggcagccattgttcccgggtgagagcggtgttgatcaacttgtagagattataaaggttttgggaacaccaacaagggaagaaatcaaatgcatgaacccgaattacacagagttcaaatttcctcagattaaagctcatccatggcataagattttccacaagagaatgcctccagaagctgttgatttggtctcaaggcttcttcaatactctcccaatctccgttgtgctgctcttgattcattggtccacccattctttgacgagctaagagatccgaatgcgcgattacccaacggacgtttccttccaccgctctttaactttaagcctcatgaacttaaaggtgtgcctgtggagatggtggcgaagttagttccagaacatgcgaggaagcaatgtccgtggctcagtttgtgatttgttctcacctgcaaacacgaaaactagagcaaagcagtcgagatattcatctcttctcttctctctccttctctgtattaatattattataatgatcatatctcaatctgatgatttagtaaccctttgtttgttgtatgagtagagaaagagtgaatcatttgtgggggttatgatattgtataagccaacaaagattattttttaaagagagtttcgtgttttctgtct

SEQ ID NO: 100020 - protein, 409 aa, Arabidopsis thaliana; identical to SEQ ID NO: 30400
  peptide (1)..(409): Ceres Seq. ID no. 13604123

SEQ ID NO: 100021 - protein, 381 aa, Arabidopsis thaliana; identical to SEQ ID NO: 30401
  peptide (1)..(381): Ceres Seq. ID no. 13604124

SEQ ID NO: 100022 - protein, 378 aa, Arabidopsis thaliana; identical to SEQ ID NO: 30402
  peptide (1)..(378): Ceres Seq. ID no. 13604125

SEQ ID NO: 100023 - DNA, 2290 bp, Arabidopsis thaliana
  misc_feature (1)..(2290): Ceres Seq. ID no. 13604130
  misc_feature (1)..(2290): Ortholog of  Ceres SEQ ID NO 13597706 as cited in SEQ ID NO 65326
atctttctctctttcggatcattctctcctctgattccgaatcgggtaaattattatggattcttcttcttcgtcttcctccgccgccgcacgccgccgtatcaacgctatccactctcacctcgtcacctcttctcgctcttcccctctcctccgctccaatcccaccgccggcgagttctgtcttgataatggctatagtgttgttcttcccgagaaactgaatactggcagttggaacgtctacagatctgcaaaatctccgttcaagctcgttagcagattcccagatcatcctgacatcgctactctccatgacaattttgagcatgctgttcatgattttcgagattacaagtatttaggaactcgtgttcgtgtcgacggaactgttggagactacaaatggatgacatatggagaagctggtacagcaagaactgctttaggttctggtttggttcatcacggaatccccatgggatcttctgttggaatttacttcatcaatcgcccagagtggctcattgttgatcatgcttgttcttcttattcttatgtgtctgttcctttgtatgatactcttggtcctgatgctgtgaaatttattgtcaatcatgcaactgtgcaagccatattttgtgtggcagagactttaaactctttacttagctgtttgtctgagatgccaagtgtacgcctggtggtggttgttggagggttaattgaatctttaccctcgcttccctcatcatcaggagtgaaagttgtatcctattcggtgttactgaatcagggtcgtagtaaccctcagcgattttttccaccaaaacccgatgatgttgcaaccatatgctatacaagcggaacaactgggacacccaagggagtcgtattaactcatgcaaacttgattgccaatgttgctggctccagctttagtgtgaagtttttctcttcagatgtttacatttcgtatcttccacttgctcacatttacgaacgagctaatcagatcctaacagtgtactttggagttgctgttggattctaccaaggggacaatatgaaactactggatgatttggctgctctgagacctactgtatttagcagtgtccctcgattatacaatagaatatatgctggtatcattaatgcagtaaaaacctctggtggtctgaaagagagactcttcaatgctgcctataatgcaaagaagcaggctctcttgaatggaaagagtgcttctcccatatgggacaggttggtatttaataaaataaaggacagacttggagggcgggttcgttttatgacgtctggtgcttcacctctctctcctgaagtgatggaatttttgaaagtatgctttggaggaagggtaacagagggatatggaatgactgaaacatcttgtgttataagtggaatggacgagggtgataacctcactggacatgttggctctcctaatccagcttgtgaagtaaagcttgtggatgtcccagaaatgaactatacatcagcggatcagccccatccccgtggcgaaatatgtgttaggggtcctatcatttttacaggctattacaaagatgaaattcaaacgaaagaggtgattgatgaagatggatggcttcacactggagatataggtctgtggctgccgggaggacgtctaaaaattattgacagaaagaagaacatcttcaaattggcgcagggggagtatatagctccagagaaaattgaaaacgtctatgccaaatgcaaatttgtgggccagtgcttcatatatggtgatagctttaattcatcattggtagctgttgtatcggttgatccagatgtgctgaaaagctgggcagcttcagaaggcattaagggaggagatctgagagaattgtgtaataatccgagagtgaaagcagcagtactatctgacatggacactgttggaagagaagctcagttgagaggcttcgagtttgcaaaggctgtgacattggtgctggaaccatttactctggaaaatggcttgttgactccgacgttcaagattaagagaccacaagcaaaggaatatttcgcagaagcaataacaaacatgtacaaggagcttggtgcttctgatccctctgctaatagaggtttgtgatgatggtataatcgtgtgattaataaaaagcctacgcaaaagttgtttctcccacaaattgtattcttttttgttttcttgctacatatttattgaatagtaaaggtaataaaggtgctacattacatt

SEQ ID NO: 100024 - protein, 701 aa, Arabidopsis thaliana
  peptide (1)..(701): Ceres Seq. ID no. 13604131
MDSSSSSSSAAARRRINAIHSHLVTSSRSSPLLRSNPTAGEFCLDNGYSVVLPEKLNTGSWNVYRSAKSPFKLVSRFPDHPDIATLHDNFEHAVHDFRDYKYLGTRVRVDGTVGDYKWMTYGEAGTARTALGSGLVHHGIPMGSSVGIYFINRPEWLIVDHACSSYSYVSVPLYDTLGPDAVKFIVNHATVQAIFCVAETLNSLLSCLSEMPSVRLVVVVGGLIESLPSLPSSSGVKVVSYSVLLNQGRSNPQRFFPPKPDDVATICYTSGTTGTPKGVVLTHANLIANVAGSSFSVKFFSSDVYISYLPLAHIYERANQILTVYFGVAVGFYQGDNMKLLDDLAALRPTVFSSVPRLYNRIYAGIINAVKTSGGLKERLFNAAYNAKKQALLNGKSASPIWDRLVFNKIKDRLGGRVRFMTSGASPLSPEVMEFLKVCFGGRVTEGYGMTETSCVISGMDEGDNLTGHVGSPNPACEVKLVDVPEMNYTSADQPHPRGEICVRGPIIFTGYYKDEIQTKEVIDEDGWLHTGDIGLWLPGGRLKIIDRKKNIFKLAQGEYIAPEKIENVYAKCKFVGQCFIYGDSFNSSLVAVVSVDPDVLKSWAASEGIKGGDLRELCNNPRVKAAVLSDMDTVGREAQLRGFEFAKAVTLVLEPFTLENGLLTPTFKIKRPQAKEYFAEAITNMYKELGASDPSANRGL

SEQ ID NO: 100025 - protein, 583 aa, Arabidopsis thaliana
  peptide (1)..(583): Ceres Seq. ID no. 13604132
MTYGEAGTARTALGSGLVHHGIPMGSSVGIYFINRPEWLIVDHACSSYSYVSVPLYDTLGPDAVKFIVNHATVQAIFCVAETLNSLLSCLSEMPSVRLVVVVGGLIESLPSLPSSSGVKVVSYSVLLNQGRSNPQRFFPPKPDDVATICYTSGTTGTPKGVVLTHANLIANVAGSSFSVKFFSSDVYISYLPLAHIYERANQILTVYFGVAVGFYQGDNMKLLDDLAALRPTVFSSVPRLYNRIYAGIINAVKTSGGLKERLFNAAYNAKKQALLNGKSASPIWDRLVFNKIKDRLGGRVRFMTSGASPLSPEVMEFLKVCFGGRVTEGYGMTETSCVISGMDEGDNLTGHVGSPNPACEVKLVDVPEMNYTSADQPHPRGEICVRGPIIFTGYYKDEIQTKEVIDEDGWLHTGDIGLWLPGGRLKIIDRKKNIFKLAQGEYIAPEKIENVYAKCKFVGQCFIYGDSFNSSLVAVVSVDPDVLKSWAASEGIKGGDLRELCNNPRVKAAVLSDMDTVGREAQLRGFEFAKAVTLVLEPFTLENGLLTPTFKIKRPQAKEYFAEAITNMYKELGASDPSANRGL

SEQ ID NO: 100026 - protein, 560 aa, Arabidopsis thaliana
  peptide (1)..(560): Ceres Seq. ID no. 13604133
MGSSVGIYFINRPEWLIVDHACSSYSYVSVPLYDTLGPDAVKFIVNHATVQAIFCVAETLNSLLSCLSEMPSVRLVVVVGGLIESLPSLPSSSGVKVVSYSVLLNQGRSNPQRFFPPKPDDVATICYTSGTTGTPKGVVLTHANLIANVAGSSFSVKFFSSDVYISYLPLAHIYERANQILTVYFGVAVGFYQGDNMKLLDDLAALRPTVFSSVPRLYNRIYAGIINAVKTSGGLKERLFNAAYNAKKQALLNGKSASPIWDRLVFNKIKDRLGGRVRFMTSGASPLSPEVMEFLKVCFGGRVTEGYGMTETSCVISGMDEGDNLTGHVGSPNPACEVKLVDVPEMNYTSADQPHPRGEICVRGPIIFTGYYKDEIQTKEVIDEDGWLHTGDIGLWLPGGRLKIIDRKKNIFKLAQGEYIAPEKIENVYAKCKFVGQCFIYGDSFNSSLVAVVSVDPDVLKSWAASEGIKGGDLRELCNNPRVKAAVLSDMDTVGREAQLRGFEFAKAVTLVLEPFTLENGLLTPTFKIKRPQAKEYFAEAITNMYKELGASDPSANRGL

SEQ ID NO: 100027 - DNA, 1109 bp, Arabidopsis thaliana
  misc_feature (1)..(1109): Ceres Seq. ID no. 13604134
  misc_feature (1)..(1109): Ortholog of  Ceres SEQ ID NO 13594794 as cited in SEQ ID NO 51761
aaagtccaccactagctcgaactctctcctctcttaaacttatagacaagaatcaatcagtcacacgtctataccacgatttgctcacaaaatctttggcttccaccaaagattataagcagagatcattcacttactcgtatcaatagatcaaatcttcatcacaatagaagaaatggttttagagacggtttcaaagacggaaccaccaccgttgcttggacctcgtatctccttctcatctgatttatctgacggtggagatttcatctgcatcacccccgtaatgtgtaaggaagatgtcgtcaaagggtcagtgaaagtctccgactttgagttcttgtcgtcggaaaatgtgagtccacagagaatgcttaccgccgatgaactcttctccgaaggtaaattgcttcctttttggcaagtaaagcactcagagaagcttaaaaacattactttgaagacgaacgaagaggaagaagcagagaaacgtaaagtggaagtgaagaagaaagatcaggagattaacaatagagataacagagtgacttggtttatagacgaagatccgtctcctcgtcctcccaagtgtaccgttctttggaaagagcttttgagattgaagaaacagaggaatccgtcttcttcgccggtgacggcgaggacagtgtcgtctttgtctccgtcgtcgtccacgtcatcatcaagttcacttgaggacgcagcgaagagagaggagaaagagaaagaagggaagagaggtaagaaaggattagagagaacgagatcggcgagtatgaggataaggccaatgattcatgttcctatttgcactccttctaaatcctctcttcctttgcctcctctgtttcctctttcgcttaagaaaaacagagtagagagacgcgcctagaagatttgatctatctttggattgaaaaaaacaattattggttgaatttgttcagattctcaagtgttaactcatgtggtctaatgcatgtggttaagtgatgtttttcagatgtattatgtgtatgctttatggcttgagatttaatgtgtgacagtgttaagaaattctagtaagaaccgttcctctgttcttc

SEQ ID NO: 100028 - protein, 245 aa, Arabidopsis thaliana; identical to SEQ ID NO: 28199
  peptide (1)..(245): Ceres Seq. ID no. 13604135

SEQ ID NO: 100029 - protein, 208 aa, Arabidopsis thaliana; identical to SEQ ID NO: 28200
  peptide (1)..(208): Ceres Seq. ID no. 13604136

SEQ ID NO: 100030 - protein, 180 aa, Arabidopsis thaliana; identical to SEQ ID NO: 28201
  peptide (1)..(180): Ceres Seq. ID no. 13604137

SEQ ID NO: 100031 - DNA, 1086 bp, Arabidopsis thaliana
  misc_feature (1)..(1086): Ceres Seq. ID no. 13604138
  misc_feature (1)..(1086): Ortholog of  Ceres SEQ ID NO 13594193 as cited in SEQ ID NO 58558
tcctcagttcttgatcactatatcttgaaggaattaagaagatgaatggtgaggcacggtcaagagtagtcgaccaagaagctggctcaactccatctactttgagagatgaagatcatccctcgagacaaaggcttttcggatgtctcccttatgatatagatctcaatcccctacgcattgtaatggcggaattggtggggacattcattctaatgttcagtgtgtgtggggtcataagcagtacccaattatccggcggccacgtgggattgctagagtacgccgtcaccgctggattatctgtggtggtcgtagtttactccatcggacacatctctggcgcccatcttaacccttccatcaccattgctttcgctgtctttggcggattcccgtggtctcaggttccgttgtatataacggcgcaaacattgggggcaacggcggcaacattagttggggtgtcagtgtacggagtaaacgctgacattatggcaacaaaacctgctttaagctgcgtttctgcatttttcgttgaactcatagctacgagcatcgtcgtgtttctcgcctccgcgttgcattgtggtcctcatcaaaatttgggtaatttgacggggttcgtgattggaacagtcatttcccttggagtgcttattaccggaccgatttcaggaggatcgatgaacccagctcgatcacttggaccggcggtggtggcatgggattttgaagacttatggatttacatgacagctccggtgatcggagccataatcggagttttgacatacagatcaattagcctaaaaaccaggccttgcccttctccagtttccccttccgtttcttcacttttacgttaatcacttcaaaacctaatatctattatacaaataaacacttttgattttttttcttggttaaggtttttaagtttttgtcattacgtcattagatgccgtgatgcgaaaacagagagctacttatcggattgaagatatagagggtaaagcaaatgaaaacagggggcattttgttctttttacacaatgaaatgaacgcaattaaaaatctttagtc

SEQ ID NO: 100032 - protein, 275 aa, Arabidopsis thaliana
  peptide (1)..(275): Ceres Seq. ID no. 13604139
MNGEARSRVVDQEAGSTPSTLRDEDHPSRQRLFGCLPYDIDLNPLRIVMAELVGTFILMFSVCGVISSTQLSGGHVGLLEYAVTAGLSVVVVVYSIGHISGAHLNPSITIAFAVFGGFPWSQVPLYITAQTLGATAATLVGVSVYGVNADIMATKPALSCVSAFFVELIATSIVVFLASALHCGPHQNLGNLTGFVIGTVISLGVLITGPISGGSMNPARSLGPAVVAWDFEDLWIYMTAPVIGAIIGVLTYRSISLKTRPCPSPVSPSVSSLLR

SEQ ID NO: 100033 - protein, 227 aa, Arabidopsis thaliana
  peptide (1)..(227): Ceres Seq. ID no. 13604140
MAELVGTFILMFSVCGVISSTQLSGGHVGLLEYAVTAGLSVVVVVYSIGHISGAHLNPSITIAFAVFGGFPWSQVPLYITAQTLGATAATLVGVSVYGVNADIMATKPALSCVSAFFVELIATSIVVFLASALHCGPHQNLGNLTGFVIGTVISLGVLITGPISGGSMNPARSLGPAVVAWDFEDLWIYMTAPVIGAIIGVLTYRSISLKTRPCPSPVSPSVSSLLR

SEQ ID NO: 100034 - protein, 217 aa, Arabidopsis thaliana
  peptide (1)..(217): Ceres Seq. ID no. 13604141
MFSVCGVISSTQLSGGHVGLLEYAVTAGLSVVVVVYSIGHISGAHLNPSITIAFAVFGGFPWSQVPLYITAQTLGATAATLVGVSVYGVNADIMATKPALSCVSAFFVELIATSIVVFLASALHCGPHQNLGNLTGFVIGTVISLGVLITGPISGGSMNPARSLGPAVVAWDFEDLWIYMTAPVIGAIIGVLTYRSISLKTRPCPSPVSPSVSSLLR

SEQ ID NO: 100035 - DNA, 1409 bp, Arabidopsis thaliana
  misc_feature (1)..(1409): Ceres Seq. ID no. 13604142
  misc_feature (1)..(1409): Ortholog of  Ceres SEQ ID NO 13647847 as cited in SEQ ID NO 20430
  misc_feature (1)..(1409): Ortholog of  Ceres SEQ ID NO 15171696 as cited in SEQ ID NO 59997
tttcttcagtctctctgcttctcactgttgtgctttctgtcttgtctctgtctttcccattgtcattctctcaccaatgggaatctcctttagcaacaacaacagaagacgagacaacaataatcgtcgccacctccaccactatcctccgccgccgccttactattacctcgaccctcctcctcctcctccgccatttccaccgcattatgactataactactccaattaccatctctctccgcctctaccgccacagccacagatcaactcttgttcttacggccattaccattatcaccctcagcctcctcagtatttcaccaccgctcagcccaattggtggggcccaatgatgagaccggcgtactactgtccgcctcagccgcaaacgcaaccgcctaagccatacctggagcaacagaacgcgaagaaggtgaggaatgatgtcaatgtgcatagagatacagtgaggcttgaagtggacgatctcgttcctggtcaccatctagtttccttcgtcttcgatgctcttttcgacggcagtttcactatcaccttctttgcaaaggaggaaccaaattgcaccattatcccacagtttccagaggtttattcacccacaagattccattttcagaaaggtcctggacagaagtttctgcagccttcagggacaggaactgacctgagcttctttgttcttgatgatctgtctaaacccttagaagaagatgtgtatccgcttgtaatatcagctgagacgataatctctccaaattcaatctcagagcaatcatcagttcataagcaagtcacacaagcggttctcgagaaagataatgatggatctttcaaagtgaaagttgtgaagcagattctttggattgaaggagttcgatatgaactccgtgagttgtatggctcgaccactcaaggtgcagcctcgggcttagatgagagtggttcgggtacagaatgtgttatctgcatgactgaggctaaggacacggccgtgctgccttgcagacatttgtgcatgtgtagcgactgtgctaaagaattgaggcttcagtccaacaaatgtccgatttgtcgacaacccatcgaagagctcttagagatcaaaatgaacagtagtgatgaacaacactagtacaaaaaaggttctttctttacataaaacaccattcttgattctttcttcatttttctctgaaaccctccatatctgaatctgtatttccgctatcattgttgtgcaacttccttcattccgcatatagatttgtttgatctaatgctttgtatttgcaagatataagcatcatcagtacatgtatagataacttcctaacactctcaccaaactacttaatgtttgtaattgaatgcttttgttggtttgc

SEQ ID NO: 100036 - protein, 384 aa, Arabidopsis thaliana; identical to SEQ ID NO: 25526
  peptide (1)..(384): Ceres Seq. ID no. 13604143

SEQ ID NO: 100037 - protein, 359 aa, Arabidopsis thaliana; identical to SEQ ID NO: 25527
  peptide (1)..(359): Ceres Seq. ID no. 13604144

SEQ ID NO: 100038 - protein, 267 aa, Arabidopsis thaliana; identical to SEQ ID NO: 25528
  peptide (1)..(267): Ceres Seq. ID no. 13604145

SEQ ID NO: 100039 - DNA, 1838 bp, Arabidopsis thaliana
  misc_feature (1)..(1838): Ceres Seq. ID no. 13604150
  misc_feature (1)..(1838): Ortholog of  Ceres SEQ ID NO 13595142 as cited in SEQ ID NO 56671
  misc_feature (1)..(1838): Ortholog of  Ceres SEQ ID NO 15168569 as cited in SEQ ID NO 58123
  misc_feature (1)..(1838): Ortholog of  Ceres SEQ ID NO 15226382 as cited in SEQ ID NO 63295
  misc_feature (1)..(1838): Ortholog of  Ceres SEQ ID NO 13598460 as cited in SEQ ID NO 63382
  misc_feature (1)..(1838): Ortholog of  Ceres SEQ ID NO 13597403 as cited in SEQ ID NO 64085
aaaacttaaaccgatctatcaagcaagtggttcctctctctctctacctctcgtttttggccaacgtcgtcgtcttcacgatccacgacgattcagttcttgagttccggcgattatcggtctctcacttctggttccgttgaacccctcatttctcttctcgcccgtgctctcaaattccgatatttgcccctgtgattcgaaaccctaatttcgcctatcaatctggaaaatctctcaattcgaagactttagcagcgcaaagatactctatccgggtaataagatcgaagaaaccatcaatttcttaccaaagtcgtgattcttggatctcgtctttgtttgatggacacaattagggtttccaaggaggttcctggatcttcgaaatcgaccgcacagtcgctcacggagtcgacctctcgcacggaaaccatcaatggctcccacgaattcaagatcagcggctactctttggtcaaaggcatggggattggcaaatacgttgcctcggatactttcatggtcggtggatactcctgggccatctacttctacccagatggaaagagtccagaggataattctgtctacgtgtctctcttcatagcccttgcgagtgaaggagccgatgttagggctttgtttgagcttaccctcgtggatcagagcggtaacgaaaggcacaaagttcatagccattttggtagaactctcgaaagcggaccctatactcttaaatatcgagggagtatgtggggatacaaacgatttttcaagaggtctcttttggagtcatcggactatctgaaggacaatggtctcttggtccggtgttgtgttggagtggtgaagtcacgcacagaaggaccgaggtgttacaatatcccggtgccggtttctggcttgggtcagcagtttggaaagcttttggaaagtgggaaaggagctgacgttactttcgaagttgatggagaaacatttcctgctcacaaattggttcttgcagcacgttctgcagttttcagggcacagctttttggcccgttgagaagtgaaaataccaattgtataatcatagaagacgtacaagcccctattttcaagatgttgcttcattttatctactgggatgaaatgcctgatatgcaagacttaatcggcacagacttgaaatgggcatcaactcttgtggctcagcatctgcttgcagctgcagaccgttatgctcttgagcggcttagaacaatatgcgagtcaaaactctgtgaaggaatcagcataaatacggtagcaaccaccttggctcttgcagagcagcatcattgtttccagctgaaagccgcctgcctcaaatttatagctttgccagaaaacctgaaagctgtgatggaaacggatgggtttgattatctgaaggaaagctgcccgtccctactaagtgagctattggagtatgtggctaggctgagtgagcactctttaacatcatcagggcatcgaaaggagttatttgctgatggttgtgacttaaatgggagacgtgtgaagcaacggttacattagcaactaattgagagagagagagagagagaggtcacttcgagagcctgagaagatgatggtgaagtaaacagaattttagaagagtaaagatttgtgtatttgtcattgtaaaaggattagtggttgatctgtgttgttcagctagctaatagagtgaaatgttgggtttttttcttttcttttctcttttgttttcccaggattttatgaccagaaccggttctctcaaggaaaaagtttcatgtgacttcattgataaatttggacttgcc

SEQ ID NO: 100040 - protein, 406 aa, Arabidopsis thaliana; identical to SEQ ID NO: 40291
  peptide (1)..(406): Ceres Seq. ID no. 13604151

SEQ ID NO: 100041 - protein, 359 aa, Arabidopsis thaliana; identical to SEQ ID NO: 40292
  peptide (1)..(359): Ceres Seq. ID no. 13604152

SEQ ID NO: 100042 - protein, 347 aa, Arabidopsis thaliana; identical to SEQ ID NO: 40293
  peptide (1)..(347): Ceres Seq. ID no. 13604153

SEQ ID NO: 100043 - DNA, 1305 bp, Arabidopsis thaliana
  misc_feature (1)..(1305): Ceres Seq. ID no. 13604154
  misc_feature (1)..(1305): Ortholog of  Ceres SEQ ID NO 12612361 as cited in SEQ ID NO 51594
attttgaacaagtaaaccctagttgatatcgtgctaagctcttaagcgaagatacaggtcaaaatcgcggcaaagcatcggtggctcgagtgacccaatccactccaccaaacttctttgggaatcccaaaggttgctactttactcctcaaatgattcgcaagctctgttcttcattctctcgctccatcatcttccccaacaaacccatcttcatcccccgctcttttcctcaaccactccgtcactcttctgctctctcgtactcctccttgaaaatgaccgatacccatatcccaggaaaccctaattcgtcccctatccaatctcccaccaaacccgagtcgcttcgttccctcgaatttcaattgggttcttctttcaccgccgatccaatcatcccgccgccgaatcagatcgtcatcgttattagcggtccaagcggagttggtaaagacgcagtgatcaacaagcttcgtgaggttcgtgaaggtcttcattttgttgttaccgccactagtcgtccgatgcgacctggtgaagttgatggtaaagactatttctttgtctcgagagatcagttcttgtcaatggtggagaacgaagagcttcttgaatacgcacttgtttatggagaatacaaagggattccaaagaagcagattcaggaatttatggccaaaggggaagacattgttcttagagttgatattcaaggagctcagacgttaaggaggatacttggtaactctgctgtgtttatattccttgtggcggagagtgagcttgctatggtggagaggttgattgatcggaagacggagagtcaagaggagttgcttgttagagttgctacggcgagagaagaggttaggcatctaaagaactttgattacgttgtggtgaatgccaaagggaggcttgatgatgcggttaaccgcgtggaatcgattatcgatgctgagaaatctaaagttcatcaaaggattgtcaggatttgatgtgcagagatgccattgtctgtaacaacatattggcttgctgtctccagacacggatccatcgaagaccgagacaattttattatcggtatgtgcggcaacccattccaaccaaagatttagatgaatcctggcccctgactacagagaacccttttgattaagcatcgtatctttatacatagctacatggattatgttatcatcatacagtatgtgattcatactcgcattttgaattttgttactttataaatgtttatggagcattgttcataataatttaagtatcatctaacttttc

SEQ ID NO: 100044 - protein, 282 aa, Arabidopsis thaliana; identical to SEQ ID NO: 29001
  peptide (1)..(282): Ceres Seq. ID no. 13604155

SEQ ID NO: 100045 - protein, 240 aa, Arabidopsis thaliana; identical to SEQ ID NO: 29002
  peptide (1)..(240): Ceres Seq. ID no. 13604156

SEQ ID NO: 100046 - protein, 157 aa, Arabidopsis thaliana; identical to SEQ ID NO: 29003
  peptide (1)..(157): Ceres Seq. ID no. 13604157

SEQ ID NO: 100047 - DNA, 1412 bp, Arabidopsis thaliana
  misc_feature (1)..(1412): Ceres Seq. ID no. 13604158
  misc_feature (1)..(1412): Ortholog of  Ceres SEQ ID NO 13595492 as cited in SEQ ID NO 51124
aaagcgatccagttgctgtgggaagcgataatggaggcgacgaagagagaaagacggagagaagatgacgacggcgaaaaagcttcaccggaatcactcgttcttccaccagagatcattacagaaattcttctccgattaccagccaaatcgatcgggcgattcaggtgcgtatcaaagctcttttgcactttatcgtcagatccagggttcgcgaagattcacctcgatctgatccttcgaaacgaatccgtaagatcgctccaccgtaagctcattgtgtcttcacataatctgtactcgttagatttcaattcgatcggtgacggaattagggatttagcggctgtggaacacaattatcctcttaaagacgatccaagcattttctctgagatgattaggaattacgtgggggaccatctgtacgatgatcgtcgcgtgatgcttaagctgaatgcgaaatcgtatcgaagaaactgggttgagatcgttggatcttccaatggtttagtgtgtatctctcctggtgaaggagctgttttcttgtataatccaactaccggagattccaagagattacctgaaaattttcgtcccaaatctgtagaatacgaaagagataatttccaaacttatggatttggtttcgatggtctcactgatgattacaaattggtgaagcttgttgctaccagtgaagatattctcgatgctagtgtctattccttgaaggctgactcatggagacggatctgcaatttgaattatgagcacaacgatggctcctacacgtccggtgtgcatttcaacggtgcgattcactgggtgttcacagagagtaggcacaaccaaagagtggttgtagcatttgatattcaaaccgaggagtttcgagagatgccagtgcctgatgaagctgaagattgttcccataggtttagcaactttgtggtcggaagtctcaatggacgtctctgtgtggtcaatagttgctacgatgtgcatgatgatatatgggtgatgagtgagtacggtgaagctaaatcctggagcagaattcgaatcaacttgttgtataggtcgatgaaaccgctctgttcgactaagaacgatgaagaggttcttctggagcttgatggagacctggtgttgtacaactttgaaaccaatgcatcgagtaatctaggaatttgtggggttaagctcagtgacgggttcgaggcaaatacatacgtagagagcctcatatcacccaactcttatggtatagagagctgaggaagtctgctttttgctaagatataataaaccaacattcggattagaaatgttttagaaacataatcatgtaatatgtatcatgtaattaacaacgaatggtcaatgggtattttaagtttctttctcct

SEQ ID NO: 100048 - protein, 426 aa, Arabidopsis thaliana
  peptide (1)..(426): Ceres Seq. ID no. 13604159
KAIQLLWEAIMEATKRERRREDDDGEKASPESLVLPPEIITEILLRLPAKSIGRFRCVSKLFCTLSSDPGFAKIHLDLILRNESVRSLHRKLIVSSHNLYSLDFNSIGDGIRDLAAVEHNYPLKDDPSIFSEMIRNYVGDHLYDDRRVMLKLNAKSYRRNWVEIVGSSNGLVCISPGEGAVFLYNPTTGDSKRLPENFRPKSVEYERDNFQTYGFGFDGLTDDYKLVKLVATSEDILDASVYSLKADSWRRICNLNYEHNDGSYTSGVHFNGAIHWVFTESRHNQRVVVAFDIQTEEFREMPVPDEAEDCSHRFSNFVVGSLNGRLCVVNSCYDVHDDIWVMSEYGEAKSWSRIRINLLYRSMKPLCSTKNDEEVLLELDGDLVLYNFETNASSNLGICGVKLSDGFEANTYVESLISPNSYGIES

SEQ ID NO: 100049 - protein, 416 aa, Arabidopsis thaliana; identical to SEQ ID NO: 39545
  peptide (1)..(416): Ceres Seq. ID no. 13604160

SEQ ID NO: 100050 - protein, 294 aa, Arabidopsis thaliana
  peptide (1)..(294): Ceres Seq. ID no. 13604161
MIRNYVGDHLYDDRRVMLKLNAKSYRRNWVEIVGSSNGLVCISPGEGAVFLYNPTTGDSKRLPENFRPKSVEYERDNFQTYGFGFDGLTDDYKLVKLVATSEDILDASVYSLKADSWRRICNLNYEHNDGSYTSGVHFNGAIHWVFTESRHNQRVVVAFDIQTEEFREMPVPDEAEDCSHRFSNFVVGSLNGRLCVVNSCYDVHDDIWVMSEYGEAKSWSRIRINLLYRSMKPLCSTKNDEEVLLELDGDLVLYNFETNASSNLGICGVKLSDGFEANTYVESLISPNSYGIES

SEQ ID NO: 100051 - DNA, 1047 bp, Arabidopsis thaliana
  misc_feature (1)..(1047): Ceres Seq. ID no. 13604162
  misc_feature (1)..(1047): Ortholog of  Ceres SEQ ID NO 12583421 as cited in SEQ ID NO 56410
  misc_feature (1)..(1047): Ortholog of  Ceres SEQ ID NO 15176407 as cited in SEQ ID NO 59620
  misc_feature (1)..(1047): Ortholog of  Ceres SEQ ID NO 13596876 as cited in SEQ ID NO 62696
  misc_feature (1)..(1047): Ortholog of  Ceres SEQ ID NO 13655442 as cited in SEQ ID NO 64359
aaattactacgattgctataatgtcgatgtctcggctcggattgttgttgttcgtcgctatattgctcgtcttgcttcagtcttccacttgtctgattagttctccaagttctatcatcaatccttctaaagtcaaacaggtttcgtcgaagcccagggcatttgtgtatgaaggttttttgacggacttggaatgtgatcatctaatctctcttgcgaaagagaatctgcagagatctgcggttgctgataacgataatggcgagagtcaagtcagtgatgttcgtaccagctccggcacttttatctccaaaggaaaggatcctattgtttccggtatcgaggacaagctctcaacatggacatttctcccaaaagaaaacggggaagaccttcaggtattgagatatgagcacggtcagaaatatgatgctcactttgactacttccacgacaaagtcaacattgcccgtggtggacaccgcatagcaacggttctcttgtatctgtccaatgtcacaaagggtggagaaactgttttccccgatgcacaggaattctctcgccgctcgctttctgagaataaagacgatctttctgattgtgcaaagaaaggaatcgctgtgaaaccgaagaaagggaatgctctgttgttcttcaacctccaacaagacgcaatcccagacccctttagccttcacggaggttgtccagtgatcgaaggagagaaatggtcggctactaagtggatccacgtggactcattcgataagatattgacacatgatggtaactgtactgacgtaaacgagagctgtgagagatgggcagtgcttggagaatgtggaaagaatccagagtatatggttggaactccagagatccctgggaattgcagacgtagctgtaaagcttgttaaagactttaaactcctctttttctctgtaacattaaaagtttttttttcttgatcgagtttcattttcttgtttctgattgttgttacatgtatcgtctcgctttatagaatgatttttttcgtctgg

SEQ ID NO: 100052 - protein, 305 aa, Arabidopsis thaliana
  peptide (1)..(305): Ceres Seq. ID no. 13604163
ITTIAIMSMSRLGLLLFVAILLVLLQSSTCLISSPSSIINPSKVKQVSSKPRAFVYEGFLTDLECDHLISLAKENLQRSAVADNDNGESQVSDVRTSSGTFISKGKDPIVSGIEDKLSTWTFLPKENGEDLQVLRYEHGQKYDAHFDYFHDKVNIARGGHRIATVLLYLSNVTKGGETVFPDAQEFSRRSLSENKDDLSDCAKKGIAVKPKKGNALLFFNLQQDAIPDPFSLHGGCPVIEGEKWSATKWIHVDSFDKILTHDGNCTDVNESCERWAVLGECGKNPEYMVGTPEIPGNCRRSCKAC

SEQ ID NO: 100053 - protein, 299 aa, Arabidopsis thaliana; identical to SEQ ID NO: 38301
  peptide (1)..(299): Ceres Seq. ID no. 13604164

SEQ ID NO: 100054 - protein, 297 aa, Arabidopsis thaliana; identical to SEQ ID NO: 38302
  peptide (1)..(297): Ceres Seq. ID no. 13604165

SEQ ID NO: 100055 - DNA, 703 bp, Arabidopsis thaliana
  misc_feature (1)..(703): Ceres Seq. ID no. 13604170
  misc_feature (1)..(703): Ortholog of  Ceres SEQ ID NO 12587416 as cited in SEQ ID NO 68868
cttctcgaacaatcaaaaacgaactaaccaaacataaaattgaacacatcctcttcctctgctctctgcaaacaaaaaaacaccgattcggtcaggaatcattcgtcgtgaaatctgtaatggggattgttgtcaagtctttcaaggatcaattctcctctgatgagagattgaaggagtcgaacaacatcattgcgaaatatccagatagaatacctgtgatcattgagaaatattcaaacgcagatctgccagacatggagaagaacaaatacttggtcccacgagacatgactgttggacatttcatccatatgctaagcaaaaggatgcagttagatccatccaaagctctctttgttttcgtacacaacactcttcctcaaaccgctagtcgcatggactctctctacaatactttcaaggaagaagacgggttcttgtacatgtgctacagcaccgagaaaactttcggctaacaaaagatttgtcgcttcatatcgaaatcgaagcgcactctgaataatccatttgtttgattcctatgtttgtgaataacgtcagctcttgttgttactgttattgttgttgttagctgacattgtacagaaaagctaaaaaaaagaaagacatttgactttgtaaattatgtataatccaactatggcaataataataagaccaagtgatgatgattcacacg

SEQ ID NO: 100056 - protein, 158 aa, Arabidopsis thaliana; identical to SEQ ID NO: 42235
  peptide (1)..(158): Ceres Seq. ID no. 13604171

SEQ ID NO: 100057 - protein, 119 aa, Arabidopsis thaliana; identical to SEQ ID NO: 42236
  peptide (1)..(119): Ceres Seq. ID no. 13604172

SEQ ID NO: 100058 - DNA, 712 bp, Arabidopsis thaliana
  misc_feature (1)..(712): Ceres Seq. ID no. 13604191
  misc_feature (1)..(712): Ortholog of  Ceres SEQ ID NO 12638267 as cited in SEQ ID NO 0
gacaaatctccattccaactgtaaccaaaaaaagagaaaagcaaaaaaaacactctctgcgattcacactaagtatctaatgtatcaagatcgtcaaggcgttgtaggaggcggaggcggtggcggttctgcgccacacggaatcatactcgccgtcgttgttgcattagtggtgcttgttccgttcttcatcggagacagtggtgaggccattacagatgcgatcgcagagcttcttagtccggtgggacttctattgcttcctatcatcctcctcctcactatacagtttctctcgtcggaacgtggttccttcgtgtcggccattttctccaccggagaaccagaatcgattcacagggttagcggatctcccgtgggtgttgctctcttcctcgtactgatcttgttcttactctactaccgcttctctatcttcggcggagatgatggttccgatgactgatgcgacgtcgtcttttcagatctagttttttccctctttttcttttttagggaaaacaatatatttatgtctttattcgattttcgtttttattttattttgtttgacagttgaaagtcaaactatatacagcagttgcatttcatgtaggtacgcacgtgtgagtcacgtgagtgatgagtgtactgaggttgtataatttagtaaacatgatgtgattacgattaatatgaatcccgaactttt

SEQ ID NO: 100059 - protein, 154 aa, Arabidopsis thaliana
  peptide (1)..(154): Ceres Seq. ID no. 13604192
TNLHSNCNQKKRKAKKTLSAIHTKYLMYQDRQGVVGGGGGGGSAPHGIILAVVVALVVLVPFFIGDSGEAITDAIAELLSPVGLLLLPIILLLTIQFLSSERGSFVSAIFSTGEPESIHRVSGSPVGVALFLVLILFLLYYRFSIFGGDDGSDD

SEQ ID NO: 100060 - protein, 128 aa, Arabidopsis thaliana; identical to SEQ ID NO: 37024
  peptide (1)..(128): Ceres Seq. ID no. 13604193

SEQ ID NO: 100061 - DNA, 1434 bp, Arabidopsis thaliana
  misc_feature (1)..(1434): Ceres Seq. ID no. 13604209
  misc_feature (1)..(1434): Ortholog of  Ceres SEQ ID NO 15226389 as cited in SEQ ID NO 52992
  misc_feature (1)..(1434): Ortholog of  Ceres SEQ ID NO 14312152 as cited in SEQ ID NO 57197
attatatgaatatatatacgtacacaaaatcatacgtttttccacaaatggatcaagaagaggaagagatcgagattcctaattactttatctgcccaatctcactagagatcatgaaagatccagtcacgaccgtttctggcatcacttacgaccgtcaaaacatcgttaaatggctcgaaaaggtcccttcttgtcccgtcacgaagcaacctcttcccttagactccgatcttacacctaaccacatgcttcgccgtcttatccaacactggtgcgtcgagaacgagacacgtggcgttgtcagaatctctacacctcgagttcctcctggaaaacttaacgtcgtcgaagagatcaagaatctcaaaaagttcggccaagaagccttaggaagagaagaaacgttgcagaagcttgaagttttggcaatggacggaaataacagaagattgatgtgtgaatgtggcgtacataagtctttgatcttgttcgtagtcaagtgtactagtgaagacgaagacggacgacgtcgtatcaaaggactagatgagtctcttcgtcttcttcacttgatcggtattccatcaaacgacgcaaaaacaatcttgatggaaaacgatcgagttatggaatcgttgacttgggttttacaccaagaagactttctcagtaaggcttatacaattgtgctattgaggaatctaacggaatacacttcctctcatatcgtagagagattgaatcccgagatttttaaagggatcatagggtttctcaaggatgttgtaaatagtgttaatcggacgagccctaccgtgagagaaacggtacagtcatcatcaaggcctagcttgggaaaaacggaaccatcaaaacttgatcatagtttggtcatcaaacaagcggtgactgccgcgctgatgattcttttagagacttcttcgtggagccgaaaccgatcactccttgtggatctcggtgcggtttctgaactcatcgaactcgaaataagctacactggcgagaaaagaatcacagaacttatgttaggagttttatctcgtttatgttgctgtgcgaacggtagagccgagattcttgctcataggggcggaatcgcggttgtgacaaagcggctattgagggtttcacctgcggcagacgatagagctatctctatcctaactacagtgtcaaaattctcgccggaaaacatggtggtggaagagatggttaatgttgggacggtagagaagctctgttccgttctaggaatggattgtggtttgaacttgaaggagaaagcaaaagagatactaaaagatcattttgatgagtggaagaagtttccatgtattgacataactcttctcactaagctgctaagcatctcacccaaagggccaaagatctaagtaaataatctgctgc

SEQ ID NO: 100062 - protein, 471 aa, Arabidopsis thaliana
  peptide (1)..(471): Ceres Seq. ID no. 13604210
YMNIYTYTKSYVFPQMDQEEEEIEIPNYFICPISLEIMKDPVTTVSGITYDRQNIVKWLEKVPSCPVTKQPLPLDSDLTPNHMLRRLIQHWCVENETRGVVRISTPRVPPGKLNVVEEIKNLKKFGQEALGREETLQKLEVLAMDGNNRRLMCECGVHKSLILFVVKCTSEDEDGRRRIKGLDESLRLLHLIGIPSNDAKTILMENDRVMESLTWVLHQEDFLSKAYTIVLLRNLTEYTSSHIVERLNPEIFKGIIGFLKDVVNSVNRTSPTVRETVQSSSRPSLGKTEPSKLDHSLVIKQAVTAALMILLETSSWSRNRSLLVDLGAVSELIELEISYTGEKRITELMLGVLSRLCCCANGRAEILAHRGGIAVVTKRLLRVSPAADDRAISILTTVSKFSPENMVVEEMVNVGTVEKLCSVLGMDCGLNLKEKAKEILKDHFDEWKKFPCIDITLLTKLLSISPKGPKI

SEQ ID NO: 100063 - protein, 470 aa, Arabidopsis thaliana
  peptide (1)..(470): Ceres Seq. ID no. 13604211
MNIYTYTKSYVFPQMDQEEEEIEIPNYFICPISLEIMKDPVTTVSGITYDRQNIVKWLEKVPSCPVTKQPLPLDSDLTPNHMLRRLIQHWCVENETRGVVRISTPRVPPGKLNVVEEIKNLKKFGQEALGREETLQKLEVLAMDGNNRRLMCECGVHKSLILFVVKCTSEDEDGRRRIKGLDESLRLLHLIGIPSNDAKTILMENDRVMESLTWVLHQEDFLSKAYTIVLLRNLTEYTSSHIVERLNPEIFKGIIGFLKDVVNSVNRTSPTVRETVQSSSRPSLGKTEPSKLDHSLVIKQAVTAALMILLETSSWSRNRSLLVDLGAVSELIELEISYTGEKRITELMLGVLSRLCCCANGRAEILAHRGGIAVVTKRLLRVSPAADDRAISILTTVSKFSPENMVVEEMVNVGTVEKLCSVLGMDCGLNLKEKAKEILKDHFDEWKKFPCIDITLLTKLLSISPKGPKI

SEQ ID NO: 100064 - protein, 456 aa, Arabidopsis thaliana; identical to SEQ ID NO: 38779
  peptide (1)..(456): Ceres Seq. ID no. 13604212

SEQ ID NO: 100065 - DNA, 710 bp, Arabidopsis thaliana
  misc_feature (1)..(710): Ceres Seq. ID no. 13604225
  misc_feature (1)..(710): Ortholog of  Ceres SEQ ID NO 12624943 as cited in SEQ ID NO 67802
gcaagtttgcgcaacaatggcgactacgattccactcttcgcctctttcaaatacgccgatagcttaacggtcgtaggaatctccttctgcaccgcgttggtctgcgaagccatctcatggatcttaatctaccgtaccagctcatacaaatccttgaaatactccattgacaaggccacgaagaaactcgagacaatgaagacagagaatccatcgtcaaagctatccataaagaaatcaaagacgaagaagatcgatcgcgttgaaaccagcttaaaggaatcgagccgagatctgtcactcttcaagttcaaatccggcgccgttgtggcactggttctcttcgtcgtcttcggattgctcaattcactattcgaaggtaaagtcgtcgcgaagcttcctttccatccgatcacgatagtgaagaagatgagtcacaggggactgaaaggtgatgatccgacggattgttccatggcttttctctatctgctgtgttcaattagtatcagaaccaatctacagaaatttctagggttttctccgccgcgaggagctgctggtgctggtggtttgttccccatgcctgatcctaagaccaactgatcactcctttgaggttttttttttttgtttttgttgagatttttggaacaattttcatataaacacacagttacaagtttttgcaatcatctgatgattttgg

SEQ ID NO: 100066 - protein, 201 aa, Arabidopsis thaliana
  peptide (1)..(201): Ceres Seq. ID no. 13604226
QVCATMATTIPLFASFKYADSLTVVGISFCTALVCEAISWILIYRTSSYKSLKYSIDKATKKLETMKTENPSSKLSIKKSKTKKIDRVETSLKESSRDLSLFKFKSGAVVALVLFVVFGLLNSLFEGKVVAKLPFHPITIVKKMSHRGLKGDDPTDCSMAFLYLLCSISIRTNLQKFLGFSPPRGAAGAGGLFPMPDPKTN

SEQ ID NO: 100067 - protein, 196 aa, Arabidopsis thaliana; identical to SEQ ID NO: 30219
  peptide (1)..(196): Ceres Seq. ID no. 13604227

SEQ ID NO: 100068 - protein, 136 aa, Arabidopsis thaliana; identical to SEQ ID NO: 30220
  peptide (1)..(136): Ceres Seq. ID no. 13604228

SEQ ID NO: 100069 - DNA, 1561 bp, Arabidopsis thaliana
  misc_feature (1)..(1561): Ceres Seq. ID no. 13604245
  misc_feature (1)..(1561): Ortholog of  Ceres SEQ ID NO 15178767 as cited in SEQ ID NO 55317
attcgcttttctgaatcctttagagtattgttttctccgtcgaattcgcatgaacacttgagctcaacaagacggcgtggaagtggacggtgaggtagttttttttagtttttgaaagacatggcgcaaaacgggtacttggttccagcggatccttcggcggttgtgacggtgaagaagaaaacgccacaagcgtcgtgggctcttattgacgcgacgggacagagtgagccactcgatgttgataagtatgagatcatgcaccgtgtccagatccacgctcgcgatctccggattctagaccccaatttatcttacccttccactattcttggccgagagagagccattgttctcaatttggagcatatcaaggctattatcacttccgaagaggttttgcttcgggatccgtctgatgaaaatgttattccagttgtggaggagcttcgaagacgcttacctgttggaaatgcatcacacaatggtggtcaaggagacgggaaagagatcgcaggtgctcaaaacgacggtgatactggtgacgaagatgaatccccatttgaatttcgggcgctggaagtagctttggaagcaatctgtagcttcttagctgcaaggacagcagaattagaaacagctgcttatcctgctttggatgagcttacctcaaagattagtagccgtaatttggatagagttcggaaattgaagagtgccatgactcggttgacagctcgggttcaaaaggtaagagatgaactcgaacagttgctggatgatgacgatgatatggcagatctttacctttcaaggaaactttcaagtgcttcctcaccgattagtagtattggtgaaccaaattggtatactacttccccaacaataggctctaagatttcaagagcaagtagagcgagtttagccacagttcatggggatgagaatgatgttgaagaacttgaaatgttactcgaggcatacttcatgcagatcgacagcactttgaacagattaacaacactacgtgagtatattgatgacacagaggactacattaacatccagcttgacaatcatcggaatcagcttattcagttggagctagtgttaagttctggaacagtttgcttatcgatgtactctcttgtcgctggaattttcgggatgaacattccatacacatggaacgacggtcatggatacatgttcaaatacgtggtgggcttgacggggacactttgtgtagtcgtgtttgtgatcataatgtcgtacgctaggtacaaaggacttgtgggatcttgatggctgaatttgggttagatggagagattgtgaaggggcattgggcagatcttgttttcgattattatacttgtggtcgttctgagttttgaacgagcttcacaattattttagttgtcgcatcataaaatttaatcaaacatattgaaaaaagcagaagcattgtgacttgtaattgcaaagataagctctaccatcgattccttacaattagagcatagaaatcaaatttaggatccttgattccttattagct

SEQ ID NO: 100070 - protein, 394 aa, Arabidopsis thaliana; identical to SEQ ID NO: 39360
  peptide (1)..(394): Ceres Seq. ID no. 13604246

SEQ ID NO: 100071 - protein, 348 aa, Arabidopsis thaliana; identical to SEQ ID NO: 39361
  peptide (1)..(348): Ceres Seq. ID no. 13604247

SEQ ID NO: 100072 - DNA, 1696 bp, Arabidopsis thaliana
  misc_feature (1)..(1696): Ceres Seq. ID no. 13604256
  misc_feature (1)..(1696): Ortholog of  Ceres SEQ ID NO 13597648 as cited in SEQ ID NO 69125
cttgttcaaggggttggggtttcgacgctaacattctctctctcagtgaacctttagaagttaaatctgtttcatcaccggaaagtttcactaactcttcttctctctctcggagtattgattcccggcgtttagcaatggaagaaagtagacaactcgaatcgtcgattgatcggctgctgaacgaagagaaacagatgaggctcgcagaaaatgtcgccggaactagaaaagcagctaccgagattcttaagctttgtttcgaagctaaggattggaaacttctcaacgaacagattttgaatctctcgaagaaacgtggtcagcttaagcaggctgtacaatccatggtgcaacaagcaatgcagtatattgatcagacactagacatagaaactcggattgagcttattaagactctaaacaatgtagctgctggaaagatatatgtcgaaatcgagagagctcgtttgaccaagatgcttgctaagattaaggaagaacaaggtttgattgctgaagctgcggatctcatgcaagaagttgctgtggagacatttggtgctatggcaaaaactgagaaaattgctttcattcttgaacaagtccgcttgtgtttggatcaaaaagattttgtccgtgcacaaattttatctaggaagatcaacccaagagtgtttgatgcagataccacgaaggagaaaaagaagcctaaggaaggtgaaaacatggtagaggaggctccggctgatatacctacattgttggtgctaaaacggatttactatgagctaatgattcggtattattctcacaacaatgagtacattgagatatgccgtagctacaaggcgatatatgatatcccttctgtaaaggaaaacccagaacaatggattccagtcctgagaaagatttgctggtttttggccttggcaccacatgatccaatgcaatcgagcctactcaatgcaaccttggaagataaaaagttatcagagattcctgatttcaagatgcttctaaaacagattgttacaatggaggtgattcagtggacatctctctggaataaatacaaggacgagtttgagaatgagaaaaacatgattggaggctctttgggtgacaaagctggtgaagatctcaaactaagaataatcgaacacaatattctcgttgtctcaaagtactactcaaggattacctttaagagacttgcagaacttttatgcctaaccactgaggaagcagagaagcatctatctgaaatggttgtgtccaaagccttgatagcaaaaatcgacagaccatcaggaataatctgcttccagattgttaaagacagcaacgaaatcctcaactcgtgggcaacaaacttggagaagcttttggatcttgttgaaaagagttgtcaccaaattcacaaagaaacaatggttcataaagttgcactaagagcttgagaacccggtctagccacacacatcggtggaaagaatctttcaggctctcgttctaacataatcatttgagttttctttctctgcttggttcgaacacattttttttgtgttctttaggagaccttgcaagattatatacaaaactctcttttttttcctttctccatgtggtctttttaatgtttgttacaatgaaacgaaattataatgcaaaaatataataaattaag

SEQ ID NO: 100073 - protein, 487 aa, Arabidopsis thaliana
  peptide (1)..(487): Ceres Seq. ID no. 13604257
CSRGWGFDANILSLSEPLEVKSVSSPESFTNSSSLSRSIDSRRLAMEESRQLESSIDRLLNEEKQMRLAENVAGTRKAATEILKLCFEAKDWKLLNEQILNLSKKRGQLKQAVQSMVQQAMQYIDQTLDIETRIELIKTLNNVAAGKIYVEIERARLTKMLAKIKEEQGLIAEAADLMQEVAVETFGAMAKTEKIAFILEQVRLCLDQKDFVRAQILSRKINPRVFDADTTKEKKKPKEGENMVEEAPADIPTLLVLKRIYYELMIRYYSHNNEYIEICRSYKAIYDIPSVKENPEQWIPVLRKICWFLALAPHDPMQSSLLNATLEDKKLSEIPDFKMLLKQIVTMEVIQWTSLWNKYKDEFENEKNMIGGSLGDKAGEDLKLRIIEHNILVVSKYYSRITFKRLAELLCLTTEEAEKHLSEMVVSKALIAKIDRPSGIICFQIVKDSNEILNSWATNLEKLLDLVEKSCHQIHKETMVHKVALRA

SEQ ID NO: 100074 - protein, 442 aa, Arabidopsis thaliana; identical to SEQ ID NO: 25305
  peptide (1)..(442): Ceres Seq. ID no. 13604258

SEQ ID NO: 100075 - protein, 422 aa, Arabidopsis thaliana; identical to SEQ ID NO: 25306
  peptide (1)..(422): Ceres Seq. ID no. 13604259

SEQ ID NO: 100076 - DNA, 1701 bp, Arabidopsis thaliana
  misc_feature (1)..(1701): Ceres Seq. ID no. 13604264
  misc_feature (1)..(1701): Ortholog of  Ceres SEQ ID NO 13596816 as cited in SEQ ID NO 62287
aagacacgaaaaagaattttaccgactggaagaagaaaaaacatcaaccagacaaaagaaaagaaaacaaaaacacatcttcgagatcaaacaaaccctaattatcatccatcgtcgccttctcaatatatatggccggaagagcagcgatgctcgttaacgtcgggacggttataatgaccgttttgaccctggctagtttggtcggaggcttcggtgtgaattggggcaatatcgcatcacatccgttgaatcccaacattgttgttcagatgcttaaggacaataagatcaataaagtgaagctttttgacgctgattcatggacgatgaatgctttggctggtacgggcatggaggttatggttggaatccctaataaccttcttgagtctctcgcagatgattacgataatgctaaagattgggttaaagaaaacgtgacccagtatattcgtaagggtggcgtcgacatcaagtacgtagccgtggggaacgagccgtttttgtctgcatacaacggatcgttcttgaagacaacatttccagcgttaaagaacattcacaaggcgttaaaagaagctggacacaccaatataatgaaagccacgatcccacaaaacgcagaagtttaccaatcagccaacgacaagccatcagaaggtgatttccgcaaggatgtcaaacaaacgatgcttgatatcgtcaatttcttccacgaaaacgacttacctttcaccgtcaacatttaccctttccttagtctttacctaaacgagcattttcccgttgagttcgcttttcttgacggtgatggtcagacaatgactgacaaaggaaagaattatgataacgtgtttgacgccaattacgacacacttgtttacgcgttgaagaaggctgggattcacgatatgaagattatcgttggagaggttggatggccaacggatggtcacaaatatgcatcgccgaagctagcggagaaattctatgcagggcttatgaaaagacttgctaaggacggtgggactccaacgaggcctgaaagattagaggtctatctcttcggtttcctcgacgaagacatgaagagtattcttccagggccttttgagagacattggggaatctttagatacgatgggacaccaaagtttatgctagatttcacgggacaaggacgccaaatggtgcccgttgcagctaaaggtgtgcagtacttggaaaaacaatggtgcgtagtgaacaaagacacggtcaatctagacgaagttggtcctgatctagactatgcgtgttaccacggggactgcaccgcgatggaagccgggtcaacttgtagtaagctaaccaaagtccaaaacatatcatacgcatttaacatgtatttccagatacaagaccaagacgttagggcttgcgatttcaaaggagctgcaatgatcaccaaggtcaatgcatccgtgggaagttgcttgttccctgttcagatcgttagtggaagtgatgatttcaggatcaactttgtgttcggaagattcgtcgtctttggacttgttcttcttggattgctcacggttatataatttgtttttttgttgttgtttggttttctttttgcaatttggagggatttattcgacacgattaattgttatttgttattcgttttaaaaatgtttacttttgagttagttc

SEQ ID NO: 100077 - protein, 485 aa, Arabidopsis thaliana
  peptide (1)..(485): Ceres Seq. ID no. 13604265
MAGRAAMLVNVGTVIMTVLTLASLVGGFGVNWGNIASHPLNPNIVVQMLKDNKINKVKLFDADSWTMNALAGTGMEVMVGIPNNLLESLADDYDNAKDWVKENVTQYIRKGGVDIKYVAVGNEPFLSAYNGSFLKTTFPALKNIHKALKEAGHTNIMKATIPQNAEVYQSANDKPSEGDFRKDVKQTMLDIVNFFHENDLPFTVNIYPFLSLYLNEHFPVEFAFLDGDGQTMTDKGKNYDNVFDANYDTLVYALKKAGIHDMKIIVGEVGWPTDGHKYASPKLAEKFYAGLMKRLAKDGGTPTRPERLEVYLFGFLDEDMKSILPGPFERHWGIFRYDGTPKFMLDFTGQGRQMVPVAAKGVQYLEKQWCVVNKDTVNLDEVGPDLDYACYHGDCTAMEAGSTCSKLTKVQNISYAFNMYFQIQDQDVRACDFKGAAMITKVNASVGSCLFPVQIVSGSDDFRINFVFGRFVVFGLVLLGLLTVI

SEQ ID NO: 100078 - protein, 479 aa, Arabidopsis thaliana; identical to SEQ ID NO: 40548
  peptide (1)..(479): Ceres Seq. ID no. 13604266

SEQ ID NO: 100079 - protein, 470 aa, Arabidopsis thaliana; identical to SEQ ID NO: 40549
  peptide (1)..(470): Ceres Seq. ID no. 13604267

SEQ ID NO: 100080 - DNA, 1317 bp, Arabidopsis thaliana
  misc_feature (1)..(1317): Ceres Seq. ID no. 13604298
  misc_feature (1)..(1317): Ortholog of  Ceres SEQ ID NO 13581775 as cited in SEQ ID NO 51066
  misc_feature (1)..(1317): Ortholog of  Ceres SEQ ID NO 13595727 as cited in SEQ ID NO 57082
  misc_feature (1)..(1317): Ortholog of  Ceres SEQ ID NO 15171152 as cited in SEQ ID NO 60275
aaaataataagctttggtaaaaccctaaactttcgtttccaagatgcaatttctagcttctctcgtttccaattccagaaagtttggtcggagatgggatcgagctctctcgttgcatcatttctcttcgaatgcgacaccagcttcgatatcaaatccagcgttcgtcgagtttctcagggacaatgggttccagaaacctctagcaattgccatcgcaatgcgttaccctaacctcaaatccctagaacaacctcggtcagtgattcaaatgcttaaaagttacagtttttccgatacccagatccagaaatcgatccgggtccatcctcgaatgatgttctacaacgtggagaaaattctagaacccaaacttcgattctttaaagatattggatttactggctctggtcttggtaagttcgtctctcaaaactcatcagtcgttggtgtaagtctagtgaagaaattgattcctaccgttgagattctgaaatcgattgttgccccaaaacatgaagaccttcctgtcattcttagtagatgtggttggcttcttctcagtagagaccctaacttgtttctcttaccaaacatctcataccttgaaacctgtggaattgttgggtctcagcttgcttctttacttagaagacagccaagaatcttcaatctctctgaggaaaaactcagaggatatgtctctcgtgctttggatcttggttttactttgaactcgaggatgcttgtgcacgctgttatctcgttaagttctttgagcgagaaaacgtttgatcgaaaggttaagttgtttatggctaatggattctctgaagatgagataacagatattatacgaagatctccaggtttgatccggtgctcagaagataagcttacactggggtttgagttttacttgaagagaatggggttagagagggaagctttggcgaaacgtccttgtgtgttgtcgtataatcttgagaagagggtgattcctaggcttaaagttttgcagatcttgagggaaaaagggttgttgttaaaagaggagaagaagaagaagaacatggttggcattgttgagatgactgaggaagcttttctagagaaatatgttgtgagatttggagatgagattgctgaggaactgctggttgcttacaagtgcgtgtgtttagtcgatgaaacgctacttgatcgtatcaagatctaattgtagatttcacaagtccaaacttgaaattttgtcattgtatccaaacttcgctcatccgtaactgtgttgaacattataatttggaagtaactctt

SEQ ID NO: 100081 - protein, 391 aa, Arabidopsis thaliana
  peptide (1)..(391): Ceres Seq. ID no. 13604299
MQFLASLVSNSRKFGRRWDRALSLHHFSSNATPASISNPAFVEFLRDNGFQKPLAIAIAMRYPNLKSLEQPRSVIQMLKSYSFSDTQIQKSIRVHPRMMFYNVEKILEPKLRFFKDIGFTGSGLGKFVSQNSSVVGVSLVKKLIPTVEILKSIVAPKHEDLPVILSRCGWLLLSRDPNLFLLPNISYLETCGIVGSQLASLLRRQPRIFNLSEEKLRGYVSRALDLGFTLNSRMLVHAVISLSSLSEKTFDRKVKLFMANGFSEDEITDIIRRSPGLIRCSEDKLTLGFEFYLKRMGLEREALAKRPCVLSYNLEKRVIPRLKVLQILREKGLLLKEEKKKKNMVGIVEMTEEAFLEKYVVRFGDEIAEELLVAYKCVCLVDETLLDRIKI

SEQ ID NO: 100082 - protein, 332 aa, Arabidopsis thaliana
  peptide (1)..(332): Ceres Seq. ID no. 13604300
MRYPNLKSLEQPRSVIQMLKSYSFSDTQIQKSIRVHPRMMFYNVEKILEPKLRFFKDIGFTGSGLGKFVSQNSSVVGVSLVKKLIPTVEILKSIVAPKHEDLPVILSRCGWLLLSRDPNLFLLPNISYLETCGIVGSQLASLLRRQPRIFNLSEEKLRGYVSRALDLGFTLNSRMLVHAVISLSSLSEKTFDRKVKLFMANGFSEDEITDIIRRSPGLIRCSEDKLTLGFEFYLKRMGLEREALAKRPCVLSYNLEKRVIPRLKVLQILREKGLLLKEEKKKKNMVGIVEMTEEAFLEKYVVRFGDEIAEELLVAYKCVCLVDETLLDRIKI

SEQ ID NO: 100083 - protein, 315 aa, Arabidopsis thaliana
  peptide (1)..(315): Ceres Seq. ID no. 13604301
MLKSYSFSDTQIQKSIRVHPRMMFYNVEKILEPKLRFFKDIGFTGSGLGKFVSQNSSVVGVSLVKKLIPTVEILKSIVAPKHEDLPVILSRCGWLLLSRDPNLFLLPNISYLETCGIVGSQLASLLRRQPRIFNLSEEKLRGYVSRALDLGFTLNSRMLVHAVISLSSLSEKTFDRKVKLFMANGFSEDEITDIIRRSPGLIRCSEDKLTLGFEFYLKRMGLEREALAKRPCVLSYNLEKRVIPRLKVLQILREKGLLLKEEKKKKNMVGIVEMTEEAFLEKYVVRFGDEIAEELLVAYKCVCLVDETLLDRIKI

SEQ ID NO: 100084 - DNA, 970 bp, Arabidopsis thaliana
  misc_feature (1)..(970): Ceres Seq. ID no. 13604302
  misc_feature (1)..(970): Ortholog of  Ceres SEQ ID NO 15226909 as cited in SEQ ID NO 61336
  misc_feature (1)..(970): Ortholog of  Ceres SEQ ID NO 15179474 as cited in SEQ ID NO 0
attcaaaattatataaaatgggaagcagcagcgacgagacgccagtggttctcatcacaggatgttctcagggaggaatcggtcacgcgttggcgcgtgagttctcggctaatggttgtcgtgtggtggcgacgagtcgatcgcagaagacgatgactgaattggagaaagattccaagttctttgtgcaagagctcgatgttcagtctgagcagagcgtgagtaaagttgtgtcgaaagttatcgacaaatttggtcagattgatgttttggttaataacgccggagttcagtgtatcggacctttggcggagattccaatttcagccatggattacaccttcaacaccaatgtgctcggttccatgaggatgactcaagctgttgtacctcacatggcgtctaagaaaaagggaaagattgtgaacataggaagtattagcataatggcaccaggaccatgggctggggtttatactgcatcaaaagctgctcttcatgctcttaccgacactttaaggttggagcttaagccatttgggattgatgtaatcaacattgtaccaggaggtattcaatcaaacatagctaactcagggatatcgagtttcaacaatttacctgaattgaaactatacaaaccgttcgaggacgctatccgtgagagagcgtttctgtcgcaaaacataaagccgatacccacagagacttttgcgaaagagactgtttccgtggtgctgaagaaaaacccaccggcttggtactctacaggtaggttatctacagtcatggcgatcatgcaccatataccgattttcatgaaagattttctgttgactaagagttttatgaaaaagggagtaaaacctgaatagttgtgttcttggttagaaactgttttaaatgtatccaacaaagtaaatgtgttgcctaaccatgttacatctttagtaaaaggattaatcaaggt

SEQ ID NO: 100085 - protein, 290 aa, Arabidopsis thaliana
  peptide (1)..(290): Ceres Seq. ID no. 13604303
SKLYKMGSSSDETPVVLITGCSQGGIGHALAREFSANGCRVVATSRSQKTMTELEKDSKFFVQELDVQSEQSVSKVVSKVIDKFGQIDVLVNNAGVQCIGPLAEIPISAMDYTFNTNVLGSMRMTQAVVPHMASKKKGKIVNIGSISIMAPGPWAGVYTASKAALHALTDTLRLELKPFGIDVINIVPGGIQSNIANSGISSFNNLPELKLYKPFEDAIRERAFLSQNIKPIPTETFAKETVSVVLKKNPPAWYSTGRLSTVMAIMHHIPIFMKDFLLTKSFMKKGVKPE

SEQ ID NO: 100086 - protein, 285 aa, Arabidopsis thaliana; identical to SEQ ID NO: 28398
  peptide (1)..(285): Ceres Seq. ID no. 13604304

SEQ ID NO: 100087 - protein, 240 aa, Arabidopsis thaliana; identical to SEQ ID NO: 28399
  peptide (1)..(240): Ceres Seq. ID no. 13604305

SEQ ID NO: 100088 - DNA, 1289 bp, Arabidopsis thaliana
  misc_feature (1)..(1289): Ceres Seq. ID no. 13604316
  misc_feature (1)..(1289): Ortholog of  Ceres SEQ ID NO 14313147 as cited in SEQ ID NO 54166
  misc_feature (1)..(1289): Ortholog of  Ceres SEQ ID NO 13598882 as cited in SEQ ID NO 0
atcttaccctaaaaaccacatttcttaacttcctcaataaaaaaaagaaaagcttcaccctttaattttaccctcaaccccaaaacaaaaaccccttcctccacgagggcatacagaaatatcaaagacccaatctttctttcacttccccaatctctagatgacaatctaacgatacagttccttttagatcgattaccaaatacaaaggatcaatttttcttacatgaacactctgttgtaatggcagaggagaatctagaactgagtcttttatgtacagagagcaacgttgatgatgagggcatgattgttgacgaaactccgattgaaatttcgattcctcagatgggtttttctcaatcggagagtgaggagattatcatggagatggtggagaaggagaagcagcatttgccaagtgatgattacatcaagagacttagaagtggagatttggatttgaatgttggaagaagagatgccctcaattggatttggaaggcttgtgaagtacaccagtttggaccattgtgtttttgcttagcaatgaactacttggatcgattcttatcggttcatgatttgcctagtggcaaaggttggatattgcagttgttggctgtggcttgtttatcattggcagccaaaattgaagaaactgaagttccaatgttgatagatcttcaggttggagatcctcagtttgtgtttgaggctaaatcagtccaaagaatggagcttttggtgttgaacaaattgaaatggagattgagagcaataactccatgctcatacataagatatttcctgagaaagatgagtaaatgtgatcaagaaccatccaacacattgatatctagatcattacaagtgatagccagcacaaccaaaggtattgactttttggagtttagaccttctgaagttgctgctgctgtggcactttctgtttctggagaattgcagagagtacactttgacaactcttccttctctcctcttttctcactacttcaaaaggagagagtgaagaagataggggaaatgatagagagtgatggctcagacttatgttcacaaacacccaatggggttttagaagtatcggcttgttgtttcagctttaagacccatgattcttcttcttcttatacacatctttcttaaaaaaaaaactgtttttttcttacattattataatcagtatgatgtctgatgagaggttgaaaaaagaggacaataaatcaaagcaaaaatttttaaataaataaaagtgtattaatttc

SEQ ID NO: 100089 - protein, 308 aa, Arabidopsis thaliana
  peptide (1)..(308): Ceres Seq. ID no. 13604317
MAEENLELSLLCTESNVDDEGMIVDETPIEISIPQMGFSQSESEEIIMEMVEKEKQHLPSDDYIKRLRSGDLDLNVGRRDALNWIWKACEVHQFGPLCFCLAMNYLDRFLSVHDLPSGKGWILQLLAVACLSLAAKIEETEVPMLIDLQVGDPQFVFEAKSVQRMELLVLNKLKWRLRAITPCSYIRYFLRKMSKCDQEPSNTLISRSLQVIASTTKGIDFLEFRPSEVAAAVALSVSGELQRVHFDNSSFSPLFSLLQKERVKKIGEMIESDGSDLCSQTPNGVLEVSACCFSFKTHDSSSSYTHLS

SEQ ID NO: 100090 - protein, 287 aa, Arabidopsis thaliana
  peptide (1)..(287): Ceres Seq. ID no. 13604318
MIVDETPIEISIPQMGFSQSESEEIIMEMVEKEKQHLPSDDYIKRLRSGDLDLNVGRRDALNWIWKACEVHQFGPLCFCLAMNYLDRFLSVHDLPSGKGWILQLLAVACLSLAAKIEETEVPMLIDLQVGDPQFVFEAKSVQRMELLVLNKLKWRLRAITPCSYIRYFLRKMSKCDQEPSNTLISRSLQVIASTTKGIDFLEFRPSEVAAAVALSVSGELQRVHFDNSSFSPLFSLLQKERVKKIGEMIESDGSDLCSQTPNGVLEVSACCFSFKTHDSSSSYTHLS

SEQ ID NO: 100091 - protein, 273 aa, Arabidopsis thaliana
  peptide (1)..(273): Ceres Seq. ID no. 13604319
MGFSQSESEEIIMEMVEKEKQHLPSDDYIKRLRSGDLDLNVGRRDALNWIWKACEVHQFGPLCFCLAMNYLDRFLSVHDLPSGKGWILQLLAVACLSLAAKIEETEVPMLIDLQVGDPQFVFEAKSVQRMELLVLNKLKWRLRAITPCSYIRYFLRKMSKCDQEPSNTLISRSLQVIASTTKGIDFLEFRPSEVAAAVALSVSGELQRVHFDNSSFSPLFSLLQKERVKKIGEMIESDGSDLCSQTPNGVLEVSACCFSFKTHDSSSSYTHLS

SEQ ID NO: 100092 - DNA, 1293 bp, Arabidopsis thaliana
  misc_feature (1)..(1293): Ceres Seq. ID no. 13604335
  misc_feature (1)..(1293): Ortholog of  Ceres SEQ ID NO 15169045 as cited in SEQ ID NO 58372
  misc_feature (1)..(1293): Ortholog of  Ceres SEQ ID NO 13597361 as cited in SEQ ID NO 63638
  misc_feature (1)..(1293): Ortholog of  Ceres SEQ ID NO 13595945 as cited in SEQ ID NO 68157
tcacacacacacacacacactctgttttcttcgtccattctattaccagaaaacagagtttgatagagagaaaagaatggaactgtcgactcaaatgaatgtgttcgaagagcttcttgttccgacaaagcaagaaacaaccgacaacaacatcaacaatctgagctttaatggcggatttgatcatcatcatcatcaattcttcccaaatggatataatattgattacctctgtttcaacaatgaagaagaagacgaaaatacccttttgtatccttcttctttcatggatctaatctctcaacctcctccattgcttcttcaccaaccgccaccgttacaaccactgtcgccgccgttatcctcctccgcgaccgccggagcaacatttgactacccttttcttgaggctttgcaagagataattgactcttcttcctcatcgcctccattgatccttcaaaatggtcaagaagagaactttaataatccgatgtcgtatccctctccattgatggagtctgatcagagcaagagcttcagtgttggttactgtggaggagagacgaacaagaagaagagcaaaaagcttgaaggccaaccttctaagaatctcatggcggagagacgacggagaaaacgacttaacgatcgtctttctatgctccgatccatcgtcccaaaaatcagtaagatggacaggacatcgatattaggagatgccatagattacatgaaagagcttttagacaaaatcaacaaattacaagatgaggaacaagaacttggaaatagcaacaattcacatcactctaagctcttcggtgatctcaaggatcttaatgcgaacgaacctctggtcagaaactcaccaaagtttgaaatagatcgtagagacgaggatactcgagttgatatatgctgctcgccaaaaccgggattgctactatctactgtgaatacattagagactctaggcttggagattgaacaatgtgttataagctgctttagtgatttctctttgcaggcttcttgttctgagggagctgagcagagagatttcataacatcagaagatataaaacaagcattattcagaaacgcaggttatggtggaagctgcttgtaatgagtcatgattgaaactaataaaccaaaactattgtttatttctaataatactagcgcttataaactttagatgttgttttaattcccttgtgagtttggtttttttttcctaggggaaaacattatgagttcagttgtataaacaaaagaaggaaattt

SEQ ID NO: 100093 - protein, 376 aa, Arabidopsis thaliana
  peptide (1)..(376): Ceres Seq. ID no. 13604336
HTHTHTLCFLRPFYYQKTEFDREKRMELSTQMNVFEELLVPTKQETTDNNINNLSFNGGFDHHHHQFFPNGYNIDYLCFNNEEEDENTLLYPSSFMDLISQPPPLLLHQPPPLQPLSPPLSSSATAGATFDYPFLEALQEIIDSSSSSPPLILQNGQEENFNNPMSYPSPLMESDQSKSFSVGYCGGETNKKKSKKLEGQPSKNLMAERRRRKRLNDRLSMLRSIVPKISKMDRTSILGDAIDYMKELLDKINKLQDEEQELGNSNNSHHSKLFGDLKDLNANEPLVRNSPKFEIDRRDEDTRVDICCSPKPGLLLSTVNTLETLGLEIEQCVISCFSDFSLQASCSEGAEQRDFITSEDIKQALFRNAGYGGSCL

SEQ ID NO: 100094 - protein, 351 aa, Arabidopsis thaliana
  peptide (1)..(351): Ceres Seq. ID no. 13604337
MELSTQMNVFEELLVPTKQETTDNNINNLSFNGGFDHHHHQFFPNGYNIDYLCFNNEEEDENTLLYPSSFMDLISQPPPLLLHQPPPLQPLSPPLSSSATAGATFDYPFLEALQEIIDSSSSSPPLILQNGQEENFNNPMSYPSPLMESDQSKSFSVGYCGGETNKKKSKKLEGQPSKNLMAERRRRKRLNDRLSMLRSIVPKISKMDRTSILGDAIDYMKELLDKINKLQDEEQELGNSNNSHHSKLFGDLKDLNANEPLVRNSPKFEIDRRDEDTRVDICCSPKPGLLLSTVNTLETLGLEIEQCVISCFSDFSLQASCSEGAEQRDFITSEDIKQALFRNAGYGGSCL

SEQ ID NO: 100095 - protein, 345 aa, Arabidopsis thaliana
  peptide (1)..(345): Ceres Seq. ID no. 13604338
MNVFEELLVPTKQETTDNNINNLSFNGGFDHHHHQFFPNGYNIDYLCFNNEEEDENTLLYPSSFMDLISQPPPLLLHQPPPLQPLSPPLSSSATAGATFDYPFLEALQEIIDSSSSSPPLILQNGQEENFNNPMSYPSPLMESDQSKSFSVGYCGGETNKKKSKKLEGQPSKNLMAERRRRKRLNDRLSMLRSIVPKISKMDRTSILGDAIDYMKELLDKINKLQDEEQELGNSNNSHHSKLFGDLKDLNANEPLVRNSPKFEIDRRDEDTRVDICCSPKPGLLLSTVNTLETLGLEIEQCVISCFSDFSLQASCSEGAEQRDFITSEDIKQALFRNAGYGGSCL

SEQ ID NO: 100096 - DNA, 1111 bp, Arabidopsis thaliana
  misc_feature (1)..(1111): Ceres Seq. ID no. 13604343
  misc_feature (1)..(1111): Ortholog of  Ceres SEQ ID NO 12633565 as cited in SEQ ID NO 1190
  misc_feature (1)..(1111): Ortholog of  Ceres SEQ ID NO 15171390 as cited in SEQ ID NO 51650
  misc_feature (1)..(1111): Ortholog of  Ceres SEQ ID NO 13594845 as cited in SEQ ID NO 51940
agcagagcactcgataattaacactagggacgaagaagctctcgtttagtaaattttagcttagaacacagaagaagcattttttcggatctgagatctttagatccgaacatcgtttatttcaaatcgtttattcaaggtctaaaaaaaagttttgaagaatcatagccatgtcaagaaggcaagtaaggcgtgtaggggatagtggaagcttcccatttgtaggagctctgcattcaaaatcacgttcgtctcctctgttatcagtttgccttgttctcgtgggagcatgccttctcattggttatgcttacagtggtccaggtatgttcaaaagtatcagagaagtcagcaagattacaggtgactattcttgcacagcagaagttcaaagagccattcctattcttaagagtgcgtatggagatagcatgcgcaaagtcctgcacgtgggtcctgaaacatgctcagtggtctcgagtctgttgaatgaagaagagacagaagcatggggtgttgaaccatatgatgtggaggatgcagactctaactgcaaaagtcttttgcacaagggccttgtacgtgtggctgacatcaaattccctcttccttaccggtcaaagtcgttttctcttgtgatcgtctcagacgctttggattacctctcacccaggtacctgaacaaaactgtgcctgaacttgctcgcgtcgcttcagatggtgtcgttcttttagcaggtaaccctggtcaacaaaaggctaaaggtggggaattgtcgaaatttggacggcctgctaaaatgcgtagctcgtcgtggtggatccgtttcttctcacagacgaacttagaggaaaacgaagcagcaagcaagaaattcgaacaagcagcttccaagagttcatacaaaccagcttgtcaagttttccacctcaagccattacattagtacacactattattactggtcttaagacatcaaaccagatatctctcctctctgtttaataccctttttttccgctatagaaagaaactaaactcccacaaattgtaattcattctcaacgatttgattcataatttaactatttaataaatttgcctcttctc

SEQ ID NO: 100097 - protein, 258 aa, Arabidopsis thaliana
  peptide (1)..(258): Ceres Seq. ID no. 13604344
MSRRQVRRVGDSGSFPFVGALHSKSRSSPLLSVCLVLVGACLLIGYAYSGPGMFKSIREVSKITGDYSCTAEVQRAIPILKSAYGDSMRKVLHVGPETCSVVSSLLNEEETEAWGVEPYDVEDADSNCKSLLHKGLVRVADIKFPLPYRSKSFSLVIVSDALDYLSPRYLNKTVPELARVASDGVVLLAGNPGQQKAKGGELSKFGRPAKMRSSSWWIRFFSQTNLEENEAASKKFEQAASKSSYKPACQVFHLKPLH

SEQ ID NO: 100098 - protein, 206 aa, Arabidopsis thaliana
  peptide (1)..(206): Ceres Seq. ID no. 13604345
MFKSIREVSKITGDYSCTAEVQRAIPILKSAYGDSMRKVLHVGPETCSVVSSLLNEEETEAWGVEPYDVEDADSNCKSLLHKGLVRVADIKFPLPYRSKSFSLVIVSDALDYLSPRYLNKTVPELARVASDGVVLLAGNPGQQKAKGGELSKFGRPAKMRSSSWWIRFFSQTNLEENEAASKKFEQAASKSSYKPACQVFHLKPLH

SEQ ID NO: 100099 - protein, 171 aa, Arabidopsis thaliana
  peptide (1)..(171): Ceres Seq. ID no. 13604346
MRKVLHVGPETCSVVSSLLNEEETEAWGVEPYDVEDADSNCKSLLHKGLVRVADIKFPLPYRSKSFSLVIVSDALDYLSPRYLNKTVPELARVASDGVVLLAGNPGQQKAKGGELSKFGRPAKMRSSSWWIRFFSQTNLEENEAASKKFEQAASKSSYKPACQVFHLKPLH

SEQ ID NO: 100100 - DNA, 1206 bp, Arabidopsis thaliana
  misc_feature (1)..(1206): Ceres Seq. ID no. 13604347
  misc_feature (1)..(1206): Ortholog of  Ceres SEQ ID NO 14311074 as cited in SEQ ID NO 53253
acaagcaaaaaaaattcactttttgtttttgttaacactcacgtgaaagcttcgttcttcttcaaaccttttgaacaatttctccgatgccggtaaatcaccggtttacgtttagctaccggttactcttcctcatcttccttttgagtttcgaaacggcacagcgtttggtcaccggtgacccaaacgacgaagcatgcttgacgaatctccgtcagagtttagaagatccagctaataatctccgtaactggacaaaatccttcttcataaatccttgctccggcttctcttcttatcttcatggagtcatttgcaacaatggcagaatttacaaactctccttaacaaatctctctctccgtggctcaatctctccgtttctctctaattgcacaaatctccaatccctagatctatcttccaaccagatctccggcgagatcccgccgcaattacagtttttcgttaacctagccgttcttaatctctcttctaatcgtctctccggtcaaatctcaccacaaatcgctctctgcgcttacttaaacgtcatcgatcttcacgataaccaactctccggtcaaattccgtttcagttcgggcttctcgctagattaacggcgtttgatgtctctaataacaaattatccggtcagattccctcgaatctggcgatgcgtaacggaaacttgccgagatttaatgcgagctcgtttatagggaacaagaaattgtttgggtatccgttggaggagatgaagaacaaaggattgtcgataatggcgattgttgggattggacttggaagtggaatcgcgagcttagtgattagcttcactggagtttgtatatggttgaagattacagagaaaaagatggaggaagaagaaggaaagataagtcactccatgcctgtttactaaacacaaacatttcgttttttttcttcttaagtataattaacggtttcttttatcacataattagttttttttttccattttgatcaaaagcatacagcaatagggagggttcattaagcgaatttagggttaattaatgctttgatcatatatacatgtttctttggttatctttggatacatattaacaaaaatcacaaggtttaagcatgaggtactaagttattgttgtatagtttttgtagttatgaaagtgtaatttataatgacatcatttatg

SEQ ID NO: 100101 - protein, 279 aa, Arabidopsis thaliana
  peptide (1)..(279): Ceres Seq. ID no. 13604348
MPVNHRFTFSYRLLFLIFLLSFETAQRLVTGDPNDEACLTNLRQSLEDPANNLRNWTKSFFINPCSGFSSYLHGVICNNGRIYKLSLTNLSLRGSISPFLSNCTNLQSLDLSSNQISGEIPPQLQFFVNLAVLNLSSNRLSGQISPQIALCAYLNVIDLHDNQLSGQIPFQFGLLARLTAFDVSNNKLSGQIPSNLAMRNGNLPRFNASSFIGNKKLFGYPLEEMKNKGLSIMAIVGIGLGSGIASLVISFTGVCIWLKITEKKMEEEEGKISHSMPVY

SEQ ID NO: 100102 - DNA, 1056 bp, Arabidopsis thaliana
  misc_feature (1)..(1056): Ceres Seq. ID no. 13604353
  misc_feature (1)..(1056): Ortholog of  Ceres SEQ ID NO 14307111 as cited in SEQ ID NO 54586
  misc_feature (1)..(1056): Ortholog of  Ceres SEQ ID NO 13655720 as cited in SEQ ID NO 63418
  misc_feature (1)..(1056): Ortholog of  Ceres SEQ ID NO 15176165 as cited in SEQ ID NO 0
cagccatggaagaagcagatcagttatgtttagctgctaaatccggcgacttgaaaaaggttcaaactttaatttactccggcgccgacgttactcactttgataacgacggtttaacgccgttaatgcacgccgctaaaatcggaaacgcagagatagtaacggcgttactcgaatccggagctccatggaacgcattatctccatcaaatctctcagcaggagatttcgccatggaagcaggacatcaagaaactttcgatcttcttctcaaaaccgggatccaatcagagctaatcttaggaacaatcgcaagaaaccaaacaaagaacgaatattctaatcaagaatatcttcaagacagagttagtttcagtgaagacaagttaatggatagtgaaagcaaaggtgtgatgatggcttgggaaaaaccattaatggaagctcacgctaaagctatttgtctcaacggtggtcacattcttaacgttggtttcggtatgggacttgtcgatacagcgattcaacgatacaatccggttaaacacacgatcattgaagctcatcctgaagtttataagcgtatgattgaatctggttggggagagaaagagaatgtgaagattgtttttggaagatggcaagatgttcttgataagcttgatgataattcttttgatgggatcttttttgatacttatggtgagtattatgaagatttaagagagtttcatcagcatcttccgaggctgttgaagcctgatggtgtttattcgtatttcaatgggttttgtggaagcaacgcgttttttcatgttgtgtattgcaatttggtgactttggagattgagaatttagggtttagcactcagttgattccattgccggttaaggattgtcttggggatgaagtttgggaaggtgtcaagcaaaagtattggcagcttgatacttattatctccctgtttgtcagtttagtgactgaagaagttttatgataccagcaattttgcgatattgtaatttttcttactcataaaaagtagattttttat

SEQ ID NO: 100103 - protein, 327 aa, Arabidopsis thaliana
  peptide (1)..(327): Ceres Seq. ID no. 13604354
AMEEADQLCLAAKSGDLKKVQTLIYSGADVTHFDNDGLTPLMHAAKIGNAEIVTALLESGAPWNALSPSNLSAGDFAMEAGHQETFDLLLKTGIQSELILGTIARNQTKNEYSNQEYLQDRVSFSEDKLMDSESKGVMMAWEKPLMEAHAKAICLNGGHILNVGFGMGLVDTAIQRYNPVKHTIIEAHPEVYKRMIESGWGEKENVKIVFGRWQDVLDKLDDNSFDGIFFDTYGEYYEDLREFHQHLPRLLKPDGVYSYFNGFCGSNAFFHVVYCNLVTLEIENLGFSTQLIPLPVKDCLGDEVWEGVKQKYWQLDTYYLPVCQFSD

SEQ ID NO: 100104 - protein, 326 aa, Arabidopsis thaliana
  peptide (1)..(326): Ceres Seq. ID no. 13604355
MEEADQLCLAAKSGDLKKVQTLIYSGADVTHFDNDGLTPLMHAAKIGNAEIVTALLESGAPWNALSPSNLSAGDFAMEAGHQETFDLLLKTGIQSELILGTIARNQTKNEYSNQEYLQDRVSFSEDKLMDSESKGVMMAWEKPLMEAHAKAICLNGGHILNVGFGMGLVDTAIQRYNPVKHTIIEAHPEVYKRMIESGWGEKENVKIVFGRWQDVLDKLDDNSFDGIFFDTYGEYYEDLREFHQHLPRLLKPDGVYSYFNGFCGSNAFFHVVYCNLVTLEIENLGFSTQLIPLPVKDCLGDEVWEGVKQKYWQLDTYYLPVCQFSD

SEQ ID NO: 100105 - protein, 286 aa, Arabidopsis thaliana
  peptide (1)..(286): Ceres Seq. ID no. 13604356
MHAAKIGNAEIVTALLESGAPWNALSPSNLSAGDFAMEAGHQETFDLLLKTGIQSELILGTIARNQTKNEYSNQEYLQDRVSFSEDKLMDSESKGVMMAWEKPLMEAHAKAICLNGGHILNVGFGMGLVDTAIQRYNPVKHTIIEAHPEVYKRMIESGWGEKENVKIVFGRWQDVLDKLDDNSFDGIFFDTYGEYYEDLREFHQHLPRLLKPDGVYSYFNGFCGSNAFFHVVYCNLVTLEIENLGFSTQLIPLPVKDCLGDEVWEGVKQKYWQLDTYYLPVCQFSD

SEQ ID NO: 100106 - DNA, 1373 bp, Arabidopsis thaliana
  misc_feature (1)..(1373): Ceres Seq. ID no. 13604357
  misc_feature (1)..(1373): Ortholog of  Ceres SEQ ID NO 15177328 as cited in SEQ ID NO 52523
  misc_feature (1)..(1373): Ortholog of  Ceres SEQ ID NO 13655881 as cited in SEQ ID NO 64426
attagtggtaatttctgatcccattgctgctcctctctccggagatacaaaggcgaatctgaccagtaagaaagatggcagtcgagatggcctctcagtctcaggttttggtggaagagaaatcgagtgttagaatcttgacactaaacagaccaaagcagctgaatgctctgtccttccacatgatctctcgattgctgcaactgttccttgcatttgaggaggaccctagtgtgaaacttgtcatcctaaagggtcatgggagagccttttgtgctggtggcgatgttgcagctgttgttcgtgacatcaatcaaggtaactggagactcggtgccaattacttctcatctgaatacatgctcaactatgttatggccacatatagcaaagctcaggtttcaatcttgaatggtatcgtcatgggaggcggagctggtgtatccgtccatggtcgatttcgtattgcaactgagaacacggtttttgccatgcctgagacagctctggggctctttccagatgtaggcgcctcctacttcttgtcaaggctccctggtttttttggggagtatgttggcctcacaggagctagattagatggtgctgaaatgcttgcttgtggccttgcaactcattttgtgccttcaacgaggttgactgcattagaagcagatctttgcagaattaattcaaatgatccaacttttgcctcaacaattctcgatgcatacacccagcatccgcgcctgaaacagcagagtgcttaccgcaggttagatgttattgataggtgtttctcaaggagaacagtcgaagaaattatatctgcacttgagagagaggccactcaagaagcagatggttggatctcagctaccattcaagcattgaagaagggttcaccagcaagccttaaaatctctcttagatcgataagggaagggcgattgcagggggtggggcagtgtcttatccgcgagtatagaatggtgtgtcatgtgatgaagggagaaatcagcaaagattttgtggaggggtgcagagccatattggtagacaaagataagaacccaaagtgggagccaaggcgactggaggacatgaaggatagcatggtggagcagtacttcgagagagtggaacgggaggatgatctaaagcttccgccaaggaataacttgcctgctttagggatcgcaaagctgtgaagtggagaaggtgatggagcactattgtttacgtctgtgggaaagaaaaaagaaaataaatgtaacaacacttgtgttgaataggacttgcatacattacataaatcattattgtatttgagaattgacaccaaagcagcagagcagaattgtgttaagatt

SEQ ID NO: 100107 - protein, 378 aa, Arabidopsis thaliana; identical to SEQ ID NO: 25789
  peptide (1)..(378): Ceres Seq. ID no. 13604358

SEQ ID NO: 100108 - protein, 374 aa, Arabidopsis thaliana; identical to SEQ ID NO: 25790
  peptide (1)..(374): Ceres Seq. ID no. 13604359

SEQ ID NO: 100109 - protein, 342 aa, Arabidopsis thaliana; identical to SEQ ID NO: 25791
  peptide (1)..(342): Ceres Seq. ID no. 13604360

SEQ ID NO: 100110 - DNA, 1422 bp, Arabidopsis thaliana
  misc_feature (1)..(1422): Ceres Seq. ID no. 13604380
  misc_feature (1)..(1422): Ortholog of  Ceres SEQ ID NO 15176596 as cited in SEQ ID NO 55168
  misc_feature (1)..(1422): Ortholog of  Ceres SEQ ID NO 14301576 as cited in SEQ ID NO 62362
acacaatccacacacatccaatcacaacctcatcatatatctcccgctaatctttttttctttgatctttttttttttgcttattatttttttgactttgatctcccatcagttcatcttcttcttcttcttctgatcaaccatggctgctgctataagtgctgcagtctctttaccttcctccaagtcatcctctctcctcaccaaaatctcctctgtatcccctcaaaggattttcctcaagaagagcacagtgtgttacagaagagttgtgtcagtgaaggctcaggtgacaacagatactaccgaggcaccaccagttaaagtagtcaaggagtctaagaaacaggaagaagggattgttgtcaacaaattcaaacctaagaacccttacactggtcgctgccttttgaacaccaagatcaccggtgatgacgctcccggtgagacttggcacattgtcttcaccaccgaaggtgaggttccgtatagagaaggacaatcgataggagtgattccagagggaatagacaagaacgggaagccgcacaagctcaggctttactctatcgcgagtagtgccattggtgactttggagactccaagaccgtttctctctgtgtcaagagactagtttacacaaatgatggcggagagattgttaagggggtctgctccaacttcttgtgtgacttgaagccgggtgatgaagctaagatcactggacctgttggcaaggaaatgcttatgccaaaagaccccaatgccaccatcatcatgcttggaacaggaactggaatagctccattcagatcatttttgtggaaaatgttctttgaggagcacgaggactacaagttcaatggtttggcgtggcttttcttgggtgtacccacaagcagctcactgctatacaaggaggagtttgagaagatgaaggagaagaacccagacaacttcaggctggactttgcggtgagcagagagcagacgaacgagaagggagagaaaatgtacattcagacaagaatggcagagtatgcagaagagctgtgggagttgctgaagaaagacaacacctttgtttacatgtgtggtcttaagggtatggagaagggtatcgatgacattatggtctcgcttgctgctaaagatgggatcgattggttggagtacaagaagcaattgaagaggagtgaacagtggaatgttgaagtctactaaggaagcttctgagggagtaattatataatgtagataaaaagcttctgatgcattgtgaaatcttcatatctgcttcttttttctttctcaaggattttcaatcaaaacattcaaaagagagcatcaataccaccaaactactctttctcacttgttgttcatgttatatttcttgcaacaatatagtgagttttgtg

SEQ ID NO: 100111 - protein, 360 aa, Arabidopsis thaliana; identical to SEQ ID NO: 41459
  peptide (1)..(360): Ceres Seq. ID no. 13604381

SEQ ID NO: 100112 - DNA, 1781 bp, Arabidopsis thaliana
  misc_feature (1)..(1781): Ceres Seq. ID no. 13604382
  misc_feature (1)..(1781): Ortholog of  Ceres SEQ ID NO 13659971 as cited in SEQ ID NO 67565
  misc_feature (1)..(1781): Ortholog of  Ceres SEQ ID NO 13500385 as cited in SEQ ID NO 67583
cttctttcatctctttcttttattaatcccctttcttttctaactttctcgattcatcagagccatgggtgtctgtttctccgccattagagtcactggtgctagcagcagtagacgaagcagtcagaccaaatccaaggctgctcctactcccatcgataccaaggcctctaccaaacgccgaaccggctccatcccctgcggcaagcgtaccgattttggctactccaaagacttccacgatcactacaccatcggcaagttgctcggccatggtcaattcggctacacctacgtcgccatccacagacccaatggagatcgcgtcgccgtcaaaagactcgataagtctaagatggttcttcctattgctgttgaggatgtcaagcgtgaggttcagattcttattgctctctctggccacgagaatgttgttcagtttcacaatgcctttgaggatgacgattacgtctatattgttatggagttgtgcgaaggaggcgaattgctggataggatattatccaagaaaggtaatcggtactccgagaaagatgcagccgttgtcgttaggcagatgctcaaagttgcaggagaatgtcatctacacggtcttgtacatagagatatgaaaccagagaactttttgttcaaatcagctcaactagattcgcctctaaaggctacggattttggtttatcggattttatcaaaccagggaaaaggttccatgacattgttggtagcgcctattatgtggctcctgaggtattaaagcgcagatcagggcctgaatcagatgtatggagcattggtgtgattacgtatatattactttgtgggaggcggcctttttgggatagaactgaagatggtatatttaaagaggttttaagaaataaacctgacttcagccgtaaaccttgggcaactataagtgacagcgccaaagattttgtgaaaaagttacttgtaaaagacccacgagcacggctaactgctgcacaagcactatcacatgcgtgggttagagaaggcgggaatgctactgatatccctgtcgacatttcagttctgaacaacttaagacaatttgtgagatacagccgtctaaagcaatttgctttaagggcgcttgctagcacacttgacgaggcagagatctctgacctcagagatcaatttgatgcgattgatgtggataaaaatggcgtcattagtcttgaagagatgagacaggcacttgccaaagatcttccttggaaactgaaagactcacgagttgctgagatccttgaagcgattgatagcaacactgatgggttagtggacttcacagagtttgtagcagcagctctacatgttcatcaactagaagaacatgattcagagaaatggcagctaaggtcaagagcagcttttgagaaattcgacctagacaaagacgggtacataacgcctgaggaacttcgaatgcacacggggttaagaggatcaatagatccactgctggatgaagcagacatagacagagatgggaaaataagcctgcatgagttcaggagacttctaagaacagcgagcataagttcacagagagcaccaagccctgcaggtcacaggaatcttcgatagtatatactagaagaggagtaagtaaaggatacagaatgtaatttgttgggatgtgatatgtcttatcttcttatatgtaatgttggttgtaagataagtggggtattttggcgtttgtagtgataagtaagtaatactttggttg

SEQ ID NO: 100113 - protein, 523 aa, Arabidopsis thaliana; identical to SEQ ID NO: 77847
  peptide (1)..(523): Ceres Seq. ID no. 13604383

SEQ ID NO: 100114 - protein, 426 aa, Arabidopsis thaliana; identical to SEQ ID NO: 77848
  peptide (1)..(426): Ceres Seq. ID no. 13604384

SEQ ID NO: 100115 - protein, 384 aa, Arabidopsis thaliana
  peptide (1)..(384): Ceres Seq. ID no. 13604385
MELCEGGELLDRILSKKGNRYSEKDAAVVVRQMLKVAGECHLHGLVHRDMKPENFLFKSAQLDSPLKATDFGLSDFIKPGKRFHDIVGSAYYVAPEVLKRRSGPESDVWSIGVITYILLCGRRPFWDRTEDGIFKEVLRNKPDFSRKPWATISDSAKDFVKKLLVKDPRARLTAAQALSHAWVREGGNATDIPVDISVLNNLRQFVRYSRLKQFALRALASTLDEAEISDLRDQFDAIDVDKNGVISLEEMRQALAKDLPWKLKDSRVAEILEAIDSNTDGLVDFTEFVAAALHVHQLEEHDSEKWQLRSRAAFEKFDLDKDGYITPEELRMHTGLRGSIDPLLDEADIDRDGKISLHEFRRLLRTASISSQRAPSPAGHRNLR

SEQ ID NO: 100116 - DNA, 810 bp, Arabidopsis thaliana
  misc_feature (1)..(810): Ceres Seq. ID no. 13604386
  misc_feature (1)..(810): Ortholog of  Ceres SEQ ID NO 12556792 as cited in SEQ ID NO 37
  misc_feature (1)..(810): Ortholog of  Ceres SEQ ID NO 13594143 as cited in SEQ ID NO 58945
  misc_feature (1)..(810): Ortholog of  Ceres SEQ ID NO 15179171 as cited in SEQ ID NO 0
ggcctccacttttgtttttccacttctacggtaagtgaaagagagagagagagaggaaaaaaaaggggaaagcttaagatattggagagtaacaatgccttcaaattcaggagatgataatgttcttcaagttctcataaagaactttgatgtccttgctctcccattggttacactcgtctatcctctatatgcatcagtgaaagcaatagagacaagatcattaccagaagatgaacaatggcttacttactgggttctttacgcacttatctctctctttgaactcactttctccaaacctctcgagtggtttcctatatggccatacatgaagttgtttgggatctgttggttagtgttaccacaattcaatggagcagaacatatctacaaacatttcattagaccattctacagagatcctcaaagagctaccaccaaaatttggtatgttcctcacaagaaattcaatttcttccctaaacgcgacgacgacgacattctcactgctgctgaaaaatacatggaacaacacggtaccgaagcgtttgagcgaatgatcgttaagaaggatagttatgaaagaggtaggagtagtagaggaatcaataatcacatgatctttgatgatgactataggtactaataagttcttaaaccggtttaattagctactttcagtttataagtttgctatgtgacaatatattgtctgtttctatggttgttataatttgcgtggattatgtataagcccttatttaggactgcttatttttgtgaaaaatcaaataaacattttctctc

SEQ ID NO: 100117 - protein, 184 aa, Arabidopsis thaliana; identical to SEQ ID NO: 39710
  peptide (1)..(184): Ceres Seq. ID no. 13604387

SEQ ID NO: 100118 - protein, 105 aa, Arabidopsis thaliana; identical to SEQ ID NO: 39711
  peptide (1)..(105): Ceres Seq. ID no. 13604388

SEQ ID NO: 100119 - DNA, 1581 bp, Arabidopsis thaliana
  misc_feature (1)..(1581): Ceres Seq. ID no. 13604401
  misc_feature (1)..(1581): Ortholog of  Ceres SEQ ID NO 15176273 as cited in SEQ ID NO 58534
attataaagaaagaaatcttttttagattttgagctctggaatggagaaaagtatcaatggatcatgcagactcatcaagagactcgtgattatactttcttgtctttcatattcctttgttcgatcagactttacagagagaacaaatatcaattatgtatcagctgtgggagatcccgggatgagaaacgataacttaagggtggctatagaagcttggaaccaatgcaacgaggtcggtgaagaagctacaaacatgggaagccctcgaatggcagattgcttcgatatcgataactctagctttcccgtgaagataatccacaaagtcgacgaaagagacaacaggcttggggtaggaaatggaacctacggaggaataagcgctggagacaacgcagatatctacgcagcgcaaaaggaggtatacttaggaaacaaatgtcaagttgtggacaagccaaatccatggcagttttggatgataatgctaaagaacggtaatacggatactttagccgcaatttgtcccgaaaacgggaaaaaggcgaaaccatttcctcctacggggaggtttccatgttttgggaaaggatgtatgaacatgccatcgatgcatcatgagtacacaagcttggttgataacgaagaaggacatatgagtgggagtttttatgggacttgggacttggataacgaccaaaaagatccggttggtaataattcgtattataaggtgaaatgggagaagaagattgggggaaatgagagttgggtttttcatcatttgttgaagacttcttctaagtatccatggttgatgctttatctacgcgctgatgcttctcgaggtttctctggtggttatcattacgacactagagggatgatgaagatgacgctaaaatcgccagattttaaagtaaaattcaagctagagattattaaaggaggcggttcagggagccaattttacctaatggacatgggaagttgctggaaaaacgacggaagagactgcgacggcgacgtcacaaccgacgttacaaggtacagcgaaatgataatcaacccgggggcaaccgccgtttgcacccgcaaccgcctaggcgcttgtccgccagagcatacttttccaaacgggactaaagttcacaggacggacaaggagaagttccctttcgaagcgtatcactattactgcgttccgggaaacgcgcgttttgcggaatctccgtacgaggtttgtgatccgtacagtaatccacaaccgcaggagattctgcagatcttgcctcatccagtgtgggaacagtttgggtatccgacaaagaaaggacaaggttggattggagatccaagaacttgggaacttgatgtcggaaaactctctcagtcactcttcttttaccaggatccagggacgaaaccggtggagagacattggtcgtcgatagatttaggaactgaaatatatatgagtaagaatcaaattgctgaatggactgtaactgatttcgacattgttataccaaatgccgatatttaagtggaataataagattctgttataagctgct

SEQ ID NO: 100120 - protein, 502 aa, Arabidopsis thaliana
  peptide (1)..(502): Ceres Seq. ID no. 13604402
MEKSINGSCRLIKRLVIILSCLSYSFVRSDFTERTNINYVSAVGDPGMRNDNLRVAIEAWNQCNEVGEEATNMGSPRMADCFDIDNSSFPVKIIHKVDERDNRLGVGNGTYGGISAGDNADIYAAQKEVYLGNKCQVVDKPNPWQFWMIMLKNGNTDTLAAICPENGKKAKPFPPTGRFPCFGKGCMNMPSMHHEYTSLVDNEEGHMSGSFYGTWDLDNDQKDPVGNNSYYKVKWEKKIGGNESWVFHHLLKTSSKYPWLMLYLRADASRGFSGGYHYDTRGMMKMTLKSPDFKVKFKLEIIKGGGSGSQFYLMDMGSCWKNDGRDCDGDVTTDVTRYSEMIINPGATAVCTRNRLGACPPEHTFPNGTKVHRTDKEKFPFEAYHYYCVPGNARFAESPYEVCDPYSNPQPQEILQILPHPVWEQFGYPTKKGQGWIGDPRTWELDVGKLSQSLFFYQDPGTKPVERHWSSIDLGTEIYMSKNQIAEWTVTDFDIVIPNADI

SEQ ID NO: 100121 - protein, 455 aa, Arabidopsis thaliana
  peptide (1)..(455): Ceres Seq. ID no. 13604403
MRNDNLRVAIEAWNQCNEVGEEATNMGSPRMADCFDIDNSSFPVKIIHKVDERDNRLGVGNGTYGGISAGDNADIYAAQKEVYLGNKCQVVDKPNPWQFWMIMLKNGNTDTLAAICPENGKKAKPFPPTGRFPCFGKGCMNMPSMHHEYTSLVDNEEGHMSGSFYGTWDLDNDQKDPVGNNSYYKVKWEKKIGGNESWVFHHLLKTSSKYPWLMLYLRADASRGFSGGYHYDTRGMMKMTLKSPDFKVKFKLEIIKGGGSGSQFYLMDMGSCWKNDGRDCDGDVTTDVTRYSEMIINPGATAVCTRNRLGACPPEHTFPNGTKVHRTDKEKFPFEAYHYYCVPGNARFAESPYEVCDPYSNPQPQEILQILPHPVWEQFGYPTKKGQGWIGDPRTWELDVGKLSQSLFFYQDPGTKPVERHWSSIDLGTEIYMSKNQIAEWTVTDFDIVIPNADI

SEQ ID NO: 100122 - protein, 430 aa, Arabidopsis thaliana
  peptide (1)..(430): Ceres Seq. ID no. 13604404
MGSPRMADCFDIDNSSFPVKIIHKVDERDNRLGVGNGTYGGISAGDNADIYAAQKEVYLGNKCQVVDKPNPWQFWMIMLKNGNTDTLAAICPENGKKAKPFPPTGRFPCFGKGCMNMPSMHHEYTSLVDNEEGHMSGSFYGTWDLDNDQKDPVGNNSYYKVKWEKKIGGNESWVFHHLLKTSSKYPWLMLYLRADASRGFSGGYHYDTRGMMKMTLKSPDFKVKFKLEIIKGGGSGSQFYLMDMGSCWKNDGRDCDGDVTTDVTRYSEMIINPGATAVCTRNRLGACPPEHTFPNGTKVHRTDKEKFPFEAYHYYCVPGNARFAESPYEVCDPYSNPQPQEILQILPHPVWEQFGYPTKKGQGWIGDPRTWELDVGKLSQSLFFYQDPGTKPVERHWSSIDLGTEIYMSKNQIAEWTVTDFDIVIPNADI

SEQ ID NO: 100123 - DNA, 799 bp, Arabidopsis thaliana
  misc_feature (1)..(799): Ceres Seq. ID no. 13604407
  misc_feature (1)..(799): Ortholog of  Ceres SEQ ID NO 13596325 as cited in SEQ ID NO 67987
ttttctctcaaaatccataaaaagagagagagataaataaagagaaaactaaagaagctagaagatggagaaaagtaatgatcatgacaaggctagccacggcggctccggtggtggtgccacggagaagtgggaggagactagcctcggaatccgaactgccgagacaatgctccggttagctccggtgggcctttgtgttgcagcacttgttgtcatgcttaaggactctgagactaatgagttcggttcaatttcttactccaatctcacagcctttaggtacttggtgcacgcaaatggaatatgtgcaggctactctcttctatcagcagccattgcagcgatgcctcgttcttcttcgacaatgcctcgtgtttggaccttcttttgtctcgaccagcttctgacctacctggttcttgctgctggagctgtatcagctgaggttctatacttggcttacaatggagactcagccattacttggagcgatgcatgtagctcctatggcggtttctgtcatagagccactgcttctgttataatcacattctttgtggtttgtttctacatcgttctctctctaatctcctcttataagctctttactcgctttgatcctccttccattgttgactccgccaagaatctcgaagtcgctgtcttcggaagttagatcctccatttgctcttcaagtacatctagtttgtcatgtttcaaatgttgtgtgtttttaactttggtcaagagaaagaatgcttatgtgtttgctcttctttcattgcttttcttcct

SEQ ID NO: 100124 - protein, 204 aa, Arabidopsis thaliana; identical to SEQ ID NO: 21025
  peptide (1)..(204): Ceres Seq. ID no. 13604408

SEQ ID NO: 100125 - protein, 169 aa, Arabidopsis thaliana; identical to SEQ ID NO: 21026
  peptide (1)..(169): Ceres Seq. ID no. 13604409

SEQ ID NO: 100126 - protein, 153 aa, Arabidopsis thaliana; identical to SEQ ID NO: 21027
  peptide (1)..(153): Ceres Seq. ID no. 13604410

SEQ ID NO: 100127 - DNA, 2441 bp, Arabidopsis thaliana
  misc_feature (1)..(2441): Ceres Seq. ID no. 13604427
  misc_feature (1)..(2441): Ortholog of  Ceres SEQ ID NO 14302836 as cited in SEQ ID NO 65013
atgtttcgtttcgttttggaaagataagagagataaaggtttcgacttttttaggtttttctgtgtgttttgtgattcatttcgctgattgatatcaattctctctgtttgttgtcccttctcttcaatttcacctgacttttgtttttgttttggataaagttttcacctttgtgtcttctctctgctctcttgtgtgatctatctgaaaaaggctgatttttttttttgtgggtttctaaattagggtttgtgtgagtttattgtctttctgattcgatgaagatcaagagttatagaggatcgttagagtgatcaaaatcccacgaattcacaaaggatccgtcttcatagatccgtcagatctgttcagcggaggtacatacttcttcgtcattcactgctttctggattagttggtgagaataaacggctggtgggtctcggtgggaagctgaattggatgtagagttcatcagactatagcttagagaagaaaatgaagttttttgaatcgttttgctccagttgaggtttggaagctgcataccagctcatggaagagatttcacctgcagttgcacttactttgggtttagctaatacgatgtgtgactctggaatctcatctactttcgatatctccgagctggagaatgttactgatgcagctgacatgttgtgtaatcagaaaagacaaagatatagtaatggagtggtggattgtattatgggaagtgtttcagaagagaagactttatctgaagtgagaagtttgtcttctgattttagtgtaactgtccaggaatcagaagaagatgagccattagtatctgatgcgactattattagcgaaggtttaatagttgtggacgctaggtctgagataagtttgccagatacagttgaaactgataacgggcgagttcttgctacggccattatcctaaacgagacaaccatagaacaggttcccactgcagaagtccttattgcgagtctgaatcacgatgtgaatatggaggtggcaacttctgaggtagtcattaggttacctgaagaaaatcctaatgtagcaagaggaagcaggagtgtttatgaactagagtgtatacctctttggggcacgatttcaatttgcggtggaagatctgaaatggaggatgctgttagagctttacctcattttctcaaaatacccatcaaaatgcttatgggggatcatgaagggatgagtccaagtctcccatatctcactagtcacttctttggtgtatatgatggccacggaggcgctcaggttgctgactattgccatgatagaatccactctgctttggctgaagaaatcgaacggattaaagaggaattgtgtaggaggaacactggcgagggtaggcaggtccagtgggagaaagtctttgtagattgttacctaaaagtcgatgatgaggttaaagggaaaatcaacagacctgttgttggttcttctgataggatggttcttgaagctgtttcccctgaaaccgttggatcgactgctgtggttgctttggtttgttcatcgcatataatagtctcaaactgtggtgactcaagagcagttttactccgaggcaaagactccatgcctttatcagttgatcacaaaccagatagagaggatgagtatgcacgaatagagaaagctggaggaaaagttatacaatggcaaggcgctcgtgtttctggcgttcttgccatgtccaggtccatcggtgatcaatatctggagccatttgtaataccagatcccgaagtgacgtttatgccacgagctagagaagacgagtgtctaatattggccagtgatggactttgggacgtaatgagtaaccaagaagcttgcgattttgcgaggaggcggatcttggcttggcacaagaagaatggagcattgcctttagctgagagaggtgtaggagaagaccaagcgtgtcaagctgcggctgaatatctctccaaactcgctattcaaatgggaagcaaagacaatatctcaatcatagtgatcgacttgaaagctcaaagaaagttcaagaccagatcttgaaacagtgtatgctcgagctcttacactattataattttattatttcttatttattgaaaaaatttccacaagtttacataaaaataagaagtgaaatgttggggggaagaagaattaagaccttgatgcatagctgaagtccattcctttttctcatggacttgaatgtgtatgtttgttatgtataagaagaatagagaagaaatgtttttactttggagtcttgtaggtggatatgttgttgtaatattggagatgtggcttaaggaattgtaactgaaatttatgtcacattcaccttaatacttttctgtaatctattatatataaatacttgttgtgaaagaac

SEQ ID NO: 100128 - protein, 511 aa, Arabidopsis thaliana
  peptide (1)..(511): Ceres Seq. ID no. 13604428
MEEISPAVALTLGLANTMCDSGISSTFDISELENVTDAADMLCNQKRQRYSNGVVDCIMGSVSEEKTLSEVRSLSSDFSVTVQESEEDEPLVSDATIISEGLIVVDARSEISLPDTVETDNGRVLATAIILNETTIEQVPTAEVLIASLNHDVNMEVATSEVVIRLPEENPNVARGSRSVYELECIPLWGTISICGGRSEMEDAVRALPHFLKIPIKMLMGDHEGMSPSLPYLTSHFFGVYDGHGGAQVADYCHDRIHSALAEEIERIKEELCRRNTGEGRQVQWEKVFVDCYLKVDDEVKGKINRPVVGSSDRMVLEAVSPETVGSTAVVALVCSSHIIVSNCGDSRAVLLRGKDSMPLSVDHKPDREDEYARIEKAGGKVIQWQGARVSGVLAMSRSIGDQYLEPFVIPDPEVTFMPRAREDECLILASDGLWDVMSNQEACDFARRRILAWHKKNGALPLAERGVGEDQACQAAAEYLSKLAIQMGSKDNISIIVIDLKAQRKFKTRS

SEQ ID NO: 100129 - protein, 494 aa, Arabidopsis thaliana
  peptide (1)..(494): Ceres Seq. ID no. 13604429
MCDSGISSTFDISELENVTDAADMLCNQKRQRYSNGVVDCIMGSVSEEKTLSEVRSLSSDFSVTVQESEEDEPLVSDATIISEGLIVVDARSEISLPDTVETDNGRVLATAIILNETTIEQVPTAEVLIASLNHDVNMEVATSEVVIRLPEENPNVARGSRSVYELECIPLWGTISICGGRSEMEDAVRALPHFLKIPIKMLMGDHEGMSPSLPYLTSHFFGVYDGHGGAQVADYCHDRIHSALAEEIERIKEELCRRNTGEGRQVQWEKVFVDCYLKVDDEVKGKINRPVVGSSDRMVLEAVSPETVGSTAVVALVCSSHIIVSNCGDSRAVLLRGKDSMPLSVDHKPDREDEYARIEKAGGKVIQWQGARVSGVLAMSRSIGDQYLEPFVIPDPEVTFMPRAREDECLILASDGLWDVMSNQEACDFARRRILAWHKKNGALPLAERGVGEDQACQAAAEYLSKLAIQMGSKDNISIIVIDLKAQRKFKTRS

SEQ ID NO: 100130 - protein, 471 aa, Arabidopsis thaliana
  peptide (1)..(471): Ceres Seq. ID no. 13604430
MLCNQKRQRYSNGVVDCIMGSVSEEKTLSEVRSLSSDFSVTVQESEEDEPLVSDATIISEGLIVVDARSEISLPDTVETDNGRVLATAIILNETTIEQVPTAEVLIASLNHDVNMEVATSEVVIRLPEENPNVARGSRSVYELECIPLWGTISICGGRSEMEDAVRALPHFLKIPIKMLMGDHEGMSPSLPYLTSHFFGVYDGHGGAQVADYCHDRIHSALAEEIERIKEELCRRNTGEGRQVQWEKVFVDCYLKVDDEVKGKINRPVVGSSDRMVLEAVSPETVGSTAVVALVCSSHIIVSNCGDSRAVLLRGKDSMPLSVDHKPDREDEYARIEKAGGKVIQWQGARVSGVLAMSRSIGDQYLEPFVIPDPEVTFMPRAREDECLILASDGLWDVMSNQEACDFARRRILAWHKKNGALPLAERGVGEDQACQAAAEYLSKLAIQMGSKDNISIIVIDLKAQRKFKTRS

SEQ ID NO: 100131 - DNA, 1034 bp, Arabidopsis thaliana
  misc_feature (1)..(1034): Ceres Seq. ID no. 13604435
  misc_feature (1)..(1034): Ortholog of  Ceres SEQ ID NO 13503500 as cited in SEQ ID NO 68001
  misc_feature (1)..(1034): Ortholog of  Ceres SEQ ID NO 15174327 as cited in SEQ ID NO 0
acccttattattattcattctctctaatcaaatcctcttctctctcaaatctcaatctccgattatgacagacgacagagtttaccctgcatcaaaacctcccgccatcgtcggtggcggtgccccaaccaccaatccaactttcccggcgaacaaagctcagctctacaacgcaaatcgtcccgcttaccgtccaccagctggtcgtcgtcgtactagccatacccgtggatgttgctgccgttgctgttgctggacgatattcgtaatcatcctcttactcctcatcgtcgccgccgcatcagccgtcgtatacctaatctaccgtcctcaacgacctagcttcaccgtctctgaactcaaaatctccactctcaacttcacatccgccgttcgcctcaccaccgccatttccctctccgtcatcgccagaaaccctaacaaaaacgttggattcatctacgacgtcaccgacatcacactctacaaagcatccaccggaggagatgatgacgtagtcattggtaaaggaacgatcgcggcgttttctcacgggaagaagaacacgactacgcttagaagtacgatcggaagtcctccggatgaactcgatgagatctcggcgggtaagctgaaaggagatctgaaggcgaagaaagcagtggcgattaagattgttttgaactcgaaggtgaaagtgaagatgggagctctaaaaactcctaaatcaggaattagggttacttgtgaagggattaaagtggtggctccgacgggaaagaaggcgacgacggctacgacttccgccgctaagtgtaaggttgatccaagatttaagatctggaaaattactttctaaatatagtaaacaaaataatggaatcacattcttagttttttcttcattttctttttattactccattgtttcaattttcatttctttttaaatttgatttcatatacagttctttgattcctgtaagactttatttttttggtttatgtaaatgaagatataaatatttgtgttc

SEQ ID NO: 100132 - protein, 285 aa, Arabidopsis thaliana
  peptide (1)..(285): Ceres Seq. ID no. 13604436
PLLLFILSNQILFSLKSQSPIMTDDRVYPASKPPAIVGGGAPTTNPTFPANKAQLYNANRPAYRPPAGRRRTSHTRGCCCRCCCWTIFVIILLLLIVAAASAVVYLIYRPQRPSFTVSELKISTLNFTSAVRLTTAISLSVIARNPNKNVGFIYDVTDITLYKASTGGDDDVVIGKGTIAAFSHGKKNTTTLRSTIGSPPDELDEISAGKLKGDLKAKKAVAIKIVLNSKVKVKMGALKTPKSGIRVTCEGIKVVAPTGKKATTATTSAAKCKVDPRFKIWKITF

SEQ ID NO: 100133 - protein, 264 aa, Arabidopsis thaliana
  peptide (1)..(264): Ceres Seq. ID no. 13604437
MTDDRVYPASKPPAIVGGGAPTTNPTFPANKAQLYNANRPAYRPPAGRRRTSHTRGCCCRCCCWTIFVIILLLLIVAAASAVVYLIYRPQRPSFTVSELKISTLNFTSAVRLTTAISLSVIARNPNKNVGFIYDVTDITLYKASTGGDDDVVIGKGTIAAFSHGKKNTTTLRSTIGSPPDELDEISAGKLKGDLKAKKAVAIKIVLNSKVKVKMGALKTPKSGIRVTCEGIKVVAPTGKKATTATTSAAKCKVDPRFKIWKITF

SEQ ID NO: 100134 - DNA, 1178 bp, Arabidopsis thaliana
  misc_feature (1)..(1178): Ceres Seq. ID no. 13604438
  misc_feature (1)..(1178): Ortholog of  Ceres SEQ ID NO 13594482 as cited in SEQ ID NO 51285
  misc_feature (1)..(1178): Ortholog of  Ceres SEQ ID NO 13655381 as cited in SEQ ID NO 63359
  misc_feature (1)..(1178): Ortholog of  Ceres SEQ ID NO 12617583 as cited in SEQ ID NO 64897
attatcttttgcttcatcttcttcaaaagccatggctttgtgctctatctgtcctcgcatccctcttcgattcaggccaaaacccatttccccttttctctcaaaacctcaaatttgtctcgcttacagggtttactcttccctgcaatctactactccctctaccagagatgaacttggaactgttagcattgggtttctgggtatgggaatcatgggttctccaatggcacagaacctcatcaaagctgggtgtgatgtgactgtatggaatcgaactaagagcaaatgtgatcctctcgttggattaggagcaaagtacaagtcttctcctgaagaagtgactgcaacttgtgatctcacatttgcaatgcttgctgatcctgaaagtgcaattgatgttgcatgtggaaagaatggagccatatttgggattagttcaggaaaagggtatgttgatgtctcaaccgttgatgtggcctcatcaatactaatcagcaagcaaataaaggataccggagccttgttcttggaggcaccagtttcaggttccaaaaagcctgccgaagatgggcagttaatatttctcactgcaggtgacaagccgctatacgaaaaagctgctcctttcttagacatcatgggaaagtcaaaattctatttgggtgaagttggtaatggagcagcaatgaaacttgtcgtcaacatgatcatgggaagtatgatggcatcattcgcggagggaatacttctaagccagaaagttggactcgatccaaatgtacttgtcgaggttgtctcacagggagctatcaatgcgccaatgtactcactaaagggtccttcaatgatcaagtcagtgtacccgacggcttttccattaaagcatcagcagaaggatatgagactcgcacttggactagcggaatccgtatcgcaatctactccgattgcagccgctgcgaacgagctttacaaggttgcaaaatcttatgggttgagcgatgaagatttctctgcagtaattgaagcactaaaagctgcaaaatcccgagaagcttagctaaagatttgttcaatgtgaaaatgtgtttttttttgctgttgtatgaaaaatttcatctttacaacatgtcaattgataattgttaattttatatgagagcaagttaaaagtg

SEQ ID NO: 100135 - protein, 353 aa, Arabidopsis thaliana; identical to SEQ ID NO: 30208
  peptide (1)..(353): Ceres Seq. ID no. 13604439

SEQ ID NO: 100136 - protein, 343 aa, Arabidopsis thaliana; identical to SEQ ID NO: 30209
  peptide (1)..(343): Ceres Seq. ID no. 13604440

SEQ ID NO: 100137 - protein, 285 aa, Arabidopsis thaliana; identical to SEQ ID NO: 30210
  peptide (1)..(285): Ceres Seq. ID no. 13604441

SEQ ID NO: 100138 - DNA, 1467 bp, Arabidopsis thaliana
  misc_feature (1)..(1467): Ceres Seq. ID no. 13604445
  misc_feature (1)..(1467): Ortholog of  Ceres SEQ ID NO 15227026 as cited in SEQ ID NO 52193
  misc_feature (1)..(1467): Ortholog of  Ceres SEQ ID NO 13595454 as cited in SEQ ID NO 56502
acgataagtgaaaaaagagagaaagagccagaggagagagagaagcttttggtcgtgttcgtttttctttctttctttcttgcaataataaatagaagcaaatcatactccaaaaaccttcattcaaaccttgctaccactttcttcccctaaaagatttcatctaaattcagtaaactcatctacgagttcttgtttttctttaaattttctaagagagagcctaagctgtttaatatagtcatctaatatttagagagatggtgggagagagaatgtggtggtggtcatcatcgtcgacgaaactccgatcaaaccttgaaagatttctcagaggaatcactccaaaacctccttctttctctttatcacagagctgcaagaatgatttgaacagtttgtggatccatgagaacaaagatgagattgaatatttcaggcttagtgatctttgggactgttttgatgagccaagcgcgtatggacttggatcaaaggtcgacttaaacaatggtgaatccgttatgcagtactatgtcccgtatctatccgccattcaaatctatactaacaaatctacagccatttctaggattcatagtgatgtggttgattgtgagagtgaatgttggagtgatgatagtgagattgagaagttgtctaggtcaatgagcagtggttctagcaaaatatgggattctgtttctgatgattcgggttatgagatcgatggtacttcttcattgatgcgagataagctcggttctattgattttcagtactttgagtccgttaaaccgcacttgcgtgttcctcttaccgctaaggtaaatgaattggctgagaagtatccgggactttcgactctaaggagtgttgatttgtctccagcaagttggttggccattgcttggtatccaatttaccacattccctctcggaagaccgataaagatttatcgacatgtttcttgagttatcatactttatcttcggctttccaaggtaacttgatagagggagacgatgagattaacgaaaccatgaaagaagaaacattgtgttttgatgaaggaccggtgaccaagagtatacctttggctccttttggtttagttagttacaaattgcaaggagatttgtggaggaatcaagaatgtggtgaccaaggacgtatagtttatcttcgcagtgcagctgattcgtggctgaaacagcttaatgttcaagatcaccatgaccatagcttcttctccatgaacatgagcttgtagatccaaaaaaagagagccaagactctgtttttttgctctgtttttagttgttttcttagccaagactctgtttttttgctctgtttttagttgttttaagaatcttaggtatatagcaactcgaaatgtagaggtttcgtttccttctgcttgaacccgtggaaaataaagagaattaggcttgtttttggct

SEQ ID NO: 100139 - protein, 337 aa, Arabidopsis thaliana
  peptide (1)..(337): Ceres Seq. ID no. 13604446
MVGERMWWWSSSSTKLRSNLERFLRGITPKPPSFSLSQSCKNDLNSLWIHENKDEIEYFRLSDLWDCFDEPSAYGLGSKVDLNNGESVMQYYVPYLSAIQIYTNKSTAISRIHSDVVDCESECWSDDSEIEKLSRSMSSGSSKIWDSVSDDSGYEIDGTSSLMRDKLGSIDFQYFESVKPHLRVPLTAKVNELAEKYPGLSTLRSVDLSPASWLAIAWYPIYHIPSRKTDKDLSTCFLSYHTLSSAFQGNLIEGDDEINETMKEETLCFDEGPVTKSIPLAPFGLVSYKLQGDLWRNQECGDQGRIVYLRSAADSWLKQLNVQDHHDHSFFSMNMSL

SEQ ID NO: 100140 - protein, 332 aa, Arabidopsis thaliana
  peptide (1)..(332): Ceres Seq. ID no. 13604447
MWWWSSSSTKLRSNLERFLRGITPKPPSFSLSQSCKNDLNSLWIHENKDEIEYFRLSDLWDCFDEPSAYGLGSKVDLNNGESVMQYYVPYLSAIQIYTNKSTAISRIHSDVVDCESECWSDDSEIEKLSRSMSSGSSKIWDSVSDDSGYEIDGTSSLMRDKLGSIDFQYFESVKPHLRVPLTAKVNELAEKYPGLSTLRSVDLSPASWLAIAWYPIYHIPSRKTDKDLSTCFLSYHTLSSAFQGNLIEGDDEINETMKEETLCFDEGPVTKSIPLAPFGLVSYKLQGDLWRNQECGDQGRIVYLRSAADSWLKQLNVQDHHDHSFFSMNMSL

SEQ ID NO: 100141 - protein, 249 aa, Arabidopsis thaliana
  peptide (1)..(249): Ceres Seq. ID no. 13604448
MQYYVPYLSAIQIYTNKSTAISRIHSDVVDCESECWSDDSEIEKLSRSMSSGSSKIWDSVSDDSGYEIDGTSSLMRDKLGSIDFQYFESVKPHLRVPLTAKVNELAEKYPGLSTLRSVDLSPASWLAIAWYPIYHIPSRKTDKDLSTCFLSYHTLSSAFQGNLIEGDDEINETMKEETLCFDEGPVTKSIPLAPFGLVSYKLQGDLWRNQECGDQGRIVYLRSAADSWLKQLNVQDHHDHSFFSMNMSL

SEQ ID NO: 100142 - DNA, 621 bp, Arabidopsis thaliana
  misc_feature (1)..(621): Ceres Seq. ID no. 13604449
  misc_feature (1)..(621): Ortholog of  Ceres SEQ ID NO 15180374 as cited in SEQ ID NO 0
ttcttatctcctcacactcttcgaacaaggaagaaccctaatctcaagatgaatagggagaagttgatgaagatggctaataccgtccgcactggcggaaagggtactgtcagaagaaagaagaaggctgtgcacaagaccaatacaactgatgacaagaggcttcaaagcactcttaagagaattggagttaactccattcccgctattgaagaagttaacatctttaaggatgatgttgttattcagttcatcaaccctaaggttcaagcttcaattgctgcaaacacatgggttgttagcggttctcctcagaccaaaaaattgcaagatatccttcctcagatcatcagccaacttggaccagacaacatggacaacctgaagaagctagcagaacagttccagaaacaggcttctggtgaaggtaatgccgcctcagcaaccatacaagaagaggatgatgacgatgtcccagagcttgttggagagacattcgaaactgctgctgaagagaaagcaccagctgctgctgcttcttcttagagagaaaagagcgagaccacatccaaaaaaaaaccgcactttgatttttacatatctttataatatgtttgttcg

SEQ ID NO: 100143 - protein, 181 aa, Arabidopsis thaliana
  peptide (1)..(181): Ceres Seq. ID no. 13604450
FLSPHTLRTRKNPNLKMNREKLMKMANTVRTGGKGTVRRKKKAVHKTNTTDDKRLQSTLKRIGVNSIPAIEEVNIFKDDVVIQFINPKVQASIAANTWVVSGSPQTKKLQDILPQIISQLGPDNMDNLKKLAEQFQKQASGEGNAASATIQEEDDDDVPELVGETFETAAEEKAPAAAASS

SEQ ID NO: 100144 - protein, 165 aa, Arabidopsis thaliana; identical to SEQ ID NO: 25920
  peptide (1)..(165): Ceres Seq. ID no. 13604451

SEQ ID NO: 100145 - protein, 159 aa, Arabidopsis thaliana; identical to SEQ ID NO: 25921
  peptide (1)..(159): Ceres Seq. ID no. 13604452

SEQ ID NO: 100146 - DNA, 1494 bp, Arabidopsis thaliana
  misc_feature (1)..(1494): Ceres Seq. ID no. 13604457
  misc_feature (1)..(1494): Ortholog of  Ceres SEQ ID NO 15177854 as cited in SEQ ID NO 51851
  misc_feature (1)..(1494): Ortholog of  Ceres SEQ ID NO 15177087 as cited in SEQ ID NO 51932
  misc_feature (1)..(1494): Ortholog of  Ceres SEQ ID NO 13662937 as cited in SEQ ID NO 64415
  misc_feature (1)..(1494): Ortholog of  Ceres SEQ ID NO 13595984 as cited in SEQ ID NO 68340
  misc_feature (1)..(1494): Ortholog of  Ceres SEQ ID NO 12635014 as cited in SEQ ID NO 0
aattgtcaaaaactcacaaggcattatcatgtggacatgcaaccttttttttctatacgcattacagaaatgaaaacaatgattaggatcgcatgcacgtcaagaaaacaacctatagctgtactttgatatactaactcaaatcatgtcttggctcaagcacacaagcttctagctagatacaactgcaaacatatatgatggctttgtctaataagaagacgacgacttgggcaccgctttgaccagtcaatacaccaaatctgtatgtatcatttatataaatattatctttccacagttgttgaagaatcacatagacagcacacacggattccatggagactaaacagagtatccctctcctcatgccctataagatgggacccttcaatctttctcacagggttgttttggcgccattgactagatcgagatcgtatggtaacattcctcagcctaatgccaaattatattacactcagagaacaacacctggtggtcttcttatttccgaatcctgtgtagtctccgagacatcattgggctatccggatttacctggattatggaacagagaccaagtggaggcatggaagcccatcgtggatgcggttcattcgaaaggcggtatcttcttctgccagatttggcatggtggcagagtttttcatcaagaccagccaaatggggaagcacccgtctcctctacagacaagccattgatgtgcaagaacatgtatggaggtcagtttaagcctccacggcggttaaggagcgacgagcttcccgccattgtcaacgactttagaatcgctgcacgaaacgcgatcgaagctggcttcgatggagtggaggttcacggcgcacatggttacctgatcgatcagttcctgaaagacaaagtgaatgacagaagtgaccaatatggtgggtcattagagaaccgctgtagatttgctcttgaagtaatcgaagcagtggtgaacgagatcggttcagatcgtgttggaatcagactctcgccatttgcagattacatggagtcaggagactcgaatccagaagcattagggctctacctggtgcaagctatgaacaagcatggcatggagtcgtctacggtcacatggttgaacctagaatgaaaacccttgaaggaatcttcgaatgcacggaatcgcttacgcccatgcgaaaagccttcaaaggtacgttcatagtagcaggaggatattctagagaagacgggaacaaggcggtggaagagggaagaaccgatcttgtggcttatggacggccgttcttggcgaatccggatctgacgaggagattcgaactcaatgagccgttgaataggtacgatagatcaacgttctacacttcagatcctgtagtgggctatacagactaccctttcctcgagaccacagatacaacaactgcttaaggggtttattcagatgcattattagcaaaacatatttttcaatc

SEQ ID NO: 100147 - protein, 269 aa, Arabidopsis thaliana; identical to SEQ ID NO: 40649
  peptide (1)..(269): Ceres Seq. ID no. 13604458

SEQ ID NO: 100148 - protein, 259 aa, Arabidopsis thaliana; identical to SEQ ID NO: 40650
  peptide (1)..(259): Ceres Seq. ID no. 13604459

SEQ ID NO: 100149 - protein, 255 aa, Arabidopsis thaliana; identical to SEQ ID NO: 40651
  peptide (1)..(255): Ceres Seq. ID no. 13604460

SEQ ID NO: 100150 - DNA, 1073 bp, Arabidopsis thaliana
  misc_feature (1)..(1073): Ceres Seq. ID no. 13604467
  misc_feature (1)..(1073): Ortholog of  Ceres SEQ ID NO 13596609 as cited in SEQ ID NO 63070
  misc_feature (1)..(1073): Ortholog of  Ceres SEQ ID NO 12616895 as cited in SEQ ID NO 63909
  misc_feature (1)..(1073): Ortholog of  Ceres SEQ ID NO 13598574 as cited in SEQ ID NO 69083
acgaaacataattatcaaattcaaacaacaacaaaaaaacactctctccctctccgtatctatttaaaatccgatcaggttaatcgagtttatcatttggagaaagcaaatttccaaaaatgtttcgagttagcaatttcatggttggtctagcaaacacattggtgatgttagtgggcgcttcggccattggttattcgatttacatgttcgttcaccaaggcgtcactgattgtgaatctgccattcggataccacttctcacgaccggactcatcctcttcttggtgtctttgctcggagtgattggatcttgtttcaaggagaatttggcaatggtttcctacttgatcatattgtttgggggcattgttgcattgatgattttctccatatttctcttctttgtgaccaacaaaggagccggtcgtgtggtgtccggtcgagggtataaagagtaccggacggtggatttctcgacgtggcttaatgggttcgttggtgggaagagatgggttgggataaggtcttgtttggctgaggctaacgtttgtgatgatttgagtgatggtcgtgttagtcagatcgctgatgcgttttatcacaagaacttgtctcccatccagtcaggttgttgtaagccaccatcggattgcaacttcgagttcagaaacgcgacgttctggataccgccgagcaaaaacgaaacggcagttgcggaaaacggggactgtggtacgtggagcaacgtgcaaacagagttatgtttcaactgcaacgcatgcaaagcgggtgtgttagcgaacataagagagaagtggaggaatcttcttgttttcaacatttgtctcctcattctcctcataaccgtctattcctgcggttgctgtgctcgtcgtaacaatcggacggctaggaaaagtgattctgtctgatcaacaactcaatttcagtttcttgtgtttttctgttttcttagtttgtttggttttttaagttaattatcttttgttttctttggacaatgtcatgttctgtttctcaacaattatcatgaatttatcacatttcac

SEQ ID NO: 100151 - protein, 271 aa, Arabidopsis thaliana
  peptide (1)..(271): Ceres Seq. ID no. 13604468
MFRVSNFMVGLANTLVMLVGASAIGYSIYMFVHQGVTDCESAIRIPLLTTGLILFLVSLLGVIGSCFKENLAMVSYLIILFGGIVALMIFSIFLFFVTNKGAGRVVSGRGYKEYRTVDFSTWLNGFVGGKRWVGIRSCLAEANVCDDLSDGRVSQIADAFYHKNLSPIQSGCCKPPSDCNFEFRNATFWIPPSKNETAVAENGDCGTWSNVQTELCFNCNACKAGVLANIREKWRNLLVFNICLLILLITVYSCGCCARRNNRTARKSDSV

SEQ ID NO: 100152 - protein, 264 aa, Arabidopsis thaliana
  peptide (1)..(264): Ceres Seq. ID no. 13604469
MVGLANTLVMLVGASAIGYSIYMFVHQGVTDCESAIRIPLLTTGLILFLVSLLGVIGSCFKENLAMVSYLIILFGGIVALMIFSIFLFFVTNKGAGRVVSGRGYKEYRTVDFSTWLNGFVGGKRWVGIRSCLAEANVCDDLSDGRVSQIADAFYHKNLSPIQSGCCKPPSDCNFEFRNATFWIPPSKNETAVAENGDCGTWSNVQTELCFNCNACKAGVLANIREKWRNLLVFNICLLILLITVYSCGCCARRNNRTARKSDSV

SEQ ID NO: 100153 - protein, 255 aa, Arabidopsis thaliana
  peptide (1)..(255): Ceres Seq. ID no. 13604470
MLVGASAIGYSIYMFVHQGVTDCESAIRIPLLTTGLILFLVSLLGVIGSCFKENLAMVSYLIILFGGIVALMIFSIFLFFVTNKGAGRVVSGRGYKEYRTVDFSTWLNGFVGGKRWVGIRSCLAEANVCDDLSDGRVSQIADAFYHKNLSPIQSGCCKPPSDCNFEFRNATFWIPPSKNETAVAENGDCGTWSNVQTELCFNCNACKAGVLANIREKWRNLLVFNICLLILLITVYSCGCCARRNNRTARKSDSV

SEQ ID NO: 100154 - DNA, 847 bp, Arabidopsis thaliana
  misc_feature (1)..(847): Ceres Seq. ID no. 13604471
  misc_feature (1)..(847): Ortholog of  Ceres SEQ ID NO 15173873 as cited in SEQ ID NO 62620
  misc_feature (1)..(847): Ortholog of  Ceres SEQ ID NO 13655610 as cited in SEQ ID NO 64148
  misc_feature (1)..(847): Ortholog of  Ceres SEQ ID NO 14302675 as cited in SEQ ID NO 0
gatagattttacaccaccgaagccgaaaaaatgccggcggcgaagaggactcccaaggttaaccgtaaccctgacctaatcaggggagttggaaaatattcgaggtctcagatgtaccacaagagaggtttgtgggctatcaaggccaagaacggtggcgttttccctcgtcacgatgctcagccaaaggtcgacgctccggttgagaagcctgccaagttttatccggcggaagacgtcaagaagccgcttgttaacagacgcaagcctaagcctaccaagctaaaagccagcatcactccaggaactgtgttgatcattcttgctggtagattcaagggtaagagagttgtcttcctcaagcaactttcttctggtttgcttcttgtaacaggaccattcaagattaatggtgttccattgagacgtgttaaccaagcctatgtgattggaacctccacaaagattgacatttctggagtcaacactgagaaattcgatgacaagtattttggaaaggttgctgagaagaagaagaagaaaacagaaggcgaattcttcgaagctgagaaagaggagaagaaggagatcccacaggagaagaaggaagaccagaaaaccgttgatgctgctctgatcaaatccattgaagctgtcccagagctcaaggtttaccttggagccaggttctcattgagtcaaggaatgaaaccacatgagcttgttttctagatttcgtattgtttctcaaattttaagaatatctgtttccctgagtattttcatctttaatcgtccttggatcttaaagactattttctctgattttatatatcaaattttcgag

SEQ ID NO: 100155 - protein, 243 aa, Arabidopsis thaliana; identical to SEQ ID NO: 25771
  peptide (1)..(243): Ceres Seq. ID no. 13604472

SEQ ID NO: 100156 - protein, 233 aa, Arabidopsis thaliana; identical to SEQ ID NO: 25772
  peptide (1)..(233): Ceres Seq. ID no. 13604473

SEQ ID NO: 100157 - protein, 206 aa, Arabidopsis thaliana; identical to SEQ ID NO: 25773
  peptide (1)..(206): Ceres Seq. ID no. 13604474

SEQ ID NO: 100158 - DNA, 1887 bp, Arabidopsis thaliana
  misc_feature (1)..(1887): Ceres Seq. ID no. 13604475
  misc_feature (1)..(1887): Ortholog of  Ceres SEQ ID NO 14311191 as cited in SEQ ID NO 52591
gaatttgtgtgttccgaccgaaaaatcaggaagaagaagaagaagattgacaaacaaaaaggattcacctttagtgactgagtgagagaaagagattgaaggaaaaaaaaaaaaaagggtgaagctttggagagaggataaccacgtagaggattctaatccgtggttgcaaacgaaggacccagaatttctggaatctcttgcttcgatcgaatcactctcatgtctaacgaagactctcttccgcctttcactttgtttggtttggatgatgtcgaaaattacggtctggtcactgaagcagacaattcgttacctttagatatacacaatcaggtttttcaacttgtggagaagggaaaccaatcattcaaagagtctcgctttgaagaggctattagcagttattcaaaggccaattctattaaacctcttgaccctattgttcttggcaatagaagtgctgcttatataagatttggccaatatctgaagcagagatctgcatcaatttctgaatataaacctctgaatggttttgatatgtcgatgcttggtgaacttgctcttaaggatgctgataagctaatgagtcttcagagcagtttagtgaagtcatatattacaaaggcttgtgccctcatgttgctagaaagatatgaggtagcccgtgacactatcctctcaggtctacagattgatccctttagcggtcctctacgatccaatcttcaggaattggagaaagtgatgcctaattcgatgcgtaaaacccatggaatggctgagcggtctgatgattttgattgcactgtttgcctgaaattgctgtacgaacctgctacaactccatgtgggcatacattctgccgatcatgcctctttcagtcaatggatcgcggcaacaaatgtccactatgtcgaactgtcatttttatgactccaagaacatgcgctgtcagtgtgacactgaataacatcatagagaaaaactttccagaggagtatgctgaaaggaaatcagagcaagacactctggtccacctaggcaatgaaagtatgccccttttcgtcatggatgtgataatcccctgtcagaagttgtctcttcatatatttgaaccacgatatcgactaatggtgagaagaataatggaaggaaatcatcggatgggaatggtagctcttgattcggcgacaggttctccagtggatgttgcttgcgaagttgaaatcacagagtgtgatccactcccggatggacgttttgtcctggagctggaaagccatagaaggtgccgcattgtaaaagcttgggatcaagatggatatcgtgttgcagaggttgaatgggtgaaagatataccaccacaaagcgagcaagggaaagcagatctgcgggaactgacgaccagcgcagcatcatttgctcggtcatggctagatagagcaaaggaagcagctagacaaggagacagaagaagacttgaaatacttctaaatgttgaatctatgataccaacgcctcaagatcccgagcgcttcagtttctggcttgctacactgacagataggagaccttcagaaagattggaactacttcggcttcaggatactggagagagaataaagcgcgggttgatatatctccgatcagtagaaagaggatgcagaatgcaatgaactggcagcatgatggcattgtattgccggttaaactacagagataaacttgggacctgttcataagaaggttgacaaaacatttattcatgattaaaggaatacataagatagagatccttgtaggatcgctgtcatcctttgtcggatccattgttgtagattttgtttgcgactgtattttatttaattaccatattcttc

SEQ ID NO: 100159 - protein, 486 aa, Arabidopsis thaliana; identical to SEQ ID NO: 50442
  peptide (1)..(486): Ceres Seq. ID no. 13604476

SEQ ID NO: 100160 - protein, 379 aa, Arabidopsis thaliana; identical to SEQ ID NO: 50443
  peptide (1)..(379): Ceres Seq. ID no. 13604477

SEQ ID NO: 100161 - protein, 377 aa, Arabidopsis thaliana
  peptide (1)..(377): Ceres Seq. ID no. 13604478
MLGELALKDADKLMSLQSSLVKSYITKACALMLLERYEVARDTILSGLQIDPFSGPLRSNLQELEKVMPNSMRKTHGMAERSDDFDCTVCLKLLYEPATTPCGHTFCRSCLFQSMDRGNKCPLCRTVIFMTPRTCAVSVTLNNIIEKNFPEEYAERKSEQDTLVHLGNESMPLFVMDVIIPCQKLSLHIFEPRYRLMVRRIMEGNHRMGMVALDSATGSPVDVACEVEITECDPLPDGRFVLELESHRRCRIVKAWDQDGYRVAEVEWVKDIPPQSEQGKADLRELTTSAASFARSWLDRAKEAARQGDRRRLEILLNVESMIPTPQDPERFSFWLATLTDRRPSERLELLRLQDTGERIKRGLIYLRSVERGCRMQ

SEQ ID NO: 100162 - DNA, 1399 bp, Arabidopsis thaliana
  misc_feature (1)..(1399): Ceres Seq. ID no. 13604479
  misc_feature (1)..(1399): Ortholog of  Ceres SEQ ID NO 15224803 as cited in SEQ ID NO 56572
  misc_feature (1)..(1399): Ortholog of  Ceres SEQ ID NO 14308598 as cited in SEQ ID NO 60416
  misc_feature (1)..(1399): Ortholog of  Ceres SEQ ID NO 13502952 as cited in SEQ ID NO 62271
  misc_feature (1)..(1399): Ortholog of  Ceres SEQ ID NO 13502973 as cited in SEQ ID NO 68052
  misc_feature (1)..(1399): Ortholog of  Ceres SEQ ID NO 13596000 as cited in SEQ ID NO 68188
  misc_feature (1)..(1399): Ortholog of  Ceres SEQ ID NO 15179420 as cited in SEQ ID NO 0
gcacgaggtaatcctaactatacaaaacacataacaatatggctccttcaacaaaagttctctctttacttctcttatatgtcgtcgtgtcattagcctccggtgatgagtccatcatcaacgaccatctccaacttccatcggacggcaagtggagaaccgatgaagaagtgaggtccatctacttacaatggtccgcagaacacgggaaaactaacaacaacaacaacggtatcatcaacgaccaagacaaaagattcaatattttcaaagacaacttaagattcatcgatttacacaacgaagacaacaagaacgctacttacaagcttggtctcaccaaatttaccgatctcactaacgatgagtaccgcaagttgtacctcggggcaagaactgagcccgcccgccgcatcgctaaggccaagaatgtcaaccagaaatactcagccgctgtaaacggcaaggaggttccagagacggttgattggagacagaaaggagccgttaaccccatcaaagaccaaggaacttgcggaagttgttgggcgttttcgactactgcagcagtagaaggtataaacaagatcgtaacaggagaactcatatctctatcagaacaagaacttgttgactgcgacaaatcctacaatcaaggttgcaacggcggtttaatggactacgcttttcaattcatcatgaaaaatggtggcttaaacactgagaaagattatccttaccgtggattcggcggaaaatgcaattctttcttgaagaattctagagttgtgagtattgatgggtacgaagatgttcctactaaagacgagactgcgttgaagaaagctatttcataccaaccggttagtgtagctattgaagccggtggaagaatttttcaacattaccaatcgggtatttttaccggaagttgtggtacaaatcttgatcacgcggtggttgctgtcgggtacggatcagagaacggtgttgactactggattgtaaggaactcttggggtccacgttggggtgaggaaggttacattagaatggagagaaacttggcagcctccaaatccggtaagtgtgggattgcggttgaagcctcgtacccggttaagtacagcccaaacccggttcgtggaaatactatcagcagtgtttgaaatcaagacgctcgataaacatttgggattcttataactgaatttaatctcgtattgttattattgtttgtatgtatagtatttcaacaacaatttcaaaaattagttgattcatcataaggatataaaatttataaatccttatgtcgatcaatttcttttttattcaaagaaagattgtttgcttgttttatgtattaagagaaatataataaaatgatatatttctt

SEQ ID NO: 100163 - protein, 376 aa, Arabidopsis thaliana
  peptide (1)..(376): Ceres Seq. ID no. 13604480
MAPSTKVLSLLLLYVVVSLASGDESIINDHLQLPSDGKWRTDEEVRSIYLQWSAEHGKTNNNNNGIINDQDKRFNIFKDNLRFIDLHNEDNKNATYKLGLTKFTDLTNDEYRKLYLGARTEPARRIAKAKNVNQKYSAAVNGKEVPETVDWRQKGAVNPIKDQGTCGSCWAFSTTAAVEGINKIVTGELISLSEQELVDCDKSYNQGCNGGLMDYAFQFIMKNGGLNTEKDYPYRGFGGKCNSFLKNSRVVSIDGYEDVPTKDETALKKAISYQPVSVAIEAGGRIFQHYQSGIFTGSCGTNLDHAVVAVGYGSENGVDYWIVRNSWGPRWGEEGYIRMERNLAASKSGKCGIAVEASYPVKYSPNPVRGNTISSV

SEQ ID NO: 100164 - DNA, 1336 bp, Arabidopsis thaliana
  misc_feature (1)..(1336): Ceres Seq. ID no. 13604493
  misc_feature (1)..(1336): Ortholog of  Ceres SEQ ID NO 12610930 as cited in SEQ ID NO 55892
agttttgatgataaaagccatggctctatcttctgccggcgtcgtctctcatcttcatcctccgtcgttttcttcgtcgtcaggattatccgtcaacagagttctgtttcggaatcggaacgctagtccttgtggtctatctcttccaattctcaatccgtctcggtctgtacttgtttttgctcgtggcaagaatcgaaaaggattcgtgtcttcgtcttcttcgtctccgaagaaaaacaaaaagaaaagtttggatggagctgataatggaggaggtgaggaggaggaggatccatttgaggcattgtttaatcttttagaagaagatttgaagaatgataactcggatgatgaggagataagtgaggaagagttagaggcattagccgatgagttagctcgagcattgggtgttggtgacgatgttgatgacatcgacttgtttggttcagtcactggtgatgttgatgttgatgttgataatgatgatgatgataatgatgatgatgataatgatgatgatgatgatgacagcgaagaagatgaaagaccgactaagctgaagaattggcagcttaaaagactggcttatgcattgaaagctgggcgtcgtaaaactagtattaaaaatctggcagctgaggtttgtcttgacagggcttatgttcttgaattgcttcgtgacccgcctccaaagctgctaatgctaagtgctacactaccagatgaaaaaccgccagtagcagcacctgagaactcctcacctgatccaagtcctgtggaatcattatcagctgaagatgttgtggtcgaacctaaggaaaaagtaaaagatgaagcagttcatgtgatgcaacagagatggtctgctcagaaaagagtgaagaaagctcacattgaaacgctagagaaagtttacagaagatcaaaacgacccactaatgctgtggttagcagcattgttcaagtgaccaatcttccaaggaagcgagttttgaagtggttcgaagataaaagagcagaagacggagttccagataagcgagctccatatcaagctccggtttgatctaatgttaacgttgagatggcaatgatttgtatacttgattctcagaaactcatcaacattgtcgtcaaggacaagtttttttggtgatacgaggagtgtttatagtagtagattctgtccaatggtgtggctggatatgttggactatgaaattttaggatatcttgtattcagtttttagttatttccttgctgagattgtgtcttgtagaaaaccgtttcaactttgtttggtttatggcggctataaagtttaatttt

SEQ ID NO: 100165 - protein, 356 aa, Arabidopsis thaliana
  peptide (1)..(356): Ceres Seq. ID no. 13604494
VLMIKAMALSSAGVVSHLHPPSFSSSSGLSVNRVLFRNRNASPCGLSLPILNPSRSVLVFARGKNRKGFVSSSSSSPKKNKKKSLDGADNGGGEEEEDPFEALFNLLEEDLKNDNSDDEEISEEELEALADELARALGVGDDVDDIDLFGSVTGDVDVDVDNDDDDNDDDDNDDDDDDSEEDERPTKLKNWQLKRLAYALKAGRRKTSIKNLAAEVCLDRAYVLELLRDPPPKLLMLSATLPDEKPPVAAPENSSPDPSPVESLSAEDVVVEPKEKVKDEAVHVMQQRWSAQKRVKKAHIETLEKVYRRSKRPTNAVVSSIVQVTNLPRKRVLKWFEDKRAEDGVPDKRAPYQAPV

SEQ ID NO: 100166 - protein, 354 aa, Arabidopsis thaliana
  peptide (1)..(354): Ceres Seq. ID no. 13604495
MIKAMALSSAGVVSHLHPPSFSSSSGLSVNRVLFRNRNASPCGLSLPILNPSRSVLVFARGKNRKGFVSSSSSSPKKNKKKSLDGADNGGGEEEEDPFEALFNLLEEDLKNDNSDDEEISEEELEALADELARALGVGDDVDDIDLFGSVTGDVDVDVDNDDDDNDDDDNDDDDDDSEEDERPTKLKNWQLKRLAYALKAGRRKTSIKNLAAEVCLDRAYVLELLRDPPPKLLMLSATLPDEKPPVAAPENSSPDPSPVESLSAEDVVVEPKEKVKDEAVHVMQQRWSAQKRVKKAHIETLEKVYRRSKRPTNAVVSSIVQVTNLPRKRVLKWFEDKRAEDGVPDKRAPYQAPV

SEQ ID NO: 100167 - protein, 350 aa, Arabidopsis thaliana
  peptide (1)..(350): Ceres Seq. ID no. 13604496
MALSSAGVVSHLHPPSFSSSSGLSVNRVLFRNRNASPCGLSLPILNPSRSVLVFARGKNRKGFVSSSSSSPKKNKKKSLDGADNGGGEEEEDPFEALFNLLEEDLKNDNSDDEEISEEELEALADELARALGVGDDVDDIDLFGSVTGDVDVDVDNDDDDNDDDDNDDDDDDSEEDERPTKLKNWQLKRLAYALKAGRRKTSIKNLAAEVCLDRAYVLELLRDPPPKLLMLSATLPDEKPPVAAPENSSPDPSPVESLSAEDVVVEPKEKVKDEAVHVMQQRWSAQKRVKKAHIETLEKVYRRSKRPTNAVVSSIVQVTNLPRKRVLKWFEDKRAEDGVPDKRAPYQAPV

SEQ ID NO: 100168 - DNA, 1944 bp, Arabidopsis thaliana
  misc_feature (1)..(1944): Ceres Seq. ID no. 13604501
  misc_feature (1)..(1944): Ortholog of  Ceres SEQ ID NO 14306420 as cited in SEQ ID NO 53854
gaacaaaatttaaagccatcgattgccttgtcttgtctctttgcctgttaattatttgtctgaatcttcctctcctgatgatcactccaagtaacttcaaagaaacgctcagattcgacagttctatatatcaacaaacatcatctcaagctcttacctgatatctctgttttgatggatcaaagtcgggttttgcggtttataggccaagtggaaacctgtagagttgttcttctcatggttctggttgttgccttcgtttcaggccttcagtattttgagctctctccagtactactatctattgtttcacctggaaacagcactatttctgaattcagaaaatccaatgatacgactaaaagtgctgaaaatgaaacgtttcttgcatctcaagaagcatccaccgggcttaaaccgtataacagaactacagaggtattgaagagttctgagcacaagtttctgaatgattctcacaaaatagaagcttctggacaacgtagaagaagcaatgaaactgcaagttctctgcatcctcttcaaccaaagattcctcaaatccgcaagaaatatccccataggagcataacaaagccaccatcaattgtcatatcaataaagcagatgaacaatatgatattgaagcggcataatgatccaaaaaattcacttgcacctctctggggatcaaaagtggaccaagagcttaaaactgcaagagacaagatcaagaaagcggctttggtcaagaaagatgatactctttacgcacctctctaccacaacatatccatcttcaaaaggagctatgagctaatggaacaaactctgaaagtgtatgtctactcggaaggggatagaccaattttccatcagcctgaggcaataatggaagggatttacgcatcagaaggatggtttatgaaactaatggagagtagccatagattcttgacaaaagatcccaccaaagctcatttattctacatacctttcagttcaagaattcttcaacagaaactttacgttcatgactctcacagtcgtaataatcttgttaaatatcttggaaactacattgatctcatcgcttccaactacccttcctggaatagaacttgtggctccgatcatttcttcaccgcttgccatgactgggctccaaccgagactaggggaccgtacataaactgcatcagagcactctgtaacgccgatgttggcatagactttgtggtcggaaaagatgtttctttgccggaaactaaagtctcttctttgcaaaatccaaacggaaaaattggaggtagccgcccttccaagcgaaccatcctcgcttttttcgccgggagcttgcacggttacgttagacccatcttgcttaaccaatggtcatcgagacctgaacaagatatgaagatctttaatcgtatcgatcataaatcatacatccgttacatgaaacgcagcagattctgcgtttgcgctaaaggttacgaggttaatagccctagagtggttgagtcgattttgtacggttgtgttccggtgattatctctgataactttgtgccaccgtttcttgagattctgaattgggaatctttcgcagtgtttgtgccggagaaagagatcccgaatctaaggaagattctgatatcgattccggtgaggagatacgtggagatgcaaaagagggttttgaaggttcaaaaacatttcatgtggcatgatggtgaaccggttcggtatgatatatttcatatgattcttcattcggtttggtataaccgagtttttcaaacgttttagccagattaatcaggtttgacaagggttttggtttggcctttgctacttgccaataattaactacgtctccggaagattgtattttgtagattactgattcatattagccaattggacttgattacaaat

SEQ ID NO: 100169 - protein, 546 aa, Arabidopsis thaliana
  peptide (1)..(546): Ceres Seq. ID no. 13604502
MDQSRVLRFIGQVETCRVVLLMVLVVAFVSGLQYFELSPVLLSIVSPGNSTISEFRKSNDTTKSAENETFLASQEASTGLKPYNRTTEVLKSSEHKFLNDSHKIEASGQRRRSNETASSLHPLQPKIPQIRKKYPHRSITKPPSIVISIKQMNNMILKRHNDPKNSLAPLWGSKVDQELKTARDKIKKAALVKKDDTLYAPLYHNISIFKRSYELMEQTLKVYVYSEGDRPIFHQPEAIMEGIYASEGWFMKLMESSHRFLTKDPTKAHLFYIPFSSRILQQKLYVHDSHSRNNLVKYLGNYIDLIASNYPSWNRTCGSDHFFTACHDWAPTETRGPYINCIRALCNADVGIDFVVGKDVSLPETKVSSLQNPNGKIGGSRPSKRTILAFFAGSLHGYVRPILLNQWSSRPEQDMKIFNRIDHKSYIRYMKRSRFCVCAKGYEVNSPRVVESILYGCVPVIISDNFVPPFLEILNWESFAVFVPEKEIPNLRKILISIPVRRYVEMQKRVLKVQKHFMWHDGEPVRYDIFHMILHSVWYNRVFQTF

SEQ ID NO: 100170 - protein, 525 aa, Arabidopsis thaliana
  peptide (1)..(525): Ceres Seq. ID no. 13604503
MVLVVAFVSGLQYFELSPVLLSIVSPGNSTISEFRKSNDTTKSAENETFLASQEASTGLKPYNRTTEVLKSSEHKFLNDSHKIEASGQRRRSNETASSLHPLQPKIPQIRKKYPHRSITKPPSIVISIKQMNNMILKRHNDPKNSLAPLWGSKVDQELKTARDKIKKAALVKKDDTLYAPLYHNISIFKRSYELMEQTLKVYVYSEGDRPIFHQPEAIMEGIYASEGWFMKLMESSHRFLTKDPTKAHLFYIPFSSRILQQKLYVHDSHSRNNLVKYLGNYIDLIASNYPSWNRTCGSDHFFTACHDWAPTETRGPYINCIRALCNADVGIDFVVGKDVSLPETKVSSLQNPNGKIGGSRPSKRTILAFFAGSLHGYVRPILLNQWSSRPEQDMKIFNRIDHKSYIRYMKRSRFCVCAKGYEVNSPRVVESILYGCVPVIISDNFVPPFLEILNWESFAVFVPEKEIPNLRKILISIPVRRYVEMQKRVLKVQKHFMWHDGEPVRYDIFHMILHSVWYNRVFQTF

SEQ ID NO: 100171 - protein, 395 aa, Arabidopsis thaliana
  peptide (1)..(395): Ceres Seq. ID no. 13604504
MNNMILKRHNDPKNSLAPLWGSKVDQELKTARDKIKKAALVKKDDTLYAPLYHNISIFKRSYELMEQTLKVYVYSEGDRPIFHQPEAIMEGIYASEGWFMKLMESSHRFLTKDPTKAHLFYIPFSSRILQQKLYVHDSHSRNNLVKYLGNYIDLIASNYPSWNRTCGSDHFFTACHDWAPTETRGPYINCIRALCNADVGIDFVVGKDVSLPETKVSSLQNPNGKIGGSRPSKRTILAFFAGSLHGYVRPILLNQWSSRPEQDMKIFNRIDHKSYIRYMKRSRFCVCAKGYEVNSPRVVESILYGCVPVIISDNFVPPFLEILNWESFAVFVPEKEIPNLRKILISIPVRRYVEMQKRVLKVQKHFMWHDGEPVRYDIFHMILHSVWYNRVFQTF

SEQ ID NO: 100172 - DNA, 1644 bp, Arabidopsis thaliana
  misc_feature (1)..(1644): Ceres Seq. ID no. 13604533
  misc_feature (1)..(1644): Ortholog of  Ceres SEQ ID NO 13663419 as cited in SEQ ID NO 66561
aaggttcttcgttgacatactattctctgttgtagcaacactaagaagaagcagagaaaatgagaaaccttagcttcatcgtcttatttctattgaccctcttcttcattcatcatttggttgatgcttctttgctagtgaagtctcttcctggttttgaaggtcctcttccttttgagctcgagactggatatgtgagtattggtgaatctggagatgttgagctcttttactactttgtgaaatcagagaggaatccagaaaatgatcctctcatgatttggctcactggtggacctggctgcagctccatctgtggattgctcttcgcaaacggtcctttagcttttaaaggggatgagtataatgggacagtacctcctctagagttgacatctttttcatggacaaaggtggctaacattttatatttggaagctcctgctggctctggatactcttatgcgaaaactcggcgtgcttttgagtcgagcgacaccaaacaaatgcaccaaattgatcaatttcttaggagttggtttgtgaaacacccggagtttatatcgaatcctttttacgttggtggagattcatattccgggaaaattgttccaggagctgtgcaacaaatttcacttggaaatgagaagggcctcacaccactcataaatattcagggttatgttcttggaaaccctgtgacagataaaaacattgaaactaactatagagttccatttgctcatgggatgggacttatttcagatgagctctttgagtcacttgaaagaagttgtggaggcaaattcttcaacgtagacccaagtaatgcaagatgctcaaataatcttcaagcttatgatcattgtatgtcagagatatactcagagcatattttgttacgaaactgcaaagtagattacgtcttggcagacacaccaaacatcagaaccgatagaagaagagtaatgaaggaattttcagtaaacgattcatcatcattgccacctcctagctgctttacttataggtattttctgtctgccttttgggcaaacgatgaaaatgtacgcagagctctaggcgtgaaaaaggtaggaaaatggaaccgatgcaacagccaaaacataccatatacatttgagattttcaatgcagttccttatcacgtaaacaatagtcttaaaggcttccgctctctcatctacagtggtgatcatgattctatggtaccattttcttcaactcaagcatggatcagagctctcaactattccattgttgatgactggagaccttggatgatgagtagcaatcaagtcgcaggctatacaaggacttacgcaaacaagatgacatttgcaaccatcaagggaggaggacacacagcggagtatactccagatcaatgctctcttatgttcagaagatggattgatggagaacctctctaaagattctcactcgcttctctctctttctctctttgttgttgttacagtttaagactaatgttcagtgaattgtaattttgccacatgctattctgtgaaatcttcaatgattttgtgttgttgtagaactctaaagtctaatcagaaaggctctgtttcatagcaagtaacagaccctgtttcatattcc

SEQ ID NO: 100173 - protein, 464 aa, Arabidopsis thaliana
  peptide (1)..(464): Ceres Seq. ID no. 13604534
MRNLSFIVLFLLTLFFIHHLVDASLLVKSLPGFEGPLPFELETGYVSIGESGDVELFYYFVKSERNPENDPLMIWLTGGPGCSSICGLLFANGPLAFKGDEYNGTVPPLELTSFSWTKVANILYLEAPAGSGYSYAKTRRAFESSDTKQMHQIDQFLRSWFVKHPEFISNPFYVGGDSYSGKIVPGAVQQISLGNEKGLTPLINIQGYVLGNPVTDKNIETNYRVPFAHGMGLISDELFESLERSCGGKFFNVDPSNARCSNNLQAYDHCMSEIYSEHILLRNCKVDYVLADTPNIRTDRRRVMKEFSVNDSSSLPPPSCFTYRYFLSAFWANDENVRRALGVKKVGKWNRCNSQNIPYTFEIFNAVPYHVNNSLKGFRSLIYSGDHDSMVPFSSTQAWIRALNYSIVDDWRPWMMSSNQVAGYTRTYANKMTFATIKGGGHTAEYTPDQCSLMFRRWIDGEPL

SEQ ID NO: 100174 - protein, 392 aa, Arabidopsis thaliana
  peptide (1)..(392): Ceres Seq. ID no. 13604535
MIWLTGGPGCSSICGLLFANGPLAFKGDEYNGTVPPLELTSFSWTKVANILYLEAPAGSGYSYAKTRRAFESSDTKQMHQIDQFLRSWFVKHPEFISNPFYVGGDSYSGKIVPGAVQQISLGNEKGLTPLINIQGYVLGNPVTDKNIETNYRVPFAHGMGLISDELFESLERSCGGKFFNVDPSNARCSNNLQAYDHCMSEIYSEHILLRNCKVDYVLADTPNIRTDRRRVMKEFSVNDSSSLPPPSCFTYRYFLSAFWANDENVRRALGVKKVGKWNRCNSQNIPYTFEIFNAVPYHVNNSLKGFRSLIYSGDHDSMVPFSSTQAWIRALNYSIVDDWRPWMMSSNQVAGYTRTYANKMTFATIKGGGHTAEYTPDQCSLMFRRWIDGEPL

SEQ ID NO: 100175 - protein, 315 aa, Arabidopsis thaliana
  peptide (1)..(315): Ceres Seq. ID no. 13604536
MHQIDQFLRSWFVKHPEFISNPFYVGGDSYSGKIVPGAVQQISLGNEKGLTPLINIQGYVLGNPVTDKNIETNYRVPFAHGMGLISDELFESLERSCGGKFFNVDPSNARCSNNLQAYDHCMSEIYSEHILLRNCKVDYVLADTPNIRTDRRRVMKEFSVNDSSSLPPPSCFTYRYFLSAFWANDENVRRALGVKKVGKWNRCNSQNIPYTFEIFNAVPYHVNNSLKGFRSLIYSGDHDSMVPFSSTQAWIRALNYSIVDDWRPWMMSSNQVAGYTRTYANKMTFATIKGGGHTAEYTPDQCSLMFRRWIDGEPL

SEQ ID NO: 100176 - DNA, 3498 bp, Arabidopsis thaliana
  misc_feature (1)..(3498): Ceres Seq. ID no. 13604537
  misc_feature (1)..(3498): Ortholog of  Ceres SEQ ID NO 14311156 as cited in SEQ ID NO 54767
  misc_feature (1)..(3498): Ortholog of  Ceres SEQ ID NO 14313220 as cited in SEQ ID NO 66007
  misc_feature (1)..(3498): Ortholog of  Ceres SEQ ID NO 13658778 as cited in SEQ ID NO 66511
atgaatactggtggtcggctcatcgctggttctcacaataggaatgagttcgtgttgattaatgcagacgagagtgccagaattagatcagtggaagaactaagtggacaaacatgtcaaatctgtggagatgagattgagctaagtgttgatggagagtcttttgtggcatgtaatgaatgtgctttccctgtctgtagaccttgctatgagtatgagagacgagaaggaaaccaatcttgtcctcagtgcaaaactcgttacaagcgcatcaaaggaagtccaagggttgaaggagatgaggaggatgatggaattgatgatcttgattttgagtttgattatagtaggagtggccttgaatctgaaactttctctcgccgcaactcggagtttgatttggcctctgctccacctggctcacagattcctttgttaacttatggagaggaggacgttgaaatttcttctgatagtcatgctctcattgtttctccatcacctggccatatccatagggttcatcaacctcattttcctgaccccgctgcacatccaagaccaatggtacctcagaaagaccttgcggtctatggatatggaagtgttgcgtggaaggatcgtatggaggagtggaagagaaagcagaacgaaaaatatcaggtggttaaacatgatggagattctagtcttggagacggagatgatgctgatattcctatgatggatgagggaaggcagcctttgtctaggaaagtaccgataaagtcgagcaaaataaatccgtacaggatgctaattgttctgcgtcttgtgattctcggtctctttttccattaccgtattcttcaccccgtcaatgatgcttacgccttgtggctaatatctgtgatatgcgaaatatggtttgcggtttcatgggttcttgatcagttccctaaatggtatcctatagaaagagagacatacttggacaggctctcattgaggtacgaaaaagaagggaaaccatctgaactagctggtgttgatgtttttgtgagtacagtggatccgatgaaagagcctccgcttattacagcaaacactgttctgtctattcttgcggttgattatccggtagacagagttgcctgttatgtttctgatgatggtgctgctatgcttacttttgaagccctttcagaaacagcagagtttgctaggaaatgggttcctttctgtaagaaatacactatcgagccacgagctcccgaatggtatttttgccacaagatggattatttaaagaataaagttcaccctgcatttgttagggaacgccgagccatgaagagagattatgaagaattcaaggttaagatcaatgctttagttgcgactgcacagaaagtgcctgaagaaggttggactatgcaagacggtactccttggcccggtaataacgtgcgagatcaccctggcatgatccaggtattccttggaaataacggtgtccgcgatgtagaaaacaacgagttgcctcggctggtttatgtttctcgtgagaagagacccggatttgaccatcacaagaaggctggagccatgaactccctgatacgagtctctggagttctatcaaatgctccttatcttctaaatgtcgattgtgatcactacatcaataatagcaaagctcttagagaagcaatgtgtttcatgatggatcctcagtcgggaaagaaaatttgttatgttcaattccctcaaagattcgatgggattgataaaagtgacagatactctaatcgtaatgttgtattcttcgatattaatatgaaaggtttggatggattacaagggcctatatacgtgggaaccgggtgtgtttttaggagacaagcactttatggatttgatgcgccaaaaaagaagaagactaagcgtatgacttgcaattgctggcctaagtggtgtttgttttgttgtggtctaagaaagaatcgtaagtcaaagacaacggataagaaaaagaagaacagggaagcctcaaagcagatacacgcgctagaaaatatcgaagagggcaccaaaggcactaatgatgcggcgaaatcaccagaggcggcacaattgaagttggagaagaagtttggacagtctcctgtttttgttgcgtctgctggtatggagaatggtgggcttgctaggaatgcgagtccagcttctctgcttagagaagccatccaagtcattagttgtggatacgaagataaaaccgaatggggaaaagagattgggtggatctacggttctgtcaccgaggatatccttacgggtttcaagatgcattctcatggctggagatcggtttactgtacacctaagataccggcctttaaaggatcagcacctatcaatctttctgaccgtcttcatcaagttcttcggtgggcgctcgggtctgttgagattttcttgagcagacattgtcctatttggtatggttatggaggtggtttgaaatggcttgagagattgtcttacatcaactctgtggtttatccatggacctctattccactccttgtttactgttctctcccagctatctgtcttctcaccggaaaattcatcgtccctgagattagcaactatgcaagtatcctcttcatggcacttttcgggtcgattgctgtaacgggcattctcgagatgcaatggggtaaagtagggatcgatgattggtggagaaacgaacagttttgggtgattggaggtgtttcagctcatctctttgctctcttccaaggtctcctaaaggttttagccggtgttgagacaaacttcacagttacatctaaagcagcagatgatggtgaattctctgagctttacatcttcaaatggacatcactcttgatccctccaaccacactactcatcataaacgtaatcggagtcattgtgggaatatctgatgcgatcagtaacggatatgactcgtggggtcctcttttcggaagattgttctttgccttttgggtcatcctccatctatatcctttccttaaaggtctgcttgggaaacaagacagaatgcctacaatcattcttgtctggtcgatccttctcgcctctatccttacgcttctttgggtacgagtcaatccgtttgtggcgaaaggcggtcctatcctcgagatatgtggcttggactgcctttgattgaactcaagagttgatatgatacgtaacagattttccacagaggtaagtaaagaggaaagtgtcgctcacacatttgtttgtttactgtgttaagatccttgttagattgaacacaaaaagaaaagaaggatttagatatataatgttattcttttggaaggtgttgtaatgtagatatagaagaaggtggtgtcgtctatttattcttgttatttttttttgagtgaaagtgaaacagaaaagagaggtgttatcttattaattctttcattgaaatattttgag

SEQ ID NO: 100177 - protein, 1069 aa, Arabidopsis thaliana
  peptide (1)..(1069): Ceres Seq. ID no. 13604538
MNTGGRLIAGSHNRNEFVLINADESARIRSVEELSGQTCQICGDEIELSVDGESFVACNECAFPVCRPCYEYERREGNQSCPQCKTRYKRIKGSPRVEGDEEDDGIDDLDFEFDYSRSGLESETFSRRNSEFDLASAPPGSQIPLLTYGEEDVEISSDSHALIVSPSPGHIHRVHQPHFPDPAAHPRPMVPQKDLAVYGYGSVAWKDRMEEWKRKQNEKYQVVKHDGDSSLGDGDDADIPMMDEGRQPLSRKVPIKSSKINPYRMLIVLRLVILGLFFHYRILHPVNDAYALWLISVICEIWFAVSWVLDQFPKWYPIERETYLDRLSLRYEKEGKPSELAGVDVFVSTVDPMKEPPLITANTVLSILAVDYPVDRVACYVSDDGAAMLTFEALSETAEFARKWVPFCKKYTIEPRAPEWYFCHKMDYLKNKVHPAFVRERRAMKRDYEEFKVKINALVATAQKVPEEGWTMQDGTPWPGNNVRDHPGMIQVFLGNNGVRDVENNELPRLVYVSREKRPGFDHHKKAGAMNSLIRVSGVLSNAPYLLNVDCDHYINNSKALREAMCFMMDPQSGKKICYVQFPQRFDGIDKSDRYSNRNVVFFDINMKGLDGLQGPIYVGTGCVFRRQALYGFDAPKKKKTKRMTCNCWPKWCLFCCGLRKNRKSKTTDKKKKNREASKQIHALENIEEGTKGTNDAAKSPEAAQLKLEKKFGQSPVFVASAGMENGGLARNASPASLLREAIQVISCGYEDKTEWGKEIGWIYGSVTEDILTGFKMHSHGWRSVYCTPKIPAFKGSAPINLSDRLHQVLRWALGSVEIFLSRHCPIWYGYGGGLKWLERLSYINSVVYPWTSIPLLVYCSLPAICLLTGKFIVPEISNYASILFMALFGSIAVTGILEMQWGKVGIDDWWRNEQFWVIGGVSAHLFALFQGLLKVLAGVETNFTVTSKAADDGEFSELYIFKWTSLLIPPTTLLIINVIGVIVGISDAISNGYDSWGPLFGRLFFAFWVILHLYPFLKGLLGKQDRMPTIILVWSILLASILTLLWVRVNPFVAKGGPILEICGLDCL

SEQ ID NO: 100178 - protein, 881 aa, Arabidopsis thaliana
  peptide (1)..(881): Ceres Seq. ID no. 13604539
MVPQKDLAVYGYGSVAWKDRMEEWKRKQNEKYQVVKHDGDSSLGDGDDADIPMMDEGRQPLSRKVPIKSSKINPYRMLIVLRLVILGLFFHYRILHPVNDAYALWLISVICEIWFAVSWVLDQFPKWYPIERETYLDRLSLRYEKEGKPSELAGVDVFVSTVDPMKEPPLITANTVLSILAVDYPVDRVACYVSDDGAAMLTFEALSETAEFARKWVPFCKKYTIEPRAPEWYFCHKMDYLKNKVHPAFVRERRAMKRDYEEFKVKINALVATAQKVPEEGWTMQDGTPWPGNNVRDHPGMIQVFLGNNGVRDVENNELPRLVYVSREKRPGFDHHKKAGAMNSLIRVSGVLSNAPYLLNVDCDHYINNSKALREAMCFMMDPQSGKKICYVQFPQRFDGIDKSDRYSNRNVVFFDINMKGLDGLQGPIYVGTGCVFRRQALYGFDAPKKKKTKRMTCNCWPKWCLFCCGLRKNRKSKTTDKKKKNREASKQIHALENIEEGTKGTNDAAKSPEAAQLKLEKKFGQSPVFVASAGMENGGLARNASPASLLREAIQVISCGYEDKTEWGKEIGWIYGSVTEDILTGFKMHSHGWRSVYCTPKIPAFKGSAPINLSDRLHQVLRWALGSVEIFLSRHCPIWYGYGGGLKWLERLSYINSVVYPWTSIPLLVYCSLPAICLLTGKFIVPEISNYASILFMALFGSIAVTGILEMQWGKVGIDDWWRNEQFWVIGGVSAHLFALFQGLLKVLAGVETNFTVTSKAADDGEFSELYIFKWTSLLIPPTTLLIINVIGVIVGISDAISNGYDSWGPLFGRLFFAFWVILHLYPFLKGLLGKQDRMPTIILVWSILLASILTLLWVRVNPFVAKGGPILEICGLDCL

SEQ ID NO: 100179 - protein, 861 aa, Arabidopsis thaliana
  peptide (1)..(861): Ceres Seq. ID no. 13604540
MEEWKRKQNEKYQVVKHDGDSSLGDGDDADIPMMDEGRQPLSRKVPIKSSKINPYRMLIVLRLVILGLFFHYRILHPVNDAYALWLISVICEIWFAVSWVLDQFPKWYPIERETYLDRLSLRYEKEGKPSELAGVDVFVSTVDPMKEPPLITANTVLSILAVDYPVDRVACYVSDDGAAMLTFEALSETAEFARKWVPFCKKYTIEPRAPEWYFCHKMDYLKNKVHPAFVRERRAMKRDYEEFKVKINALVATAQKVPEEGWTMQDGTPWPGNNVRDHPGMIQVFLGNNGVRDVENNELPRLVYVSREKRPGFDHHKKAGAMNSLIRVSGVLSNAPYLLNVDCDHYINNSKALREAMCFMMDPQSGKKICYVQFPQRFDGIDKSDRYSNRNVVFFDINMKGLDGLQGPIYVGTGCVFRRQALYGFDAPKKKKTKRMTCNCWPKWCLFCCGLRKNRKSKTTDKKKKNREASKQIHALENIEEGTKGTNDAAKSPEAAQLKLEKKFGQSPVFVASAGMENGGLARNASPASLLREAIQVISCGYEDKTEWGKEIGWIYGSVTEDILTGFKMHSHGWRSVYCTPKIPAFKGSAPINLSDRLHQVLRWALGSVEIFLSRHCPIWYGYGGGLKWLERLSYINSVVYPWTSIPLLVYCSLPAICLLTGKFIVPEISNYASILFMALFGSIAVTGILEMQWGKVGIDDWWRNEQFWVIGGVSAHLFALFQGLLKVLAGVETNFTVTSKAADDGEFSELYIFKWTSLLIPPTTLLIINVIGVIVGISDAISNGYDSWGPLFGRLFFAFWVILHLYPFLKGLLGKQDRMPTIILVWSILLASILTLLWVRVNPFVAKGGPILEICGLDCL

SEQ ID NO: 100180 - DNA, 1099 bp, Arabidopsis thaliana
  misc_feature (1)..(1099): Ceres Seq. ID no. 13604547
  misc_feature (1)..(1099): Ortholog of  Ceres SEQ ID NO 12474685 as cited in SEQ ID NO 88
  misc_feature (1)..(1099): Ortholog of  Ceres SEQ ID NO 13638574 as cited in SEQ ID NO 51223
  misc_feature (1)..(1099): Ortholog of  Ceres SEQ ID NO 12610790 as cited in SEQ ID NO 56123
  misc_feature (1)..(1099): Ortholog of  Ceres SEQ ID NO 13655636 as cited in SEQ ID NO 63519
  misc_feature (1)..(1099): Ortholog of  Ceres SEQ ID NO 13655896 as cited in SEQ ID NO 64970
caatagaggcaaggaggagaaagccaatggcacatgccacgtttacgtcggaagggcagaatatggagtcgtttcgactcttgagtggccacaaaatcccagccgttggactcggcacgtggcgatctgggtctcaagccgcccacgccgttgtcactgcaatcgtcgagggtggctataggcacatagatacagcttgggagtatggtgatcagagagaggtcggtcaaggaataaagagggcgatgcacgctggccttgaaaggagggacctctttgtgacctcgaagctttggtgcactgagttatctcctgagagagtgcgtcctgctctgcaaaacacccttaaagagcttcaattagagtaccttgatctctacttgattcactggcctatccggctaagagaaggagccagtaagccaccaaaggcaggggacgttcttgactttgacatggaaggagtttggagagaaatggagaatctttccaaggacagtctcgtcaggaatatcggtgtctgtaactttacagtcactaagctcaataagctgctaggatttgctgaactgatccctgccgtttgccagatggaaatgcatcctggttggagaaacgataggatactcgaattctgcaagaagaatgagatccatgttactgcctattctccattgggatctcaagaaggcgggagagatctgatacacgatcagacggtggataggatagcgaagaagctgaataagacaccgggacagattctagtgaaatggggtttgcagagaggaacaagtgtcatccctaagtcattgaatccagagaggatcaaagagaacatcaaagtgtttgattgggtgatccctgaacaagacttccaagctctcaacagcatcactgaccagaaacgagtgatagacggtgaggatcttttcgtcaacaagaccgaaggtccattccgtagtgtggctgatctatgggaccatgaagactaaaccgaacccgagaatcaaacataactatgtaaggaatgtgtttgttgtaacttgtaagatatcaaatgtacattttctgaaaataaaagaaagcagtctcccgt

SEQ ID NO: 100181 - protein, 330 aa, Arabidopsis thaliana
  peptide (1)..(330): Ceres Seq. ID no. 13604548
IEARRRKPMAHATFTSEGQNMESFRLLSGHKIPAVGLGTWRSGSQAAHAVVTAIVEGGYRHIDTAWEYGDQREVGQGIKRAMHAGLERRDLFVTSKLWCTELSPERVRPALQNTLKELQLEYLDLYLIHWPIRLREGASKPPKAGDVLDFDMEGVWREMENLSKDSLVRNIGVCNFTVTKLNKLLGFAELIPAVCQMEMHPGWRNDRILEFCKKNEIHVTAYSPLGSQEGGRDLIHDQTVDRIAKKLNKTPGQILVKWGLQRGTSVIPKSLNPERIKENIKVFDWVIPEQDFQALNSITDQKRVIDGEDLFVNKTEGPFRSVADLWDHED

SEQ ID NO: 100182 - protein, 322 aa, Arabidopsis thaliana
  peptide (1)..(322): Ceres Seq. ID no. 13604549
MAHATFTSEGQNMESFRLLSGHKIPAVGLGTWRSGSQAAHAVVTAIVEGGYRHIDTAWEYGDQREVGQGIKRAMHAGLERRDLFVTSKLWCTELSPERVRPALQNTLKELQLEYLDLYLIHWPIRLREGASKPPKAGDVLDFDMEGVWREMENLSKDSLVRNIGVCNFTVTKLNKLLGFAELIPAVCQMEMHPGWRNDRILEFCKKNEIHVTAYSPLGSQEGGRDLIHDQTVDRIAKKLNKTPGQILVKWGLQRGTSVIPKSLNPERIKENIKVFDWVIPEQDFQALNSITDQKRVIDGEDLFVNKTEGPFRSVADLWDHED

SEQ ID NO: 100183 - protein, 310 aa, Arabidopsis thaliana
  peptide (1)..(310): Ceres Seq. ID no. 13604550
MESFRLLSGHKIPAVGLGTWRSGSQAAHAVVTAIVEGGYRHIDTAWEYGDQREVGQGIKRAMHAGLERRDLFVTSKLWCTELSPERVRPALQNTLKELQLEYLDLYLIHWPIRLREGASKPPKAGDVLDFDMEGVWREMENLSKDSLVRNIGVCNFTVTKLNKLLGFAELIPAVCQMEMHPGWRNDRILEFCKKNEIHVTAYSPLGSQEGGRDLIHDQTVDRIAKKLNKTPGQILVKWGLQRGTSVIPKSLNPERIKENIKVFDWVIPEQDFQALNSITDQKRVIDGEDLFVNKTEGPFRSVADLWDHED

SEQ ID NO: 100184 - DNA, 910 bp, Arabidopsis thaliana
  misc_feature (1)..(910): Ceres Seq. ID no. 13604551
  misc_feature (1)..(910): Ortholog of  Ceres SEQ ID NO 13595568 as cited in SEQ ID NO 56764
cgaggcctcgtgcgaattcggcacgaggaataattataagtatttactcaaaaaaaaaacaaaaaaagatgaactcttgccaacaaaaggctatggagaagttgcttcacgggcatgggtgcgccaaccagctgctcatcatggaccagaccgagtcagactcgtccatggaaagggaggatttggccaagtccgtcctccattgtttctcagatgcgctctccatcttgatcgatactaatgaccaccaagacgatcaatccaataactcatctcctcaggactcttctcctgtgcttgagagctccaggaaaccacttcacaagaggggaagaaagacatctatggcagagagctcagactaccatagacacgaatcttcaaccccgatctaccacgacggcttcctctggaggaaatacggacaaaagcagatcaaagaatctgagtaccaaaggagttactacaagtgtgcctacaccaaggaccagaactgtgaagcaaagaagcaggttcaaaagatccaacacaatcctccattgtactcaaccacttacttcggccagcacatatgccagcttcatcaagcttatgcaactttccccattgacacatctgacttcgaagagcacgagggatcccacatgatccgattcggtcaccccaacatcagcttctcctcctccacctctaacctccgccaacatcagaatcatcaggatcgcatcaaagatgaatacatgaaaccggtgatagcagaagattggtctccatcccagtggatgtcgtccgaggttgccctcgccgtggaggctttcgagtttaatcctttctggacatctcacgacttatcatcatgacactatatccctcagctctatcatcatacatatatagcttctttaatcct

SEQ ID NO: 100185 - protein, 285 aa, Arabidopsis thaliana
  peptide (1)..(285): Ceres Seq. ID no. 13604552
RPRANSARGIIISIYSKKKQKKMNSCQQKAMEKLLHGHGCANQLLIMDQTESDSSMEREDLAKSVLHCFSDALSILIDTNDHQDDQSNNSSPQDSSPVLESSRKPLHKRGRKTSMAESSDYHRHESSTPIYHDGFLWRKYGQKQIKESEYQRSYYKCAYTKDQNCEAKKQVQKIQHNPPLYSTTYFGQHICQLHQAYATFPIDTSDFEEHEGSHMIRFGHPNISFSSSTSNLRQHQNHQDRIKDEYMKPVIAEDWSPSQWMSSEVALAVEAFEFNPFWTSHDLSS

SEQ ID NO: 100186 - protein, 263 aa, Arabidopsis thaliana
  peptide (1)..(263): Ceres Seq. ID no. 13604553
MNSCQQKAMEKLLHGHGCANQLLIMDQTESDSSMEREDLAKSVLHCFSDALSILIDTNDHQDDQSNNSSPQDSSPVLESSRKPLHKRGRKTSMAESSDYHRHESSTPIYHDGFLWRKYGQKQIKESEYQRSYYKCAYTKDQNCEAKKQVQKIQHNPPLYSTTYFGQHICQLHQAYATFPIDTSDFEEHEGSHMIRFGHPNISFSSSTSNLRQHQNHQDRIKDEYMKPVIAEDWSPSQWMSSEVALAVEAFEFNPFWTSHDLSS

SEQ ID NO: 100187 - protein, 255 aa, Arabidopsis thaliana
  peptide (1)..(255): Ceres Seq. ID no. 13604554
MEKLLHGHGCANQLLIMDQTESDSSMEREDLAKSVLHCFSDALSILIDTNDHQDDQSNNSSPQDSSPVLESSRKPLHKRGRKTSMAESSDYHRHESSTPIYHDGFLWRKYGQKQIKESEYQRSYYKCAYTKDQNCEAKKQVQKIQHNPPLYSTTYFGQHICQLHQAYATFPIDTSDFEEHEGSHMIRFGHPNISFSSSTSNLRQHQNHQDRIKDEYMKPVIAEDWSPSQWMSSEVALAVEAFEFNPFWTSHDLSS

SEQ ID NO: 100188 - DNA, 2060 bp, Arabidopsis thaliana
  misc_feature (1)..(2060): Ceres Seq. ID no. 13604569
  misc_feature (1)..(2060): Ortholog of  Ceres SEQ ID NO 12586556 as cited in SEQ ID NO 64667
  misc_feature (1)..(2060): Ortholog of  Ceres SEQ ID NO 13660894 as cited in SEQ ID NO 67475
atgatccgatcacgaagtgtcttgttaattttcaggaaggtgttgtatcaatcgtcttgtcttaagtgtttattatgtgcaaactctttctctacttcagtttcgtcaagcttgggttttcgagcgacgaacaaagagttaaaccagatgataagatcggggtatatcgccgaagctagagatatttttgagaaactggaagcgaggaacacagtgacatggaatacgatgataagcgggtatgtgaaaaggcgtgaaatgaatcaagcacggaaactgttcgacgtaatgcctaagagagatgttgtgacttggaacacgatgatttcggggtatgtttcatgtggtgggattaggtttcttgaggaagcaaggaagctgtttgatgaaatgccttcaagggattctttttcatggaacactatgattagtggttatgcgaagaatcggaggataggtgaagcgttgttgttatttgagaaaatgcctgagagaaatgcagtgtcatggagtgctatgatcactgggttttgtcagaacggtgaagtggatagcgcggttgtgttgtttcggaaaatgcctgtgaaggattcgtctcctctatgtgcacttgtggctggtcttattaaaaacgagagactttcagaagctgcgtgggttttgggtcagtatgggagtttagtttcaggaagggaagatttggtgtatgcttataacactttgattgttggatatggacagagaggacaagtagaagcagctcgatgtctgtttgatcagattcctgatctctgtggtgatgatcatggtggagagtttagagagaggttctgtaaaaatgttgtgtcatggaattctatgatcaaagcttacttgaaagtgggtgatgtggtctctgcaaggttgctatttgatcagatgaaagaccgcgatacaatttcttggaacacaatgattgatggatacgtacatgtttccaggatggaagatgcttttgctctgttttcggaaatgccgaaccgtgatgcacattcgtggaacatgatggtctcgggttatgctagtgttggcaatgtagagcttgctcgccactactttgaaaaaacacctgagaaacatacagtctcgtggaactcgataatagcagcttatgagaaaaacaaggactacaaagaagctgttgatttgtttatccggatgaacattgaaggagagaagcctgacccacatactttaacttctcttctcagtgcatctaccgggcttgtgaatctgcgtttaggaatgcagatgcaccaaatcgttgtcaagactgtgatccccgatgttccagtccacaatgcccttatcactatgtattcaagatgcggtgaaataatggagtcgaggagaatcttcgatgaaatgaaactcaaaagagaagtaatcacatggaatgcaatgataggaggatatgcatttcatggtaatgcctcagaggccttgaatctgttcgggtcgatgaaaagcaacgggatatatccttctcacataacattcgtctcagttctgaacgcttgtgctcacgcgggacttgttgatgaggctaaagcacagtttgtgtccatgatgagtgtgtacaagatcgagccgcagatggaacattattcttccctggtcaacgttaccagtggacaagggcagtttgaagaggccatgtatatcataacgagtatgccttttgagccagacaaaacggtatggggtgcattattggatgcttgtaggatatataacaatgtagggcttgcacatgttgcagctgaagcaatgtcgagactcgaaccagagagctcaacaccttatgtactgttatataacatgtatgcggatatgggactatgggacgaagcttctcaagtgagaatgaacatggagagtaaaagaatcaagaaggaaagaggatccagttgggttgactcctcaacgtaaaaagcagcctttatttatgtttacttaaacataaaaattgatttgggatcagaattgagatagaaattgataaggtactcttgaaagtt

SEQ ID NO: 100189 - protein, 656 aa, Arabidopsis thaliana
  peptide (1)..(656): Ceres Seq. ID no. 13604570
MIRSRSVLLIFRKVLYQSSCLKCLLCANSFSTSVSSSLGFRATNKELNQMIRSGYIAEARDIFEKLEARNTVTWNTMISGYVKRREMNQARKLFDVMPKRDVVTWNTMISGYVSCGGIRFLEEARKLFDEMPSRDSFSWNTMISGYAKNRRIGEALLLFEKMPERNAVSWSAMITGFCQNGEVDSAVVLFRKMPVKDSSPLCALVAGLIKNERLSEAAWVLGQYGSLVSGREDLVYAYNTLIVGYGQRGQVEAARCLFDQIPDLCGDDHGGEFRERFCKNVVSWNSMIKAYLKVGDVVSARLLFDQMKDRDTISWNTMIDGYVHVSRMEDAFALFSEMPNRDAHSWNMMVSGYASVGNVELARHYFEKTPEKHTVSWNSIIAAYEKNKDYKEAVDLFIRMNIEGEKPDPHTLTSLLSASTGLVNLRLGMQMHQIVVKTVIPDVPVHNALITMYSRCGEIMESRRIFDEMKLKREVITWNAMIGGYAFHGNASEALNLFGSMKSNGIYPSHITFVSVLNACAHAGLVDEAKAQFVSMMSVYKIEPQMEHYSSLVNVTSGQGQFEEAMYIITSMPFEPDKTVWGALLDACRIYNNVGLAHVAAEAMSRLEPESSTPYVLLYNMYADMGLWDEASQVRMNMESKRIKKERGSSWVDSST

SEQ ID NO: 100190 - protein, 607 aa, Arabidopsis thaliana
  peptide (1)..(607): Ceres Seq. ID no. 13604571
MIRSGYIAEARDIFEKLEARNTVTWNTMISGYVKRREMNQARKLFDVMPKRDVVTWNTMISGYVSCGGIRFLEEARKLFDEMPSRDSFSWNTMISGYAKNRRIGEALLLFEKMPERNAVSWSAMITGFCQNGEVDSAVVLFRKMPVKDSSPLCALVAGLIKNERLSEAAWVLGQYGSLVSGREDLVYAYNTLIVGYGQRGQVEAARCLFDQIPDLCGDDHGGEFRERFCKNVVSWNSMIKAYLKVGDVVSARLLFDQMKDRDTISWNTMIDGYVHVSRMEDAFALFSEMPNRDAHSWNMMVSGYASVGNVELARHYFEKTPEKHTVSWNSIIAAYEKNKDYKEAVDLFIRMNIEGEKPDPHTLTSLLSASTGLVNLRLGMQMHQIVVKTVIPDVPVHNALITMYSRCGEIMESRRIFDEMKLKREVITWNAMIGGYAFHGNASEALNLFGSMKSNGIYPSHITFVSVLNACAHAGLVDEAKAQFVSMMSVYKIEPQMEHYSSLVNVTSGQGQFEEAMYIITSMPFEPDKTVWGALLDACRIYNNVGLAHVAAEAMSRLEPESSTPYVLLYNMYADMGLWDEASQVRMNMESKRIKKERGSSWVDSST

SEQ ID NO: 100191 - protein, 580 aa, Arabidopsis thaliana
  peptide (1)..(580): Ceres Seq. ID no. 13604572
MISGYVKRREMNQARKLFDVMPKRDVVTWNTMISGYVSCGGIRFLEEARKLFDEMPSRDSFSWNTMISGYAKNRRIGEALLLFEKMPERNAVSWSAMITGFCQNGEVDSAVVLFRKMPVKDSSPLCALVAGLIKNERLSEAAWVLGQYGSLVSGREDLVYAYNTLIVGYGQRGQVEAARCLFDQIPDLCGDDHGGEFRERFCKNVVSWNSMIKAYLKVGDVVSARLLFDQMKDRDTISWNTMIDGYVHVSRMEDAFALFSEMPNRDAHSWNMMVSGYASVGNVELARHYFEKTPEKHTVSWNSIIAAYEKNKDYKEAVDLFIRMNIEGEKPDPHTLTSLLSASTGLVNLRLGMQMHQIVVKTVIPDVPVHNALITMYSRCGEIMESRRIFDEMKLKREVITWNAMIGGYAFHGNASEALNLFGSMKSNGIYPSHITFVSVLNACAHAGLVDEAKAQFVSMMSVYKIEPQMEHYSSLVNVTSGQGQFEEAMYIITSMPFEPDKTVWGALLDACRIYNNVGLAHVAAEAMSRLEPESSTPYVLLYNMYADMGLWDEASQVRMNMESKRIKKERGSSWVDSST

SEQ ID NO: 100192 - DNA, 1990 bp, Arabidopsis thaliana
  misc_feature (1)..(1990): Ceres Seq. ID no. 13604573
  misc_feature (1)..(1990): Ortholog of  Ceres SEQ ID NO 13585587 as cited in SEQ ID NO 65515
acagactctttcttaatctctctctctttcaaccaaacccctaaacaaaaaaaaaatacattttctgatctctctaaaaatctttctccttcgttaatctcgtgatctctttctttttctatatatggacagaggatggtctggtctcactcttgattcatcttctcttgatcttttaaaccctaatcgtatttctcataagaatcaccgacgtttctcaaatcctttggcgatgtctagaattgacgaagaagatgatcagaagacgagaatatcaaccaacggtagtgaatttaggtttccggtgagtctctcaggtattcgtgatcgtgaagatgaagatttttcatctggcgttgctggagataatgaccgtgaagttcccggcgaagtggatttcttctccgacaagaaatctagggtttgtcgtgaagacgacgaaggatttcgtgtgaagaaggaagaacaagatgatcgaacggacgtaaataccggtttgaatcttcgaacaactggtaatacaaagagtgatgagtcaatgatcgatgatggagaatcttccgaaatggaagataagcgtgcgaaaaatgagttggtgaaattacaagatgagttgaagaaaatgacaatggataatcaaaagcttagagaattgcttacacaagttagcaacagttacacttcacttcagatgcatcttgtttcactaatgcagcaacagcaacaacagaacaataaggtaatagaagctgctgagaagcctgaggagacgatagtaccaaggcaatttattgatttaggccctacgagagcagtaggtgaggccgaggatgtgtcaaattcttcatccgaagatagaactcgttcggggggttcttctgcagccgagaggcgtagtaacgggaagagacttgggcgtgaagaaagccccgaaactgagtccaacaaaattcagaaggtgaattctactaccccgacgacatttgatcaaaccgctgaagctacgatgaggaaagcccgtgtctccgttcgtgcccgatcggaagctccgatgataagcgatggatgtcaatggagaaaatatggccagaagatggccaaagggaatccttgtccgcgggcatattaccgctgcacgatggccacgggctgtcccgttcgcaaacaagttcaacgttgcgcggaagacagatcaattctgattacaacctacgagggaaaccataaccatccgttgccgccagccgcggtagccatggcttctaccaccacggcggcggctaacatgttgctatccgggtcaatgtctagtcacgacgggatgatgaaccctacaaatttactagctagggctgttcttccttgctccacaagcatggcaacaatctcagcctccgcgccgtttccaaccgtcacattagacctcacccactcacctccgcctcctaatggttccaatccttcctcttccgcggctaccaacaacaaccacaactcactgatgcagcggccgcaacaacaacaacagcaaatgacgaacttacctccgggaatgctacctcatgtaataggccaggcattgtataaccaatccaagttctcggggctgcagttctctggtggctctccctcgacggcagcgttttctcagtcacacgcggtggctgatacaataacggcactcacagctgacccgaatttcacggcggctcttgcagccgttatttcttctatgatcaatggtacgaaccaccacgacggcgaaggaaacaacaaaaatcaatagaaaaatattacattttttttttgggtatctacattttttttccaactgggttataggaaacagagagtttatttcattgattcacatttgttctgtttcgtaccaaaatcccagtaaatatacaaaagcaaactatactcaagttcatattcgtaaacactataaatagttacgtaacttaattagcattgcctttaaagcttt

SEQ ID NO: 100193 - protein, 553 aa, Arabidopsis thaliana; identical to SEQ ID NO: 35010
  peptide (1)..(553): Ceres Seq. ID no. 13604574

SEQ ID NO: 100194 - protein, 517 aa, Arabidopsis thaliana; identical to SEQ ID NO: 35011
  peptide (1)..(517): Ceres Seq. ID no. 13604575

SEQ ID NO: 100195 - protein, 415 aa, Arabidopsis thaliana; identical to SEQ ID NO: 35012
  peptide (1)..(415): Ceres Seq. ID no. 13604576

SEQ ID NO: 100196 - DNA, 1762 bp, Arabidopsis thaliana
  misc_feature (1)..(1762): Ceres Seq. ID no. 13604577
  misc_feature (1)..(1762): Ortholog of  Ceres SEQ ID NO 14316459 as cited in SEQ ID NO 57754
caacataatgtccattacaaacaacaacagcatcataaatctcatcacgacgaactttcttctctttctccgtcgattcaatcctccacttcccgattccttcctccgccgccggagaaaccttcacaacctccgtctcaaacctaaccatctcctcaatcccaaactccttagcgaaatctttcaaatacgccaaaacttcgccatgactcggaaacctcctcggatctctagacacaccggaacgaaccacgaacgggaaatctctgtatccggtacactctcgtgtaccgttgattcgtagagatctatagacgcttgaatgaacaacggatcgggtcgggtcaacacttaacggatccgattcgacttcatcggtgtagatccaggttcctccgacttgtttttgtttctcgaaaacgaccaccgagtgaccttctcgtcgaagctctcgtgccgctactagacctgcaggtccagcaccgataaccgccacgtggtgtgatctggttggtgataatgcaggtgccatttgtgtgttctttgattagaatctatgaatcacaatcacacacagttgttacaatttatgattacaatgtttttaataatcaatttggtgtgttagaaacttacacgaatctgttattacagacgtagattgccacgttttggttgatagagagaaatgcttttattatataacttgtgtcattgtatttcttctccaccgagacagtgaaacatcaatcaatatgagcaatcatcaaactgtgagatttcttttctctcatttaccattttgcccttccactttcttgatgattgtttgttttttttgtggacagaagcaggtattgaagcaattggagccatggtgtgaacttaaagataaagtggttcttgtgacaggtgcttcatctggtatagggagagagatctgtcttgatctatgcaaagctggttgtaagattgtagcagcagctcgtcgtgttgatcgtctcaactctctctgttctgaaatcaacagctttggtgcaatcggagtccaagccgcagctcttgagctagacgtttcatcagacgcagacactattcgaaaagcggttaaagaagcttgggaaatctttggaacgatcgatgttttgattaacaatgctggaatcagaggcaatgtcaagtctagtttggatttatcaaaagaagaatgggacaaagtctttagaaccaacttgaccggatcttggttaatatccaaatacgtctgccttttgatgcgtgacgctaagcgtgggggctcggtgattaacgtctcgtcgatctctgggcttcatcgcggtttgttgcgcggtggactagcgtatgcttgttccaaaggtggtgttgacaccatgacgaggatgatggctattgagttagctgtttataagatcagagtgaactcgatcgcacctgggattttcaggtcagagatcacacaaggtcttttccagaaagagtggctcgagaaggtaacggaaaagattgtaccattaaagatgcaacagactgtggatccggggcttacatctctcgttcgctatctcattcacgattcttcccaatatgtcaccgggaatacatacatagtcgattccggagctacactccccggtgtgcccattttttcttctctttgaaaatcttagtcaaaatcttctgtgcttgtacatacaccgtgataagaatgatgtcttttccaataaatggcagtactggcatt

SEQ ID NO: 100197 - protein, 307 aa, Arabidopsis thaliana
  peptide (1)..(307): Ceres Seq. ID no. 13604578
MSNHQTVRFLFSHLPFCPSTFLMIVCFFCGQKQVLKQLEPWCELKDKVVLVTGASSGIGREICLDLCKAGCKIVAAARRVDRLNSLCSEINSFGAIGVQAAALELDVSSDADTIRKAVKEAWEIFGTIDVLINNAGIRGNVKSSLDLSKEEWDKVFRTNLTGSWLISKYVCLLMRDAKRGGSVINVSSISGLHRGLLRGGLAYACSKGGVDTMTRMMAIELAVYKIRVNSIAPGIFRSEITQGLFQKEWLEKVTEKIVPLKMQQTVDPGLTSLVRYLIHDSSQYVTGNTYIVDSGATLPGVPIFSSL

SEQ ID NO: 100198 - protein, 285 aa, Arabidopsis thaliana
  peptide (1)..(285): Ceres Seq. ID no. 13604579
MIVCFFCGQKQVLKQLEPWCELKDKVVLVTGASSGIGREICLDLCKAGCKIVAAARRVDRLNSLCSEINSFGAIGVQAAALELDVSSDADTIRKAVKEAWEIFGTIDVLINNAGIRGNVKSSLDLSKEEWDKVFRTNLTGSWLISKYVCLLMRDAKRGGSVINVSSISGLHRGLLRGGLAYACSKGGVDTMTRMMAIELAVYKIRVNSIAPGIFRSEITQGLFQKEWLEKVTEKIVPLKMQQTVDPGLTSLVRYLIHDSSQYVTGNTYIVDSGATLPGVPIFSSL

SEQ ID NO: 100199 - DNA, 998 bp, Arabidopsis thaliana
  misc_feature (1)..(998): Ceres Seq. ID no. 13604580
  misc_feature (1)..(998): Ortholog of  Ceres SEQ ID NO 13595158 as cited in SEQ ID NO 51008
  misc_feature (1)..(998): Ortholog of  Ceres SEQ ID NO 13581682 as cited in SEQ ID NO 57913
  misc_feature (1)..(998): Ortholog of  Ceres SEQ ID NO 14304144 as cited in SEQ ID NO 59152
  misc_feature (1)..(998): Ortholog of  Ceres SEQ ID NO 13662050 as cited in SEQ ID NO 61580
  misc_feature (1)..(998): Ortholog of  Ceres SEQ ID NO 14309388 as cited in SEQ ID NO 0
atttaaaacccttatttaaattatatagaaaaaaaaaaggtcaagtagtcttctattatttactagtataacctctagaaacatcatcaccacattcctggctaatatccttcatctagaacaattattaacgaatcaaaataccaaaaaacaaagcacctcattgactattaaattagtactaatacattaattaagttattattcctatatataaatctcacccattctccaccttatcatcacaatccaaaactctctctctctctctctctctgtctcttgtcttatcatttatctctctaacggcgaggcaatgggttttccggtgggatattctgagctacttctcccaaaaatctttttctacttgttatctttcttaggtttgatacgtaaactcatctccacaatgttcaagatcattggtctaccagatttcttagaacctgaaccggtttcaacctcatggcccgacccaccacccacgttgaccaaacctgactcagcagcaatactagccggagagatgttaccggttgttcgattctcggatataaaccgaccggaatccgagtgttgcgcagtgtgtctctacgatttcgagaacgacgacgagatccgacggctgacgaattgtcgacatatatttcatcggggatgtttggaccgttggatgatgggttataatcagatgacgtgtccactttgtcgtacacagtttatacctgatcatcttcaactggagtttaatcaaaggctctggtctcaatcttctgctgtttcttctcaacttcttgatgaatcatcatcttaggacgtattaaatctttgtccaaacaaaaaaaaaagacatattaaatcctttttttttggtactttcattgggaattgggtttggtgtgagatcgatgtaaatattaaacaaaaaaaaaaaggtagtggttacaggttaatgaaaaaagaaagaagaagaaaatttgtacttatccatccct

SEQ ID NO: 100200 - protein, 166 aa, Arabidopsis thaliana; identical to SEQ ID NO: 25098
  peptide (1)..(166): Ceres Seq. ID no. 13604581

SEQ ID NO: 100201 - protein, 134 aa, Arabidopsis thaliana; identical to SEQ ID NO: 25099
  peptide (1)..(134): Ceres Seq. ID no. 13604582

SEQ ID NO: 100202 - protein, 95 aa, Arabidopsis thaliana; identical to SEQ ID NO: 44771
  peptide (1)..(95): Ceres Seq. ID no. 13604583

SEQ ID NO: 100203 - DNA, 1143 bp, Arabidopsis thaliana
  misc_feature (1)..(1143): Ceres Seq. ID no. 13604584
  misc_feature (1)..(1143): Ortholog of  Ceres SEQ ID NO 14308168 as cited in SEQ ID NO 59069
aacacttcgctatttttcttcagtcgtcttcttcttccggcttctctcgaaacccttacctaaaaccctaatccgccacatccgtgttttagcctcacgacgaatcacgatgcaacgcagactcgtaaggttaaaaaaagagtatatctacaggaaaagcttggaaggtgatgagcgtaaggtctatgagcagaagcggctgataagagaagcccttcaagaaggaaagccgattcctactgagctccgaaacgtcgaagccaagcttcgacaagaaattgatcttgaagaccaaaacacagctgttccgcggagtcatatcgatgatgaatatgcaaatgctacggaagcagatccaaagattttgttgacaacttctaggaatccaagtgctccgctcatccgattcactaaggaattgaagtttgtgtttcctaactctcagagaataaatcgtggtagtcaggtcatttctgagatcattgaaactgctcgttcccatgattttactgatgttatattggttcatgagcaccgtggtgtgcctgatggtctcattatctctcatctcccatttggaccaactgcatactttggattacttaatgtggtaacaagacatgatatttcagacaagaaatccattggaaaaatgcctgagcaatatcctcatctcatttttaacaactttactactcagatgggtcaaagagttggaaacatcttaaaacatatcttccctgctccaaaactggatgcaaaacgtatagttactttttctaatcaatccgattatatatcattcaggaatcatgtctatgataaaggagagggaggtccaaaatcaatcgagcttaaagaaatcggtcctcgatttgagttgcggctctaccaggtgaaattaggaactgtggaacaaaatgaagcagagatcgaatgggttataagaccgtacatgaacacctctaaaaagcgcaagttcatcggtgaatgatgactaaacggaacagctttgaaccctttatctaaattctgttttacttatcattctgttggaagagctgttcagtttttgtgtccttagagaaaattgcgatgattttgttttaacgtttagcttataaaaacaaaactttcttgtct

SEQ ID NO: 100204 - protein, 330 aa, Arabidopsis thaliana; identical to SEQ ID NO: 25743
  peptide (1)..(330): Ceres Seq. ID no. 13604585

SEQ ID NO: 100205 - protein, 294 aa, Arabidopsis thaliana; identical to SEQ ID NO: 25744
  peptide (1)..(294): Ceres Seq. ID no. 13604586

SEQ ID NO: 100206 - DNA, 1024 bp, Arabidopsis thaliana
  misc_feature (1)..(1024): Ceres Seq. ID no. 13604587
  misc_feature (1)..(1024): Ortholog of  Ceres SEQ ID NO 15168868 as cited in SEQ ID NO 58303
agaaactgatttgataaaaaaaaatatcttcgttgaagtgagggtgacgagaagtttctgctttcatcaattaaaggtttacgcgtgaagcagatcatcagcaatggcggcgtcgcaagataagttggataagatgaaacttaggcaagattaccggaatttatggcactccgatctcatgggcaccgtcaccgccgacactccctattgctgcatctcgtgtctgtgtggaccttgtgtgtcatacatgcttcggagaagagcactttacaatgacatgtcaaggtatacttgctgtgctggatatatgccctgtagtggaaggtgtggagaaagcaaatgtcctcaactttgccttgccactgaggtcttcctttgcttcggaaactctgtggcctctacccgctttcttctgcaggatgaattcaacatccagacaacacaatgcgacaattgcataattggatttatgttctgcctcagccaagttgcttgcatattctctatagttgcttgcattgttggtagtgatgaactttccgaggcttctcagatactctcttgctgtgctgatatggtctactgcacggtctgcgcatgtatgcagacacaacacaaacttgagatggacaaaagagatggagtgtttggatcgcagccaatgggtgtgccaccagctcagcagatgtctcgttttgatcaacctgtccctcctccagtcggataccctcagtcctatccaccgcctgctcaaggctaccctcctgcatcttacccgcctcccggttatcctcagcattaagaaatttaaccagtatcttcattttatgtgtcaaagtgttgttgttacttggtttaggtgtgcagaactattatattgttcagctttgtcctctgcttatttctgcgatttatttattttgaggtattggtactctggttatgtctgaaaagcttttgctatcatcaactggtttgttgactttggtatttaagtaaagaaaaagaacaacatatgtattag

SEQ ID NO: 100207 - protein, 232 aa, Arabidopsis thaliana; identical to SEQ ID NO: 29812
  peptide (1)..(232): Ceres Seq. ID no. 13604588

SEQ ID NO: 100208 - protein, 222 aa, Arabidopsis thaliana; identical to SEQ ID NO: 29813
  peptide (1)..(222): Ceres Seq. ID no. 13604589

SEQ ID NO: 100209 - protein, 207 aa, Arabidopsis thaliana; identical to SEQ ID NO: 29814
  peptide (1)..(207): Ceres Seq. ID no. 13604590

SEQ ID NO: 100210 - DNA, 593 bp, Arabidopsis thaliana
  misc_feature (1)..(593): Ceres Seq. ID no. 13604591
  misc_feature (1)..(593): Ortholog of  Ceres SEQ ID NO 15177455 as cited in SEQ ID NO 0
attgttgtgaatttctgtgagattgagaatgcaggcggaggagataatatgccgtgtttcagacgaagagatcatcgagaattacctgaggccaaagataaacggtgaaacatcttcaatcccgagatatgttgtggaattggcagaggagctgtacactgtagagccttggctgcttcctcgacaaacagctccaattctcaaccctggcgagtggttctactttgggaaacgcaatcgaaagtatagtaacttggaaggtgttcattgcgagggatcgtggatactcgaagacggttgcatcgcagtcctgtccaaggagacgggtgaggaaattggtggaacgacgagatttaggtattactataggaacaagggggataaagagagtcgtctgaagatgagcaattggtttatgagagagtatcgtctctattacaaatccaggagagtcttcaatggacgtcaggttttctgcattatcacttgtaatgatgaacattttatcgaataattctctctgcttttttttctaagataccatagtttaagatcctaattatgagtttgaatctataattataactctttgc

SEQ ID NO: 100211 - protein, 161 aa, Arabidopsis thaliana
  peptide (1)..(161): Ceres Seq. ID no. 13604592
MQAEEIICRVSDEEIIENYLRPKINGETSSIPRYVVELAEELYTVEPWLLPRQTAPILNPGEWFYFGKRNRKYSNLEGVHCEGSWILEDGCIAVLSKETGEEIGGTTRFRYYYRNKGDKESRLKMSNWFMREYRLYYKSRRVFNGRQVFCIITCNDEHFIE

SEQ ID NO: 100212 - DNA, 1342 bp, Arabidopsis thaliana
  misc_feature (1)..(1342): Ceres Seq. ID no. 13604600
  misc_feature (1)..(1342): Ortholog of  Ceres SEQ ID NO 14311505 as cited in SEQ ID NO 51412
  misc_feature (1)..(1342): Ortholog of  Ceres SEQ ID NO 13597462 as cited in SEQ ID NO 65069
gttagcggggtcggttacgaagaaaggaagctcttttacattctcgtggcaacgatctcatctacgtgtcacgaaaactcaaatctcttactccggcgaacgatgtaccgaacggcggcgaagcgtcttctcgccggtggtggaatcactaccacccgtctcctccgattaccgaagctcaggtctacaatcatcccttcctcttacacttccggtctctgcacttcgtcgattggtggtaatactgaatcaccaatgggtaagcagtctgtgaaccctaatcaatcgggtccaacggcgtcgtcttctacgggtacaggggaaggacaacgccgacatgagagcagaaagccgagagctgagttccaagaagagcaggctcgtgttctctctgcgtctctccgtcacgtgccgaggttaggttggacggaagaagcgatgatggctggttcaagggatgttggtgtgtctccttcgattgttgggtctttctccaggaaagaagctgctcttgttgagttcttcatggatgaatgccttcaattgcttatggatagaatagactctggattggatttgcaaaatctgattccaagtgaacgtatctccaagctcattagaattcgtctagaaatgcaagtcccttacatgtcaaaatggccccaagctcttagcattcaggcgcatcctctgaatgtcccaacgagttttaagcaacgggcaatgttagttgatgagatatggcatgctgttggagatggagcctcggatttagattggtatgtcaagcgtactattcttggaggcgtttactcaactaccgagatttacatgctcaccgatgactccttagaacatcgcgatacatgggcattcttggatgacagagtcaaagatgcttttgatcttaagaagagcatacaagaggccaagtattttgcagaagacataggagctggagttgggaagtcggttcaaggactgatgaatggagttatgcagacaatgtccagaagaagtggtggctctgcgttttgaaaagatcacacctttacacatgattctgcttcacactccttacggattctccaatattttgagttgggatttactataataatgagattagacttatatgagttgaagtgaaggcatatgaactaatatattatcttctacgtttgaataaaccattgagtttgaaatctttaatttgtaaataaggatgaaacctgttctgtgtttggttgttctgtgcgtaaacagagttggaaacttgtaattttggtctacttcaatttggtagggtgtttattgttcgaaaacaaacatatgggcactt

SEQ ID NO: 100213 - protein, 345 aa, Arabidopsis thaliana
  peptide (1)..(345): Ceres Seq. ID no. 13604601
VSGVGYEERKLFYILVATISSTCHENSNLLLRRTMYRTAAKRLLAGGGITTTRLLRLPKLRSTIIPSSYTSGLCTSSIGGNTESPMGKQSVNPNQSGPTASSSTGTGEGQRRHESRKPRAEFQEEQARVLSASLRHVPRLGWTEEAMMAGSRDVGVSPSIVGSFSRKEAALVEFFMDECLQLLMDRIDSGLDLQNLIPSERISKLIRIRLEMQVPYMSKWPQALSIQAHPLNVPTSFKQRAMLVDEIWHAVGDGASDLDWYVKRTILGGVYSTTEIYMLTDDSLEHRDTWAFLDDRVKDAFDLKKSIQEAKYFAEDIGAGVGKSVQGLMNGVMQTMSRRSGGSAF

SEQ ID NO: 100214 - protein, 311 aa, Arabidopsis thaliana
  peptide (1)..(311): Ceres Seq. ID no. 13604602
MYRTAAKRLLAGGGITTTRLLRLPKLRSTIIPSSYTSGLCTSSIGGNTESPMGKQSVNPNQSGPTASSSTGTGEGQRRHESRKPRAEFQEEQARVLSASLRHVPRLGWTEEAMMAGSRDVGVSPSIVGSFSRKEAALVEFFMDECLQLLMDRIDSGLDLQNLIPSERISKLIRIRLEMQVPYMSKWPQALSIQAHPLNVPTSFKQRAMLVDEIWHAVGDGASDLDWYVKRTILGGVYSTTEIYMLTDDSLEHRDTWAFLDDRVKDAFDLKKSIQEAKYFAEDIGAGVGKSVQGLMNGVMQTMSRRSGGSAF

SEQ ID NO: 100215 - protein, 260 aa, Arabidopsis thaliana
  peptide (1)..(260): Ceres Seq. ID no. 13604603
MGKQSVNPNQSGPTASSSTGTGEGQRRHESRKPRAEFQEEQARVLSASLRHVPRLGWTEEAMMAGSRDVGVSPSIVGSFSRKEAALVEFFMDECLQLLMDRIDSGLDLQNLIPSERISKLIRIRLEMQVPYMSKWPQALSIQAHPLNVPTSFKQRAMLVDEIWHAVGDGASDLDWYVKRTILGGVYSTTEIYMLTDDSLEHRDTWAFLDDRVKDAFDLKKSIQEAKYFAEDIGAGVGKSVQGLMNGVMQTMSRRSGGSAF

SEQ ID NO: 100216 - DNA, 953 bp, Arabidopsis thaliana
  misc_feature (1)..(953): Ceres Seq. ID no. 13604608
  misc_feature (1)..(953): Ortholog of  Ceres SEQ ID NO 13594925 as cited in SEQ ID NO 55775
  misc_feature (1)..(953): Ortholog of  Ceres SEQ ID NO 12637705 as cited in SEQ ID NO 0
tggcgatctctatttaatcggtcctcgacgcaacttcaacttctactacatccattcacatcaaatcaatacagaaagttttttctatatataaatataaaaggtaaaatgccagggatcacactaggagacacggtgccgaacctagaagtggagacgacacatgacaagttcaaacttcatgactacttcgccaattcttggaccgtcctcttctctcatcccggggatttcacacccgtgtgcaccacggagcttggtgcgatggccaaatacgctcatgagttcgataagagaggcgtgaagctccttggtctgtcttgtgacgatgtacagtcacacaaagactggatcaaagatattgaagcctttaatcacggaagcaaggtgaattacccgataatcgctgacccgaacaaagagatcattcctcagcttaacatgattgatccaattgagaacggaccgtctcgtgcccttcatattgttggtcctgacagtaagataaaattgagcttcttgtatccgtcgaccacgggacgtaacatggacgaagtattgagggctttagactcgttgttgatggcgtccaagcacaataacaagatcgccactccggttaactggaagccagatcaaccggttgtgatttcgcctgctgtgtcggacgaggaagccaaaaagatgttcccacagggtttcaagaccgccgatcttccgtcaaagaaaggctatctgcgtcacacagaggtctcttgaaaagataataacaaaagcctactatataacgtacatgcaagtattgtatgatattaatgtttttacgtacgtgtaaacaaaaataattacgtttgtaacgtatggtgatgatgtggtgcactaggtgtaggccttgtattaataaaaagaagtttgttctatatagagtggtttagtacgacgatttatttact

SEQ ID NO: 100217 - protein, 252 aa, Arabidopsis thaliana
  peptide (1)..(252): Ceres Seq. ID no. 13604609
WRSLFNRSSTQLQLLLHPFTSNQYRKFFLYINIKGKMPGITLGDTVPNLEVETTHDKFKLHDYFANSWTVLFSHPGDFTPVCTTELGAMAKYAHEFDKRGVKLLGLSCDDVQSHKDWIKDIEAFNHGSKVNYPIIADPNKEIIPQLNMIDPIENGPSRALHIVGPDSKIKLSFLYPSTTGRNMDEVLRALDSLLMASKHNNKIATPVNWKPDQPVVISPAVSDEEAKKMFPQGFKTADLPSKKGYLRHTEVS

SEQ ID NO: 100218 - protein, 216 aa, Arabidopsis thaliana
  peptide (1)..(216): Ceres Seq. ID no. 13604610
MPGITLGDTVPNLEVETTHDKFKLHDYFANSWTVLFSHPGDFTPVCTTELGAMAKYAHEFDKRGVKLLGLSCDDVQSHKDWIKDIEAFNHGSKVNYPIIADPNKEIIPQLNMIDPIENGPSRALHIVGPDSKIKLSFLYPSTTGRNMDEVLRALDSLLMASKHNNKIATPVNWKPDQPVVISPAVSDEEAKKMFPQGFKTADLPSKKGYLRHTEVS

SEQ ID NO: 100219 - protein, 164 aa, Arabidopsis thaliana
  peptide (1)..(164): Ceres Seq. ID no. 13604611
MAKYAHEFDKRGVKLLGLSCDDVQSHKDWIKDIEAFNHGSKVNYPIIADPNKEIIPQLNMIDPIENGPSRALHIVGPDSKIKLSFLYPSTTGRNMDEVLRALDSLLMASKHNNKIATPVNWKPDQPVVISPAVSDEEAKKMFPQGFKTADLPSKKGYLRHTEVS

SEQ ID NO: 100220 - DNA, 2290 bp, Arabidopsis thaliana
  misc_feature (1)..(2290): Ceres Seq. ID no. 13604637
  misc_feature (1)..(2290): Ortholog of  Ceres SEQ ID NO 13586013 as cited in SEQ ID NO 1182
catcgctgttccagacagcgatgactcgagaaccggagtattccattctctcattaacggattctctaaagtgcgccaagcgtgcgcaagagccatcatgtcctacgcatctctcagcgtcaaggacctgaccagccttgtttcaagatccggaaccggttcgtcttcttcgctcaagcctccgggtcagacccgccccgtcaaggtcatcccgcttcagcatcctgacacctccaatgaagctcgtcctccttcgattcctttcgacgatatcttctccggatggacggcgaagatcaagcgcatgaggctcgtcgattggattgatactctctttccttgtttccgatggattcgaacttaccgatggagcgagtattttaagctcgatctcatggctggtatcaccgtcggtataatgcttgttccccaggcaatgtcgtatgcgaaactagctggccttccaccaatttacggtctatactcttcatttgtgccggtatttgtctatgccatatttggctcatcccgtcagcttgcaattggacctgtagcattggtttctcttctcgtctctaatgctttgggtggaatcgctgatacgaacgaggaattacatattgaattggccattttgttggcgcttttagttggaatcttggagtgcatcatggggctcttaaggcttggatggcttattcgtttcattagtcactcagtcatatctggatttacaagtgcttcggccattgtgattgggttatctcaaataaaatatttcctggggtatagcattgcccggagcagcaagattgtgccaatagtagagagcataatagctggagctgataagtttcagtggccacctttcgtgatgggatctcttattctggtgattcttcaagtgatgaaacatgtgggaaaagccaaaaaggaacttcagttcttacgagcagcagcgccactcaccgggattgtgctcggtacaaccattgcaaaagtgtttcatccgccttccatctctctggtgggagaaatacctcagggccttccaacattttctttcccaagaagttttgatcatgcaaaaacgttgcttccaacatcagctctcattactggtgttgccatcttggaatctgtgggaattgccaaagcgcttgcggcaaaaaacagatatgagttggattcaaattcagagttgtttggtcttggtgttgcaaatatattggggtcattattttctgcatacccagctacaggatccttttctaggtcagctgtgaataatgaaagtgaagctaagactggcctatcagggcttataacaggaatcatcattggatgttctctactgttcttgacaccgatgtttaaatacataccacagtgtgctttggcagcaatagtgatatctgccgttagtggcttggtggactatgacgaagctattttcctctggcgtgtggacaagagggatttttcgctttggaccatcactagcaccataacattgttcttcggaatagagatcggtgtccttgttggtgttggtttttcactagcattcgttatccacgagtctgcaaaccctcacattgctgtcttggggcggcttccaggcaccactgtgtacagaaacataaagcagtatccagaggcttacacatacaacgggattgtgatagttcgaatcgattctcctatttactttgccaacataagttacatcaaggacagactacgagaatatgaagtagctgttgacaaatacacaaaccggggactggaggtggatagaataaattttgtaatcctggaaatgtctcctgttacacacatagattcgagcgcagtggaagccttgaaagaactgtatcaagagtataaaacaagggatattcagctagcgatatcaaacccgaacaaagatgttcacttgacaatagcaagatcaggaatggtggagctagttggcaaggaatggttctttgtgagagtacacgacgccgtacaggtgtgtctacaatacgtacagagctctaacttggaggacaagcatttaagttttacgagacgatatggtgggagcaacaacaattcatcctcctccaacgcgctgttgaaggagccattgttatcagtggagaaataaaggatatgtaatgtaagtaatagctgtgtatagtttgttgcgattttgtaaaaacagtatacaatcttcattgtatcacctatataacaacattcttactcttcttttcccacaataaaaatagaccttgatgac

SEQ ID NO: 100221 - protein, 717 aa, Arabidopsis thaliana
  peptide (1)..(717): Ceres Seq. ID no. 13604638
IAVPDSDDSRTGVFHSLINGFSKVRQACARAIMSYASLSVKDLTSLVSRSGTGSSSSLKPPGQTRPVKVIPLQHPDTSNEARPPSIPFDDIFSGWTAKIKRMRLVDWIDTLFPCFRWIRTYRWSEYFKLDLMAGITVGIMLVPQAMSYAKLAGLPPIYGLYSSFVPVFVYAIFGSSRQLAIGPVALVSLLVSNALGGIADTNEELHIELAILLALLVGILECIMGLLRLGWLIRFISHSVISGFTSASAIVIGLSQIKYFLGYSIARSSKIVPIVESIIAGADKFQWPPFVMGSLILVILQVMKHVGKAKKELQFLRAAAPLTGIVLGTTIAKVFHPPSISLVGEIPQGLPTFSFPRSFDHAKTLLPTSALITGVAILESVGIAKALAAKNRYELDSNSELFGLGVANILGSLFSAYPATGSFSRSAVNNESEAKTGLSGLITGIIIGCSLLFLTPMFKYIPQCALAAIVISAVSGLVDYDEAIFLWRVDKRDFSLWTITSTITLFFGIEIGVLVGVGFSLAFVIHESANPHIAVLGRLPGTTVYRNIKQYPEAYTYNGIVIVRIDSPIYFANISYIKDRLREYEVAVDKYTNRGLEVDRINFVILEMSPVTHIDSSAVEALKELYQEYKTRDIQLAISNPNKDVHLTIARSGMVELVGKEWFFVRVHDAVQVCLQYVQSSNLEDKHLSFTRRYGGSNNNSSSSNALLKEPLLSVEK

SEQ ID NO: 100222 - protein, 685 aa, Arabidopsis thaliana
  peptide (1)..(685): Ceres Seq. ID no. 13604639
MSYASLSVKDLTSLVSRSGTGSSSSLKPPGQTRPVKVIPLQHPDTSNEARPPSIPFDDIFSGWTAKIKRMRLVDWIDTLFPCFRWIRTYRWSEYFKLDLMAGITVGIMLVPQAMSYAKLAGLPPIYGLYSSFVPVFVYAIFGSSRQLAIGPVALVSLLVSNALGGIADTNEELHIELAILLALLVGILECIMGLLRLGWLIRFISHSVISGFTSASAIVIGLSQIKYFLGYSIARSSKIVPIVESIIAGADKFQWPPFVMGSLILVILQVMKHVGKAKKELQFLRAAAPLTGIVLGTTIAKVFHPPSISLVGEIPQGLPTFSFPRSFDHAKTLLPTSALITGVAILESVGIAKALAAKNRYELDSNSELFGLGVANILGSLFSAYPATGSFSRSAVNNESEAKTGLSGLITGIIIGCSLLFLTPMFKYIPQCALAAIVISAVSGLVDYDEAIFLWRVDKRDFSLWTITSTITLFFGIEIGVLVGVGFSLAFVIHESANPHIAVLGRLPGTTVYRNIKQYPEAYTYNGIVIVRIDSPIYFANISYIKDRLREYEVAVDKYTNRGLEVDRINFVILEMSPVTHIDSSAVEALKELYQEYKTRDIQLAISNPNKDVHLTIARSGMVELVGKEWFFVRVHDAVQVCLQYVQSSNLEDKHLSFTRRYGGSNNNSSSSNALLKEPLLSVEK

SEQ ID NO: 100223 - protein, 616 aa, Arabidopsis thaliana
  peptide (1)..(616): Ceres Seq. ID no. 13604640
MRLVDWIDTLFPCFRWIRTYRWSEYFKLDLMAGITVGIMLVPQAMSYAKLAGLPPIYGLYSSFVPVFVYAIFGSSRQLAIGPVALVSLLVSNALGGIADTNEELHIELAILLALLVGILECIMGLLRLGWLIRFISHSVISGFTSASAIVIGLSQIKYFLGYSIARSSKIVPIVESIIAGADKFQWPPFVMGSLILVILQVMKHVGKAKKELQFLRAAAPLTGIVLGTTIAKVFHPPSISLVGEIPQGLPTFSFPRSFDHAKTLLPTSALITGVAILESVGIAKALAAKNRYELDSNSELFGLGVANILGSLFSAYPATGSFSRSAVNNESEAKTGLSGLITGIIIGCSLLFLTPMFKYIPQCALAAIVISAVSGLVDYDEAIFLWRVDKRDFSLWTITSTITLFFGIEIGVLVGVGFSLAFVIHESANPHIAVLGRLPGTTVYRNIKQYPEAYTYNGIVIVRIDSPIYFANISYIKDRLREYEVAVDKYTNRGLEVDRINFVILEMSPVTHIDSSAVEALKELYQEYKTRDIQLAISNPNKDVHLTIARSGMVELVGKEWFFVRVHDAVQVCLQYVQSSNLEDKHLSFTRRYGGSNNNSSSSNALLKEPLLSVEK

SEQ ID NO: 100224 - DNA, 2981 bp, Arabidopsis thaliana
  misc_feature (1)..(2981): Ceres Seq. ID no. 13604656
  misc_feature (1)..(2981): Ortholog of  Ceres SEQ ID NO 13657677 as cited in SEQ ID NO 66119
tgagggaaagatagagaatggataatggagggagcgtgttgtcgctctctgctccacacttcccttactccgccaccattctccgacgtcactctccggtggcttccatatctttctcccttaagcaaccaccaccgcaaccaccagaacctcctgagagtcctcctgacctccgccgcccggagaaatctattggttcttcttcatcttcttcctctccttccccctatcccttctcctaaaacccctcttaagattaatccactcaagggtttaaccaatcgctcttctgtgtctcctcttgttcaatcagaggtttcgagtaaagtttcttcctttggctcctctctagcatccaagctacgtttgtccagcaagctctctcctcctcctcctcctccacctccgcctcctgttgaggaaaccacccaattccgagatgagtttcggagtgacacgaaaccaccggaagaagaaactcgaaacccgcaacaggaattccgacaagaagggaagatattcgttggtaatttaccgacatggataaagaaaccagagtttgaagagttcttccgacagttcggaccgatagagaatgtgattctaatcaaaggacatcacgaggtcgagaaaaacgcgggatttgggttcattatttacgcggcagagaagtctgcaatgaaagctgtggagttcgacggcgttgagtttcacggcaggatattgacggtgaagctagacgacggaaagaggctgaaaacaaaggctgaacagagagtgaggtgggtagaggaaggagaagaagacacgaaaatgtctaataagtcgtcgtggcatcaagagagagaagggtctcgaaagtcactacagaggattttagataccaatggagataactggcaagctgttatttcagctttcgagaagatcagcaagccttcgaggacagagtttggtttgatggtgaagttctatggaagaagaggggatatgcatcgtgcacgtgagacttttgagagaatgcgcgcgaggggtatcacaccaacatcacgtatatacacaagccttattcacgcttatgcagttggtagagacatggacgaagcactgtcttgtgttcgtaaaatgaaggaagaaggaattgagatgagtttggtgacttatagtgtaatcgttggaggattctctaaagcgggacatgccgactgcagattactggtttgacgaggccaaacggatacacaaaacccttaatgccagtatatatggaaaaatcatatatgcacactgtcagacgtgcaatatggagcgggcagaggcattggtgagggagatggaagaagaaggtattgatgctcctattgctatctaccacaccatgatggatggttatacaatggtcgctgatgagaagaaaggcttagttgttttcaaaagacttaaggaatgtggatttactccaacagttgttacttatgggtgcctcattaatctttatactaaggttggaaagatttcaaaagccttggaagttagtagagtgatgaaggaagagggcgtaaagcataatttaaagacttattcgatgatgattaacggatttgtaaaactaaaagattgggccaatgcgtttgctgtatttgaagatatggtaaaagaaggcatgaaaccagatgttatactatacaacaacatcatctcagcattctgcgggatgggtaacatggatcgagcgatccagactgttaaggagatgcaaaagctgaggcatagaccaaccacacggacatttatgcctatcatacatggatatgcgaaatccggagacatgaggagatcactagaagtttttgatatgatgagacgatgtgggtgtgttccaaccgttcatactttcaatggtttgattaatggtttagttgagaaacgtcagatggaaaaggcggttgagatattagacgagatgacattggcgggtgtaagtgcaaacgaacatacttacacaaagatcatgcaaggctatgcatcagtcggtgataccggaaaagcctttgagtattttacaaggcttcaaaacgaaggtttggatgttgacattttcacttacgaggcgttacttaaagcttgctgcaaatcaggaagaatgcagagcgcattagctgtcacgaaagaaatgagtgcacggaatatcccgcgcaattccttcgtctataacatattaatcgacggatgggcacgaagaggcgatgtatgggaagccgcggatttgatacagcagatgaaaaaagaaggtgttaaacccgacattcatacttacacatccttcattagcgcttgttctaaggccggcgacatgaatagagctacacaaacaatcgaagaaatggaagcactaggtgtgaaacctaacatcaagacatacacgaccttaataaaaggatgggcgagagcatctcttccagagaaagccttaagttgctacgaggaaatgaaggcgatggggataaaacccgacaaagctgtgtatcattgccttctgacttcgcttctgtcgcgtgcttcaatcgcagaagcttacatttactcaggagtgatgactatctgcaaggaaatggtggaggcaggcttgattgttgatatgggaactgcggttcactggtctaaatgtctgtgtaagattgaagcttcaggtggtgagctcactgagacgttgcagaagactttcccacctgattggagctcgcatcatcatcaccatggcttcttagatcaagtttctgatgttgactccgatgaagatgatgttgatggtgaagatggtgaggacgatgaagatgttaactctgtttcggatttattatcaccttacaagtaagaaaaaactgatattgtaacaacttaaggaaagagcaatatcagcatatttttgtaattttgttttcttgtgttttacgtttttgcaaaataaaccttattgaacc

SEQ ID NO: 100225 - protein, 558 aa, Arabidopsis thaliana
  peptide (1)..(558): Ceres Seq. ID no. 13604657
MPTADYWFDEAKRIHKTLNASIYGKIIYAHCQTCNMERAEALVREMEEEGIDAPIAIYHTMMDGYTMVADEKKGLVVFKRLKECGFTPTVVTYGCLINLYTKVGKISKALEVSRVMKEEGVKHNLKTYSMMINGFVKLKDWANAFAVFEDMVKEGMKPDVILYNNIISAFCGMGNMDRAIQTVKEMQKLRHRPTTRTFMPIIHGYAKSGDMRRSLEVFDMMRRCGCVPTVHTFNGLINGLVEKRQMEKAVEILDEMTLAGVSANEHTYTKIMQGYASVGDTGKAFEYFTRLQNEGLDVDIFTYEALLKACCKSGRMQSALAVTKEMSARNIPRNSFVYNILIDGWARRGDVWEAADLIQQMKKEGVKPDIHTYTSFISACSKAGDMNRATQTIEEMEALGVKPNIKTYTTLIKGWARASLPEKALSCYEEMKAMGIKPDKAVYHCLLTSLLSRASIAEAYIYSGVMTICKEMVEAGLIVDMGTAVHWSKCLCKIEASGGELTETLQKTFPPDWSSHHHHHGFLDQVSDVDSDEDDVDGEDGEDDEDVNSVSDLLSPYK

SEQ ID NO: 100226 - protein, 523 aa, Arabidopsis thaliana
  peptide (1)..(523): Ceres Seq. ID no. 13604658
MERAEALVREMEEEGIDAPIAIYHTMMDGYTMVADEKKGLVVFKRLKECGFTPTVVTYGCLINLYTKVGKISKALEVSRVMKEEGVKHNLKTYSMMINGFVKLKDWANAFAVFEDMVKEGMKPDVILYNNIISAFCGMGNMDRAIQTVKEMQKLRHRPTTRTFMPIIHGYAKSGDMRRSLEVFDMMRRCGCVPTVHTFNGLINGLVEKRQMEKAVEILDEMTLAGVSANEHTYTKIMQGYASVGDTGKAFEYFTRLQNEGLDVDIFTYEALLKACCKSGRMQSALAVTKEMSARNIPRNSFVYNILIDGWARRGDVWEAADLIQQMKKEGVKPDIHTYTSFISACSKAGDMNRATQTIEEMEALGVKPNIKTYTTLIKGWARASLPEKALSCYEEMKAMGIKPDKAVYHCLLTSLLSRASIAEAYIYSGVMTICKEMVEAGLIVDMGTAVHWSKCLCKIEASGGELTETLQKTFPPDWSSHHHHHGFLDQVSDVDSDEDDVDGEDGEDDEDVNSVSDLLSPYK

SEQ ID NO: 100227 - protein, 513 aa, Arabidopsis thaliana
  peptide (1)..(513): Ceres Seq. ID no. 13604659
MEEEGIDAPIAIYHTMMDGYTMVADEKKGLVVFKRLKECGFTPTVVTYGCLINLYTKVGKISKALEVSRVMKEEGVKHNLKTYSMMINGFVKLKDWANAFAVFEDMVKEGMKPDVILYNNIISAFCGMGNMDRAIQTVKEMQKLRHRPTTRTFMPIIHGYAKSGDMRRSLEVFDMMRRCGCVPTVHTFNGLINGLVEKRQMEKAVEILDEMTLAGVSANEHTYTKIMQGYASVGDTGKAFEYFTRLQNEGLDVDIFTYEALLKACCKSGRMQSALAVTKEMSARNIPRNSFVYNILIDGWARRGDVWEAADLIQQMKKEGVKPDIHTYTSFISACSKAGDMNRATQTIEEMEALGVKPNIKTYTTLIKGWARASLPEKALSCYEEMKAMGIKPDKAVYHCLLTSLLSRASIAEAYIYSGVMTICKEMVEAGLIVDMGTAVHWSKCLCKIEASGGELTETLQKTFPPDWSSHHHHHGFLDQVSDVDSDEDDVDGEDGEDDEDVNSVSDLLSPYK

SEQ ID NO: 100228 - DNA, 2526 bp, Arabidopsis thaliana
  misc_feature (1)..(2526): Ceres Seq. ID no. 13604660
  misc_feature (1)..(2526): Ortholog of  Ceres SEQ ID NO 14307904 as cited in SEQ ID NO 66440
  misc_feature (1)..(2526): Ortholog of  Ceres SEQ ID NO 13659971 as cited in SEQ ID NO 67565
  misc_feature (1)..(2526): Ortholog of  Ceres SEQ ID NO 13500385 as cited in SEQ ID NO 67583
aagtgtagtgctattaaactatcccttttattttcccacccaactcaatttattttctcattctttctctttactcttcttcagatctctctgtttctttctttgttgttgttatctggggatgctttctactctctgtttggtttccttcattgtgactttctattttctgggtttgtttcaagtcatgatttttccgatacccttttgatttttcttgctatttctcacctctgtataagcaagctctctgctgtttctcctcatccaagttgggtttatcagttcagctgtgtagaaattcaatcgtctgagaagtccgaggtttgatgtctgatggttttaagatcgaaaggatttgacttttatcagattagtaatgagattagattgtttttgaggttattgtaatcagatcttgatgctatttctggtgaaagagatttaagacaagttagggaatgggtaatacttgtgttggaccaagcagaaatggcttcttgcaatctgtttcagctgcaatgtggcggccaagagatggagatgattcggcttccatgagtaatggagatattgcaagtgaagctgtttcgggagagcttcgatctcgattatctgatgaagtccagaataaacctcctgaacaggtcacaatgccgaagccagggactgacgtcgagaccaaggacagagagattcgaactgaaagcaagcctgaaacgctagaggagataagccttgagtccaaaccagagactaagcaggagaccaagtcagagaccaagccggagtcaaaacctgatcctccagctaaacctaagaagcctaaacacatgaagagagtgtcaagtgcagggcttaggactgagtcagtgttgcagaggaagactgaaaacttcaaggaattctattccttgggaaggaaactcggacaagggcaatttgggacgacttttttatgtgtcgagaagactacggggaaggagtttgcctgcaagtcgattgctaagaggaagctattgactgatgaggacgttgaggatgtgagaagagaaattcagataatgcatcacttggctggtcaccctaatgtcatctccatcaaaggagcttatgaggatgttgtggcagtgcaccttgtaatggagtgttgtgcaggcggcgagctttttgacaggatcattcaacgcggtcactacacagagaggaaagcggctgagctcactagaaccattgttggggttgtagaggcttgccattctcttggtgttatgcatcgagacctcaagcccgagaattttctgtttgtcagtaaacacgaagattccctcttgaagacgattgattttggactctccatgttctttaaaccagacgatgtttttacagatgttgttggtagcccatattatgttgccccagaagttcttcgaaagcgttatggccctgaagctgatgtctggagtgctggagtgattgtgtacattttattaagcggagttcctccattctgggctgaaaccgaacaaggtattttcgaacaggtcctccacggtgatcttgacttttcgtccgatccatggccaagtatatctgaaagtgcaaaggatttagtgaggaaaatgcttgtcagggatcccaagaaaaggttaactgcccaccaagtattatgtcatccatgggttcaagtcgacggtgtggctccagacaagcctttggattctgctgttctgagccgtatgaagcagttttctgcaatgaacaagttcaagaaaatggctcttagagtcattgctgagagcttatctgaagaagaaatcgccggcttgaaagaaatgtttaatatgatagatgcggacaagagtggtcagataactttcgaagaactgaaagcaggactaaaacgagtaggggcgaatctcaaagagtctgaaattctcgacttgatgcaagctgctgatgtggacaacagcggaacaatagattacaaagagttcatagctgcaacattacatctaaacaaaatagagagagaggaccatttgtttgcagcctttacatactttgacaaagatgggagcggctatatcaccccagacgagcttcaacaagcttgtgaggagtttggtgttgaggatgtccgcatagaagaactgatgcgcgatgttgatcaagacaatgacgggcgaatagactacaacgagtttgtggcgatgatgcagaaaggaagcatcacaggaggacctgtgaaaatgggtctagagaaaagctttagcattgctcttaaactctagtttctcagtctatttaaaagtacaaaactaaagccaagaagacaaaagagttttctgataatatataccattttgattatgttgaagacatatgcacacagccaagattctctcttgccctcttttggattctctcaatcttttggatgaggttttgtcttagacttgttttggaaactttgttgtattgtgttacttcttgagcatatatagtcttctaacattacaaacc

SEQ ID NO: 100229 - protein, 610 aa, Arabidopsis thaliana
  peptide (1)..(610): Ceres Seq. ID no. 13604661
MGNTCVGPSRNGFLQSVSAAMWRPRDGDDSASMSNGDIASEAVSGELRSRLSDEVQNKPPEQVTMPKPGTDVETKDREIRTESKPETLEEISLESKPETKQETKSETKPESKPDPPAKPKKPKHMKRVSSAGLRTESVLQRKTENFKEFYSLGRKLGQGQFGTTFLCVEKTTGKEFACKSIAKRKLLTDEDVEDVRREIQIMHHLAGHPNVISIKGAYEDVVAVHLVMECCAGGELFDRIIQRGHYTERKAAELTRTIVGVVEACHSLGVMHRDLKPENFLFVSKHEDSLLKTIDFGLSMFFKPDDVFTDVVGSPYYVAPEVLRKRYGPEADVWSAGVIVYILLSGVPPFWAETEQGIFEQVLHGDLDFSSDPWPSISESAKDLVRKMLVRDPKKRLTAHQVLCHPWVQVDGVAPDKPLDSAVLSRMKQFSAMNKFKKMALRVIAESLSEEEIAGLKEMFNMIDADKSGQITFEELKAGLKRVGANLKESEILDLMQAADVDNSGTIDYKEFIAATLHLNKIEREDHLFAAFTYFDKDGSGYITPDELQQACEEFGVEDVRIEELMRDVDQDNDGRIDYNEFVAMMQKGSITGGPVKMGLEKSFSIALKL

SEQ ID NO: 100230 - protein, 590 aa, Arabidopsis thaliana
  peptide (1)..(590): Ceres Seq. ID no. 13604662
MWRPRDGDDSASMSNGDIASEAVSGELRSRLSDEVQNKPPEQVTMPKPGTDVETKDREIRTESKPETLEEISLESKPETKQETKSETKPESKPDPPAKPKKPKHMKRVSSAGLRTESVLQRKTENFKEFYSLGRKLGQGQFGTTFLCVEKTTGKEFACKSIAKRKLLTDEDVEDVRREIQIMHHLAGHPNVISIKGAYEDVVAVHLVMECCAGGELFDRIIQRGHYTERKAAELTRTIVGVVEACHSLGVMHRDLKPENFLFVSKHEDSLLKTIDFGLSMFFKPDDVFTDVVGSPYYVAPEVLRKRYGPEADVWSAGVIVYILLSGVPPFWAETEQGIFEQVLHGDLDFSSDPWPSISESAKDLVRKMLVRDPKKRLTAHQVLCHPWVQVDGVAPDKPLDSAVLSRMKQFSAMNKFKKMALRVIAESLSEEEIAGLKEMFNMIDADKSGQITFEELKAGLKRVGANLKESEILDLMQAADVDNSGTIDYKEFIAATLHLNKIEREDHLFAAFTYFDKDGSGYITPDELQQACEEFGVEDVRIEELMRDVDQDNDGRIDYNEFVAMMQKGSITGGPVKMGLEKSFSIALKL

SEQ ID NO: 100231 - protein, 578 aa, Arabidopsis thaliana
  peptide (1)..(578): Ceres Seq. ID no. 13604663
MSNGDIASEAVSGELRSRLSDEVQNKPPEQVTMPKPGTDVETKDREIRTESKPETLEEISLESKPETKQETKSETKPESKPDPPAKPKKPKHMKRVSSAGLRTESVLQRKTENFKEFYSLGRKLGQGQFGTTFLCVEKTTGKEFACKSIAKRKLLTDEDVEDVRREIQIMHHLAGHPNVISIKGAYEDVVAVHLVMECCAGGELFDRIIQRGHYTERKAAELTRTIVGVVEACHSLGVMHRDLKPENFLFVSKHEDSLLKTIDFGLSMFFKPDDVFTDVVGSPYYVAPEVLRKRYGPEADVWSAGVIVYILLSGVPPFWAETEQGIFEQVLHGDLDFSSDPWPSISESAKDLVRKMLVRDPKKRLTAHQVLCHPWVQVDGVAPDKPLDSAVLSRMKQFSAMNKFKKMALRVIAESLSEEEIAGLKEMFNMIDADKSGQITFEELKAGLKRVGANLKESEILDLMQAADVDNSGTIDYKEFIAATLHLNKIEREDHLFAAFTYFDKDGSGYITPDELQQACEEFGVEDVRIEELMRDVDQDNDGRIDYNEFVAMMQKGSITGGPVKMGLEKSFSIALKL

SEQ ID NO: 100232 - DNA, 1937 bp, Arabidopsis thaliana
  misc_feature (1)..(1937): Ceres Seq. ID no. 13604664
  misc_feature (1)..(1937): Ortholog of  Ceres SEQ ID NO 13594037 as cited in SEQ ID NO 55666
  misc_feature (1)..(1937): Ortholog of  Ceres SEQ ID NO 13657707 as cited in SEQ ID NO 66407
actcgagaacatcaaaaacatttgatcacacaaaacttcaatatctcacaaacgagaggccggttaggaggaaattacaaaaatgtcctcctacggcagactcgacgagcatgagcaagcgaaacttgaggcaagtcggaagacaaagaagagaattgccatcatcgctatatcttccatcgttctcgtctgcattgtcgtcggagccgtcgttggaaccacagctcgcgataacagcaagaaaccaccgacggagaataacggagagccaatatcagtctccgtgaaagccctgtgcgacgtgacattgcacaaagaaaaatgtttcgagacccttggatcggctccaaacgcgagccgatcaagcccagaggagcttttcaagtacgccgtcaaagtcaccatcacggagctctcgaaagttctcgacggattctccaacggcgaacacatggataacgccacgtcagcagcaatgggggcttgcgtggagcttatcgggctagccgttgatcaactcaacgaaacaatgacgtcgtccttgaagaactttgacgatctaaggacgtggcttagctccgtgggaacgtaccaagaaacgtgtatggatgcgttagtggaagcgaacaaaccaagtttaacgactttcggagaaaaccatttgaaaaactcgacggagatgactagcaatgcgttagcgatcataacgtggctagggaaaatcgctgacaccgttaagtttagacgacgtcgtttgttggagactggtaacgccaaagtcgttgtagctgacttgccgatgatggaaggtcggagacttttggagagtggtgatttgaagaagaaagcgactatcgtggtggctaaagacgggtcggggaaatatcggacgattggtgaggctttagcggaagtggaggagaagaatgagaaacctacgattatatatgtgaagaaaggagtttatttagagaatgttagggttgagaagacgaaatggaatgttgtgatggttggagatggacaaagtaagactatcgtctctgctggactcaacttcatcgatggaacccccactttcgaaaccgccacatttgctgtgtttggaaaggggttcatggctagggacatgggcttcattaacacagctggtccagctaagcatcaagccgtagctctaatggtaagcgcagacttatctgtgttctacaagtgcaccatggacgctttccaagatacaatgtacgctcatgcacaacgtcagttttaccgtgattgtgttatcctcggaaccgttgattttatatttggaaacgctgcggttgtattccaaaagtgcgagatcttgcctcgtcgtcctatgaaaggccagcagaatacaataaccgctcagggccggaaagatccgaaccaaaacacaggaatttctatccacaattgtactatcaagcctttggataacttaaccgatatccaaacattcctaggccggccttggaaggatttctctacaacggttatcatgaagtcgttcatggacaaattcatcaacccgaaagggtggttaccgtggacaggagataccgcgccagacacgatcttttacgccgagtacttaaattccgggccaggagcatcgaccaagaaccgggttaagtggcaagggttgaagacgtctttaacaaagaaggaagcaaataagtttacggtgaaaccttttatagacggcaataactggttgccggctaccaaagttcccttcaactctgatttttgatattttttgctggaaaaggctggtctgaaaactgatgcatggctagtcgttctttaatttgtttataacgaacatacaacattcccttctaaaacattttcttgtattggctttatttcaaagtgtctgaatttgtttctatatattcatataatttcgg

SEQ ID NO: 100233 - protein, 564 aa, Arabidopsis thaliana
  peptide (1)..(564): Ceres Seq. ID no. 13604665
MSSYGRLDEHEQAKLEASRKTKKRIAIIAISSIVLVCIVVGAVVGTTARDNSKKPPTENNGEPISVSVKALCDVTLHKEKCFETLGSAPNASRSSPEELFKYAVKVTITELSKVLDGFSNGEHMDNATSAAMGACVELIGLAVDQLNETMTSSLKNFDDLRTWLSSVGTYQETCMDALVEANKPSLTTFGENHLKNSTEMTSNALAIITWLGKIADTVKFRRRRLLETGNAKVVVADLPMMEGRRLLESGDLKKKATIVVAKDGSGKYRTIGEALAEVEEKNEKPTIIYVKKGVYLENVRVEKTKWNVVMVGDGQSKTIVSAGLNFIDGTPTFETATFAVFGKGFMARDMGFINTAGPAKHQAVALMVSADLSVFYKCTMDAFQDTMYAHAQRQFYRDCVILGTVDFIFGNAAVVFQKCEILPRRPMKGQQNTITAQGRKDPNQNTGISIHNCTIKPLDNLTDIQTFLGRPWKDFSTTVIMKSFMDKFINPKGWLPWTGDTAPDTIFYAEYLNSGPGASTKNRVKWQGLKTSLTKKEANKFTVKPFIDGNNWLPATKVPFNSDF

SEQ ID NO: 100234 - protein, 441 aa, Arabidopsis thaliana
  peptide (1)..(441): Ceres Seq. ID no. 13604666
MDNATSAAMGACVELIGLAVDQLNETMTSSLKNFDDLRTWLSSVGTYQETCMDALVEANKPSLTTFGENHLKNSTEMTSNALAIITWLGKIADTVKFRRRRLLETGNAKVVVADLPMMEGRRLLESGDLKKKATIVVAKDGSGKYRTIGEALAEVEEKNEKPTIIYVKKGVYLENVRVEKTKWNVVMVGDGQSKTIVSAGLNFIDGTPTFETATFAVFGKGFMARDMGFINTAGPAKHQAVALMVSADLSVFYKCTMDAFQDTMYAHAQRQFYRDCVILGTVDFIFGNAAVVFQKCEILPRRPMKGQQNTITAQGRKDPNQNTGISIHNCTIKPLDNLTDIQTFLGRPWKDFSTTVIMKSFMDKFINPKGWLPWTGDTAPDTIFYAEYLNSGPGASTKNRVKWQGLKTSLTKKEANKFTVKPFIDGNNWLPATKVPFNSDF

SEQ ID NO: 100235 - protein, 433 aa, Arabidopsis thaliana
  peptide (1)..(433): Ceres Seq. ID no. 13604667
MGACVELIGLAVDQLNETMTSSLKNFDDLRTWLSSVGTYQETCMDALVEANKPSLTTFGENHLKNSTEMTSNALAIITWLGKIADTVKFRRRRLLETGNAKVVVADLPMMEGRRLLESGDLKKKATIVVAKDGSGKYRTIGEALAEVEEKNEKPTIIYVKKGVYLENVRVEKTKWNVVMVGDGQSKTIVSAGLNFIDGTPTFETATFAVFGKGFMARDMGFINTAGPAKHQAVALMVSADLSVFYKCTMDAFQDTMYAHAQRQFYRDCVILGTVDFIFGNAAVVFQKCEILPRRPMKGQQNTITAQGRKDPNQNTGISIHNCTIKPLDNLTDIQTFLGRPWKDFSTTVIMKSFMDKFINPKGWLPWTGDTAPDTIFYAEYLNSGPGASTKNRVKWQGLKTSLTKKEANKFTVKPFIDGNNWLPATKVPFNSDF

SEQ ID NO: 100236 - DNA, 1875 bp, Arabidopsis thaliana
  misc_feature (1)..(1875): Ceres Seq. ID no. 13604668
  misc_feature (1)..(1875): Ortholog of  Ceres SEQ ID NO 14311131 as cited in SEQ ID NO 53729
  misc_feature (1)..(1875): Ortholog of  Ceres SEQ ID NO 13594037 as cited in SEQ ID NO 55666
  misc_feature (1)..(1875): Ortholog of  Ceres SEQ ID NO 13657707 as cited in SEQ ID NO 66407
atgcaaactcattcttcatctctcgtgttcttggctcttctctgtctgtcatgggctttactagtctcaccaacacgtcctccgtcacaacctccatcacatcctccaatacagccttcgtcacagccgccaacacagcctccgtcacagccaccaacgcagcctccaacacagcctccgtcacatccaccaacacagcctccaacaccgccaccatcacagtctccatcgcagccttctccactaccaccaaacatcgcttgtaaatccactccttacccaaagctctgccgcacgatcctctccgccgttaaatcatcaccttccgatccttaccattacggaaagttcacaatgaagcaatgcctcaaacaagctcgtcgcctctccaaagtcatcaaccgctttgcccagcgcgtggaagctgatccaggtacgtcgacggtggaagaggtcagtgcggtggctgattgcggtgagctagcagagcttagcgtcgaataccttgaaacggttacggaggagctgaaagcggcggagctgatgacggctgcgctcgttgatcgtgtcacgagtcttctcggtggcgttgtgactaatcagcagacgtgcctcgacggtcttgtggacgctaagagcggatttgcgacggcgattggaacgccgttagggaatctaacgcgcctctacagtgtgtcgttggggcttgtgagtcacgcgcttaaccgtaatttgaagaggtataaaggttccaaggggaaaatctttggtggtggtaacaaacccgttcgtgaacctctcgagactttgattaaggttttacgcaaaacatgcgacaagggcaaagattgtcggaaagctaacagaaatttaggtgagctaggagagacgagcggtggatcgatcctcgtaagggaagcagtgaccgtcggtccatatgaaaccgataacttccccaccataactgaggccgttgctgccgcacctaatcacacattcccggagcaaggctacttcgtaatctatgcaagggcaggtctttacgaagaatatgttgtcatttcaaataaaaaaagaaacataatgcttattggggacggaatcaataaaactatcatttctggaaaccacagttttattgatggttggacaacgtataattcttcgacctttgcggtggtgggagaccgatttgttgcggttgatgtgacattccgaaacacagctggaccagagaagcaccaggctgtggccgtaagaaacaatgcggatggatcgacattttatcgatgtagttttgaaggctatcaagatactctttacgttcattctttgagacagttctatcgtgaatgtgatatatatgggaccatagattttatattcggaaatgcagctgccatatttcaaaactgcaacatatatgcccgaaaaccgatggcaaatcagaagaatgcagtgacagcccatggaagaactgacccaaaccagaaaactggaatctccatcattaattgtactattggagctgccccggacctcgctgctgaccccaagtcgaccatgacattccttgggcggccatggaagccttactcgaggacggtctacatacaatcatacatcagcgatgttgtccaaccggtagggtggctggaatggaatggtacaaccgggctagacacgatctcctatggtgaatatgacaattttggaccgggggctgatacaagtaaaagggtccaatggtcaggatatagcctattgaacttggtacaagccatgaacttcaccgtatataatttcactttgggagacacttggttgcctcagactgacattcccttctacggcggtttgcttcacaccgaatga

SEQ ID NO: 100237 - protein, 624 aa, Arabidopsis thaliana
  peptide (1)..(624): Ceres Seq. ID no. 13604669
MQTHSSSLVFLALLCLSWALLVSPTRPPSQPPSHPPIQPSSQPPTQPPSQPPTQPPTQPPSHPPTQPPTPPPSQSPSQPSPLPPNIACKSTPYPKLCRTILSAVKSSPSDPYHYGKFTMKQCLKQARRLSKVINRFAQRVEADPGTSTVEEVSAVADCGELAELSVEYLETVTEELKAAELMTAALVDRVTSLLGGVVTNQQTCLDGLVDAKSGFATAIGTPLGNLTRLYSVSLGLVSHALNRNLKRYKGSKGKIFGGGNKPVREPLETLIKVLRKTCDKGKDCRKANRNLGELGETSGGSILVREAVTVGPYETDNFPTITEAVAAAPNHTFPEQGYFVIYARAGLYEEYVVISNKKRNIMLIGDGINKTIISGNHSFIDGWTTYNSSTFAVVGDRFVAVDVTFRNTAGPEKHQAVAVRNNADGSTFYRCSFEGYQDTLYVHSLRQFYRECDIYGTIDFIFGNAAAIFQNCNIYARKPMANQKNAVTAHGRTDPNQKTGISIINCTIGAAPDLAADPKSTMTFLGRPWKPYSRTVYIQSYISDVVQPVGWLEWNGTTGLDTISYGEYDNFGPGADTSKRVQWSGYSLLNLVQAMNFTVYNFTLGDTWLPQTDIPFYGGLLHTE

SEQ ID NO: 100238 - protein, 506 aa, Arabidopsis thaliana
  peptide (1)..(506): Ceres Seq. ID no. 13604670
MKQCLKQARRLSKVINRFAQRVEADPGTSTVEEVSAVADCGELAELSVEYLETVTEELKAAELMTAALVDRVTSLLGGVVTNQQTCLDGLVDAKSGFATAIGTPLGNLTRLYSVSLGLVSHALNRNLKRYKGSKGKIFGGGNKPVREPLETLIKVLRKTCDKGKDCRKANRNLGELGETSGGSILVREAVTVGPYETDNFPTITEAVAAAPNHTFPEQGYFVIYARAGLYEEYVVISNKKRNIMLIGDGINKTIISGNHSFIDGWTTYNSSTFAVVGDRFVAVDVTFRNTAGPEKHQAVAVRNNADGSTFYRCSFEGYQDTLYVHSLRQFYRECDIYGTIDFIFGNAAAIFQNCNIYARKPMANQKNAVTAHGRTDPNQKTGISIINCTIGAAPDLAADPKSTMTFLGRPWKPYSRTVYIQSYISDVVQPVGWLEWNGTTGLDTISYGEYDNFGPGADTSKRVQWSGYSLLNLVQAMNFTVYNFTLGDTWLPQTDIPFYGGLLHTE

SEQ ID NO: 100239 - protein, 443 aa, Arabidopsis thaliana
  peptide (1)..(443): Ceres Seq. ID no. 13604671
MTAALVDRVTSLLGGVVTNQQTCLDGLVDAKSGFATAIGTPLGNLTRLYSVSLGLVSHALNRNLKRYKGSKGKIFGGGNKPVREPLETLIKVLRKTCDKGKDCRKANRNLGELGETSGGSILVREAVTVGPYETDNFPTITEAVAAAPNHTFPEQGYFVIYARAGLYEEYVVISNKKRNIMLIGDGINKTIISGNHSFIDGWTTYNSSTFAVVGDRFVAVDVTFRNTAGPEKHQAVAVRNNADGSTFYRCSFEGYQDTLYVHSLRQFYRECDIYGTIDFIFGNAAAIFQNCNIYARKPMANQKNAVTAHGRTDPNQKTGISIINCTIGAAPDLAADPKSTMTFLGRPWKPYSRTVYIQSYISDVVQPVGWLEWNGTTGLDTISYGEYDNFGPGADTSKRVQWSGYSLLNLVQAMNFTVYNFTLGDTWLPQTDIPFYGGLLHTE

SEQ ID NO: 100240 - DNA, 2131 bp, Arabidopsis thaliana
  misc_feature (1)..(2131): Ceres Seq. ID no. 13604679
  misc_feature (1)..(2131): Ortholog of  Ceres SEQ ID NO 13622744 as cited in SEQ ID NO 0
gcgggcttcataaatctatatacagacaaatttacacataaagaaacgcattaaaaaaactatttactcagattcagcttcttctccacgcaaagactcgcttctctttttttctcttcctgagtttggattttttttgcttgagctgaatcatgttttattctcaccagcttctagctcgaaaagctccgttgggtcagatatggatggccgctacattgcacgcgaagatcaaccggaagaaactagataagctcgatatcattcaaatctgcgaagagattttgaatccgtcggttccgatggctcttagactctccgggattcttatgggtggtgttgtgattgtttatgagaggaaagtgaagctcctattcgatgatgttaatcgctttctggttgaaattaatggagcttggcgcacaaaatctgttccggatcccactttactacctaaaggaaaaacccatgccaggaaagaggctgttacattgcctgagaacgaagaagctgattttggagattttgaacagactcgtaatgttcctaaatttggcaattacatggattttcagcagacttttatttccatgcggttagatgaatcccatgttaacaataaccccgagccagaagatcttggacagcagttccatcaagctgatgccgagaatatcacactctttgagtatcatggttcattccagaccaacaatgaaacatatgatcgttttgaaagatttgacatcgaaggagatgatgaaacacagatgaactccaatccaagagaaggcgctgaaatacctacaactctcatcccatcaccacctcgtcatcatgacattcccgaaggagtcaaccccacaagccctcagcgccaggagcaacaggagaatcgtagggacggatttgctgagcagatggaggaacaaaacataccggacaaagaggaacacgatagaccacaaccagcgaaaaagagagcaagaaagacagctacttcagcgatggattatgagcaaactattatcgctggtcatgtttaccagtcatggctccaggatacttctgacattctctgtaggggggaaaagagaaaggttcgaggaactatccggccagacatggaaagtttcaaacgtgcgaatatgccacctacacaactctttgaaaaggacagttcttacccgcctcagctttaccagctttggtcaaagaatactcaagttcttcaaacctcatcatctgaatctcgacatcctgatctccgtgcggaacaatctccagggtttgttcaggagagaatgcataaccaccatcaaacagaccatcatgagcgcagtgacacaagctcccaaaatcttgatagtcccgcagaaatactccggacagttcgtactgggaaaggtgcttcagtagaaagcatgatggctggatctcgagcaagccctgaaactattaaccgccaggctgctgatattaatgtcacgccattctattctggagatgatgtgagatccatgcctagtacaccatccgcacgtggagcagcttcaattaacaacatagagatcagctctaaaagtcgcatgcccaatagaaaaagaccaaattcctcaccaagaagaggactcgaaccagtggcggaagagagaccgtgggagcaccgtgaatatgagtttgagttttcaatgttacctgaaaaacgcttcacagccgataaagaaatactatttgaaactgcatctacacagactcaaaagccagtgtgcaatcaatcagacgagatgataacagatagcatcaaaagtcacctgaagacacactttgaaacacctggagctcctcaagtggaatctcttaacaagctcgctgttggaatggacagaaacgctgcagctaaactcttcttccaatcctgtgtgttagctactcgcggagtcatcaaggtaaaccaagcagagccttatggggacattctcattgcaagaggacccaacatgtaaggtttgatttctaaattataaaagattctggtgaaccgattatccatagttgttttgcttttcatattctagcagagagagttcgtagacttttttaagttataaagagcaagcgttctttaccc

SEQ ID NO: 100241 - protein, 617 aa, Arabidopsis thaliana
  peptide (1)..(617): Ceres Seq. ID no. 13604680
MFYSHQLLARKAPLGQIWMAATLHAKINRKKLDKLDIIQICEEILNPSVPMALRLSGILMGGVVIVYERKVKLLFDDVNRFLVEINGAWRTKSVPDPTLLPKGKTHARKEAVTLPENEEADFGDFEQTRNVPKFGNYMDFQQTFISMRLDESHVNNNPEPEDLGQQFHQADAENITLFEYHGSFQTNNETYDRFERFDIEGDDETQMNSNPREGAEIPTTLIPSPPRHHDIPEGVNPTSPQRQEQQENRRDGFAEQMEEQNIPDKEEHDRPQPAKKRARKTATSAMDYEQTIIAGHVYQSWLQDTSDILCRGEKRKVRGTIRPDMESFKRANMPPTQLFEKDSSYPPQLYQLWSKNTQVLQTSSSESRHPDLRAEQSPGFVQERMHNHHQTDHHERSDTSSQNLDSPAEILRTVRTGKGASVESMMAGSRASPETINRQAADINVTPFYSGDDVRSMPSTPSARGAASINNIEISSKSRMPNRKRPNSSPRRGLEPVAEERPWEHREYEFEFSMLPEKRFTADKEILFETASTQTQKPVCNQSDEMITDSIKSHLKTHFETPGAPQVESLNKLAVGMDRNAAAKLFFQSCVLATRGVIKVNQAEPYGDILIARGPNM

SEQ ID NO: 100242 - protein, 599 aa, Arabidopsis thaliana; identical to SEQ ID NO: 77745
  peptide (1)..(599): Ceres Seq. ID no. 13604681

SEQ ID NO: 100243 - protein, 567 aa, Arabidopsis thaliana; identical to SEQ ID NO: 77746
  peptide (1)..(567): Ceres Seq. ID no. 13604682

SEQ ID NO: 100244 - DNA, 1176 bp, Arabidopsis thaliana
  misc_feature (1)..(1176): Ceres Seq. ID no. 13604702
  misc_feature (1)..(1176): Ortholog of  Ceres SEQ ID NO 14304838 as cited in SEQ ID NO 59750
ccgttgcttcaatggcgaaagacggacctaactgggacggtctgcttaagtggagtctctctcactccgatggtactcgacctacttgccaattaagtgaggaggatcgaaaatggtttgcagaagctatgcaatcacaaacggtagatgtagtcaagcggttgaaggagattacacaggtattgcagacacctcaacaagttttggaggctcatgaagtgacccctcaagatattgaaggtttgttggatgagttgcaggaacatgttgaatcgattgatatggctaatgatcttcattccgttggaggcttggtacctcttcttggctacctcaaaaactccaatgctaatatccgggctaagtctgcagatgttgtaagcacaatagttgagaacaatcctcggagtcaagaatcagttatggaagccaatggtttagagtccttgcttttaaggtttacttcagacaccgatatgcattctcgaacacaggctctcggtgcaatatcatctttgattcgcaataataaacctgggatcacaggtttccggattgcaaatggttactctggtttaaaagatgctttggaaactgatagtgtgagatttcaaaggaaagctttaaacttgttgcattatcttctacaagagaatgactcagactccgatattgctatagaattcgggcttcaccatttgatgatgcacctcgtgtctagcttcgatgctgatgtaagagaagctgctcttcgaggattgcttgagctcgtgaaagctagaaaagactgtagtacttgtggttctagcatagtgaaaggcgatgagagactcagacagattctaaaagatcggatcaaagcaatcagccgggtcaaagcaatgagcttgtttatgtcacaagaagatctatcagccgctaaagaggagaggcagctcttagattcactatggaccacaatcttcaacgaaccttcttctctttagagacaaagatacaaagagacaaaaccgtctgtgcttccttatatcatgagtaagcactaaaaccgtcttttatgtctttggacccaccagctaaagcttgtgtctttagaacactagttaaaaggatggtaaccactgtataatgaccaaattttgattctattttgagttcaaattttctcagtttccc

SEQ ID NO: 100245 - protein, 327 aa, Arabidopsis thaliana
  peptide (1)..(327): Ceres Seq. ID no. 13604703
VASMAKDGPNWDGLLKWSLSHSDGTRPTCQLSEEDRKWFAEAMQSQTVDVVKRLKEITQVLQTPQQVLEAHEVTPQDIEGLLDELQEHVESIDMANDLHSVGGLVPLLGYLKNSNANIRAKSADVVSTIVENNPRSQESVMEANGLESLLLRFTSDTDMHSRTQALGAISSLIRNNKPGITGFRIANGYSGLKDALETDSVRFQRKALNLLHYLLQENDSDSDIAIEFGLHHLMMHLVSSFDADVREAALRGLLELVKARKDCSTCGSSIVKGDERLRQILKDRIKAISRVKAMSLFMSQEDLSAAKEERQLLDSLWTTIFNEPSSL

SEQ ID NO: 100246 - protein, 324 aa, Arabidopsis thaliana
  peptide (1)..(324): Ceres Seq. ID no. 13604704
MAKDGPNWDGLLKWSLSHSDGTRPTCQLSEEDRKWFAEAMQSQTVDVVKRLKEITQVLQTPQQVLEAHEVTPQDIEGLLDELQEHVESIDMANDLHSVGGLVPLLGYLKNSNANIRAKSADVVSTIVENNPRSQESVMEANGLESLLLRFTSDTDMHSRTQALGAISSLIRNNKPGITGFRIANGYSGLKDALETDSVRFQRKALNLLHYLLQENDSDSDIAIEFGLHHLMMHLVSSFDADVREAALRGLLELVKARKDCSTCGSSIVKGDERLRQILKDRIKAISRVKAMSLFMSQEDLSAAKEERQLLDSLWTTIFNEPSSL

SEQ ID NO: 100247 - protein, 285 aa, Arabidopsis thaliana; identical to SEQ ID NO: 88802
  peptide (1)..(285): Ceres Seq. ID no. 13604705

SEQ ID NO: 100248 - DNA, 1181 bp, Arabidopsis thaliana
  misc_feature (1)..(1181): Ceres Seq. ID no. 13604733
  misc_feature (1)..(1181): Ortholog of  Ceres SEQ ID NO 12619999 as cited in SEQ ID NO 66123
  misc_feature (1)..(1181): Ortholog of  Ceres SEQ ID NO 13656436 as cited in SEQ ID NO 69154
ctttctccgtaaagaataaatcttccagtttcttcatcacatttcttttccttattttaatcaaaacatttgtttgcatcattcacaggcaaataaaaattctccctttttcttagattgctactacttataaagtagagagtgcagatagatgtaattatcaaacgaggaagcatcattatcattatcattatcatcattactgcttcatagattcatattattgtttatctaaaagtttgcttttgtagtagttggtggttaagtaggatttgatttgatcttctagaattacagatcgagaaacagcaaatctgaggttttagaaaatgggatcttcttctgggcaaagtggatacgatctgtcttttaagatcttgttgattggtgattctggtgttggtaaaagcagtttgcttgtcagcttcatttctagctccgttgaagatcttgctcctactattggtgttgatttcaagatcaaacaattgacagtaggaggcaaaaggctaaaactcacaatctgggacacagctggacaggaacggtttagaacactgacaagctcttactacagaggcgcccaaggaatcattctcgtttatgatgtgacgagaagggagacatttacaaacttagtagatgtgtggggtaaggagattgagctttactccacaaaccaagaatgtgtaaggatgctcgttgggaacaaagtcgatagagaatctgagagaggagtaagcagagaagaagggattgctctagcaaaagaactcaactgcatgtttcttgagtgtagtgctagaactcgacaaaacgtggaacagtgtttcgaagagttggctttgaagataatggaggtacctagtctcttggaagaaggatcaagtgctgtgaagagaaacatcttgaagcagaaaccagaacaccagactaatactcaatccggctgttgcagctagtgaccctagtcgatgttgcatataaaatactcgaatctttatcttgtgtattgcaaactgaacctgattcttctctctgtggttgcctcttttgtgtgtagaacataatgtagcttcaatgtaaatttgtgggattacttgtattcttcttttgcttctgaaatgagatttgtgataataacatcatataatagaataaaccccatcaagtgttttctt

SEQ ID NO: 100249 - protein, 210 aa, Arabidopsis thaliana
  peptide (1)..(210): Ceres Seq. ID no. 13604734
MGSSSGQSGYDLSFKILLIGDSGVGKSSLLVSFISSSVEDLAPTIGVDFKIKQLTVGGKRLKLTIWDTAGQERFRTLTSSYYRGAQGIILVYDVTRRETFTNLVDVWGKEIELYSTNQECVRMLVGNKVDRESERGVSREEGIALAKELNCMFLECSARTRQNVEQCFEELALKIMEVPSLLEEGSSAVKRNILKQKPEHQTNTQSGCCS

SEQ ID NO: 100250 - DNA, 2588 bp, Arabidopsis thaliana
  misc_feature (1)..(2588): Ceres Seq. ID no. 13604735
  misc_feature (1)..(2588): Ortholog of  Ceres SEQ ID NO 13598926 as cited in SEQ ID NO 0
atggtggtgattcacggagtgtctcttactccacgcttcactcttccttctcgacctctcaacactggctttaatgccggcaattccaccctctctttcttcttcaaaaagcaccctctctctcggaagatctttgctgggaaacaatctgcggagtttgattcttcgtcacaagctatctctgcttctgagaaagtcttagtacctgataatcttgatgatgatcccagaggtttttcacagatatttgatctagaaagtcaaacaatggaatatactgaggcagtaagaacagaagaccaaacaatgaacgttgtcaaggagagaggggtgaaaccaagaatagttcccccaccgggtgatggcaagaaaatttatgagatagaccccatgttacgaacttacaacaatcatcttgattaccgttatggacagtataaaagattgcgtgaggaaatagacaagtatgagggtggtcttgaggcattctctcgtggctatgaaaagttaggattttcgcgcagtgatgccggtataacttatagagagtgggcgcctggagctaaggctgcatcacttatcggagatttcaacaactggaattctaatgcagatatcatgactcggaatgaatttggtgtttgggagatctttttgcccaacaacactgatggttcgcctgcaattcctcatggctcacgtgtaaagattcgtatggatactccatctggcattaaagactcaattcctgcttggatcaagttctcggtgcaagctccaggtgaaatcccattcaatggcatatactatgatcctccagaagaggagaagtatgtattcaaacatcctcaaccaaagagacctaagtcgctaaggatttatgaagcacatgttggcatgagtagcacggaaccaatggtcaatacgtatgctaactttagagatgatgttcttccccgcatcaaaaagcttggatataatgctgttcaaattatggccatacaagaacattcatattatgccagctttgggtaccatgtcacaaacttttttgccccaagcagtcgctgtgggaccccagaggaactaaaatcactgatagatagagctcacgagttaggcctggtagttctgatggatatcgttcatagccatgcttcaaaaaacacattggatggactgaacatgtttgatggaactgatgctcactattttcactctggacctcggggataccattggatgtgggattcacgacttttcaattatgggagctgggaagtattacgatatctcctttcaaatgcacggtggtggctagaagaatacaagtttgatggatttagatttgatggtgtaacctcaatgatgtatactcatcatggactctcggttggatttactgggaactacaccgaatactttggattggaaactgatgtggatgctgtgaattatctcatgctggttaatgatatgattcatgggctctaccctgaagcgattaccgttggtgaagatgttagtggtatgccaacattctgtattcctgtccaagatggtggcgttggatttgactaccgtttacacatggccatagctgataagtggatagaaatgctcaagaagagagatgaagactggcaaatgggcgacatcatttacacacttaccaacagaaggtggtcagagaagtgtatctcttatgctgaaagtcacgatcaagctcttgttggtgataaaacaattgccttctggttaatggacaaggatatgtatgatttcatggcagtagacagaccatcaactcctcttatcgatagaggaatagctttgcacaaaatgattaggcttataactatgggattaggcggtgaaggttacttaaattttatgggaaacgaattcggacatccagaatggattgattttcccagaggcgagcagcgtctttctgatggtagcgtgattcctggcaacaatttcagttatgacaaatgccgccgcagatttgatcttggggatgcagattatctcagataccgcggactacaagaatttgatcaggcaatgcaacatcttgaagagaattacggttttatgacttcggagcaccaattcatatcacgaaaagacgaagcagatagagtaatcgtattcgaaagaggtgatctcgtctttgtctttaactttcactggaccagcagctactttgattaccgcattggttgctccaagcctggaaaatataagatcgtattggactcggacgatcctctctttggtggattcaataggctcgatcgcaaggcagagtacttcacttatgatggcttatacgacgaacgaccctgctccttcatggtctatgcaccgtgtagaaccgccgtggtttatgctttagcaaaccacgattagaactttcagactttggatccaatatcataatcaaggaagagtgtgtgaaaaaatgtttttccttcattagagtgaagtaaagaatctggtaacgaaaaaaatgtctgtgtatacaagatcaccgaaaatgtaaagaatctggtaatggaaaatatctaaaacattaaacc

SEQ ID NO: 100251 - protein, 805 aa, Arabidopsis thaliana
  peptide (1)..(805): Ceres Seq. ID no. 13604736
MVVIHGVSLTPRFTLPSRPLNTGFNAGNSTLSFFFKKHPLSRKIFAGKQSAEFDSSSQAISASEKVLVPDNLDDDPRGFSQIFDLESQTMEYTEAVRTEDQTMNVVKERGVKPRIVPPPGDGKKIYEIDPMLRTYNNHLDYRYGQYKRLREEIDKYEGGLEAFSRGYEKLGFSRSDAGITYREWAPGAKAASLIGDFNNWNSNADIMTRNEFGVWEIFLPNNTDGSPAIPHGSRVKIRMDTPSGIKDSIPAWIKFSVQAPGEIPFNGIYYDPPEEEKYVFKHPQPKRPKSLRIYEAHVGMSSTEPMVNTYANFRDDVLPRIKKLGYNAVQIMAIQEHSYYASFGYHVTNFFAPSSRCGTPEELKSLIDRAHELGLVVLMDIVHSHASKNTLDGLNMFDGTDAHYFHSGPRGYHWMWDSRLFNYGSWEVLRYLLSNARWWLEEYKFDGFRFDGVTSMMYTHHGLSVGFTGNYTEYFGLETDVDAVNYLMLVNDMIHGLYPEAITVGEDVSGMPTFCIPVQDGGVGFDYRLHMAIADKWIEMLKKRDEDWQMGDIIYTLTNRRWSEKCISYAESHDQALVGDKTIAFWLMDKDMYDFMAVDRPSTPLIDRGIALHKMIRLITMGLGGEGYLNFMGNEFGHPEWIDFPRGEQRLSDGSVIPGNNFSYDKCRRRFDLGDADYLRYRGLQEFDQAMQHLEENYGFMTSEHQFISRKDEADRVIVFERGDLVFVFNFHWTSSYFDYRIGCSKPGKYKIVLDSDDPLFGGFNRLDRKAEYFTYDGLYDERPCSFMVYAPCRTAVVYALANHD

SEQ ID NO: 100252 - protein, 716 aa, Arabidopsis thaliana
  peptide (1)..(716): Ceres Seq. ID no. 13604737
MEYTEAVRTEDQTMNVVKERGVKPRIVPPPGDGKKIYEIDPMLRTYNNHLDYRYGQYKRLREEIDKYEGGLEAFSRGYEKLGFSRSDAGITYREWAPGAKAASLIGDFNNWNSNADIMTRNEFGVWEIFLPNNTDGSPAIPHGSRVKIRMDTPSGIKDSIPAWIKFSVQAPGEIPFNGIYYDPPEEEKYVFKHPQPKRPKSLRIYEAHVGMSSTEPMVNTYANFRDDVLPRIKKLGYNAVQIMAIQEHSYYASFGYHVTNFFAPSSRCGTPEELKSLIDRAHELGLVVLMDIVHSHASKNTLDGLNMFDGTDAHYFHSGPRGYHWMWDSRLFNYGSWEVLRYLLSNARWWLEEYKFDGFRFDGVTSMMYTHHGLSVGFTGNYTEYFGLETDVDAVNYLMLVNDMIHGLYPEAITVGEDVSGMPTFCIPVQDGGVGFDYRLHMAIADKWIEMLKKRDEDWQMGDIIYTLTNRRWSEKCISYAESHDQALVGDKTIAFWLMDKDMYDFMAVDRPSTPLIDRGIALHKMIRLITMGLGGEGYLNFMGNEFGHPEWIDFPRGEQRLSDGSVIPGNNFSYDKCRRRFDLGDADYLRYRGLQEFDQAMQHLEENYGFMTSEHQFISRKDEADRVIVFERGDLVFVFNFHWTSSYFDYRIGCSKPGKYKIVLDSDDPLFGGFNRLDRKAEYFTYDGLYDERPCSFMVYAPCRTAVVYALANHD

SEQ ID NO: 100253 - protein, 703 aa, Arabidopsis thaliana
  peptide (1)..(703): Ceres Seq. ID no. 13604738
MNVVKERGVKPRIVPPPGDGKKIYEIDPMLRTYNNHLDYRYGQYKRLREEIDKYEGGLEAFSRGYEKLGFSRSDAGITYREWAPGAKAASLIGDFNNWNSNADIMTRNEFGVWEIFLPNNTDGSPAIPHGSRVKIRMDTPSGIKDSIPAWIKFSVQAPGEIPFNGIYYDPPEEEKYVFKHPQPKRPKSLRIYEAHVGMSSTEPMVNTYANFRDDVLPRIKKLGYNAVQIMAIQEHSYYASFGYHVTNFFAPSSRCGTPEELKSLIDRAHELGLVVLMDIVHSHASKNTLDGLNMFDGTDAHYFHSGPRGYHWMWDSRLFNYGSWEVLRYLLSNARWWLEEYKFDGFRFDGVTSMMYTHHGLSVGFTGNYTEYFGLETDVDAVNYLMLVNDMIHGLYPEAITVGEDVSGMPTFCIPVQDGGVGFDYRLHMAIADKWIEMLKKRDEDWQMGDIIYTLTNRRWSEKCISYAESHDQALVGDKTIAFWLMDKDMYDFMAVDRPSTPLIDRGIALHKMIRLITMGLGGEGYLNFMGNEFGHPEWIDFPRGEQRLSDGSVIPGNNFSYDKCRRRFDLGDADYLRYRGLQEFDQAMQHLEENYGFMTSEHQFISRKDEADRVIVFERGDLVFVFNFHWTSSYFDYRIGCSKPGKYKIVLDSDDPLFGGFNRLDRKAEYFTYDGLYDERPCSFMVYAPCRTAVVYALANHD

SEQ ID NO: 100254 - DNA, 886 bp, Arabidopsis thaliana
  misc_feature (1)..(886): Ceres Seq. ID no. 13604739
  misc_feature (1)..(886): Ortholog of  Ceres SEQ ID NO 12611101 as cited in SEQ ID NO 55920
atgggtcatgaatggatcgatgcagagagggagttcaaatggagcgaggatgtcaaagttgaaagtgaagtgactgagatcgttcttgttcgccatggagaaaccacttggaatgctgccggaagaatccagggacaaattgaatcagaccttaacgaggttggactaaagcaggctgttgcaatcgctgagaggttgggaaaagaggaaagacctgtagctgtgtattcatcagacctcaaacgagccaaagacactgctcttatgatcgccaaaacttgtttctgtcccgaggtgatcgaagtacctgacttaaaggagaggcacgtgggtagtctccaaggcctgtattggaaagaaggagcagagaaagaacctgaagcttactctgcctttttctcttcccaaaacgacctcgagattccgggaggaggagagagctttgaccaacttgctgatagatccatggatgctcttgagcaaattgctaagaagcacaaaggagagagagtgatagtggtgactcatggaggagtgttgagggcaatttacttaaggatcacacaagcttcctctgccggaaaactcttgaatgcttcagtgaatgtggttcatctccgtgatcaaaaatggatcatcgattcgtggagcgatgtatcacatctatcatccgttggatttcttcaacgtggctttgatggagacgccaagccctagagaacctcctcattcatatcttgtgtcgatctataaagacttctataaataagtatctatttatcttgatgtttctgtgtgctttacttaagatgcgtaatcttcttgttgatcaattcctatcatcttgtaatttgtattactctattaataagagattttcatcttt

SEQ ID NO: 100255 - protein, 238 aa, Arabidopsis thaliana
  peptide (1)..(238): Ceres Seq. ID no. 13604740
MGHEWIDAEREFKWSEDVKVESEVTEIVLVRHGETTWNAAGRIQGQIESDLNEVGLKQAVAIAERLGKEERPVAVYSSDLKRAKDTALMIAKTCFCPEVIEVPDLKERHVGSLQGLYWKEGAEKEPEAYSAFFSSQNDLEIPGGGESFDQLADRSMDALEQIAKKHKGERVIVVTHGGVLRAIYLRITQASSAGKLLNASVNVVHLRDQKWIIDSWSDVSHLSSVGFLQRGFDGDAKP

SEQ ID NO: 100256 - protein, 150 aa, Arabidopsis thaliana
  peptide (1)..(150): Ceres Seq. ID no. 13604741
MIAKTCFCPEVIEVPDLKERHVGSLQGLYWKEGAEKEPEAYSAFFSSQNDLEIPGGGESFDQLADRSMDALEQIAKKHKGERVIVVTHGGVLRAIYLRITQASSAGKLLNASVNVVHLRDQKWIIDSWSDVSHLSSVGFLQRGFDGDAKP

SEQ ID NO: 100257 - DNA, 948 bp, Arabidopsis thaliana
  misc_feature (1)..(948): Ceres Seq. ID no. 13604742
  misc_feature (1)..(948): Ortholog of  Ceres SEQ ID NO 14305854 as cited in SEQ ID NO 52331
  misc_feature (1)..(948): Ortholog of  Ceres SEQ ID NO 15168588 as cited in SEQ ID NO 60235
aaatcaaatcttttcatttacaattatctttcttctcaatttagaacttagtagctagtcttcaagataatggcacttgaaactcttacttctccaagattatcttctccgatgccgactctgtttcaagattcagcactagggtttcatggaagcaaaggcaaacgatctaagcgatcaagatctgaattcgaccgtcagagtctcacggaggatgaatatatcgctttatgtctcatgcttcttgctcgcgacggagatagaaaccgtgaccttgacctgccttcttcttcgtcttcacctcctctgcttcctcctcttcctactccgatctacaagtgtagcgtctgtgacaaggcgttttcgtcttaccaggctcttggtggacacaaggcaagtcaccggaaaagcttttcgcttactcaatctgccggaggagatgagctgtcgacatcgtcggcgataaccacgtctggtatatccggtggcgggggaggaagtgtgaagtcgcacgtttgctctatctgtcataaatcgttcgccaccggtcaagctctcggcggccacaaacggtgccactacgaaggaaagaacggaggcggtgtgagtagtagcgtgtcgaattctgaagatgtggggtctacaagccacgtcagcagtggccaccgtgggtttgacctcaacataccgccgataccggaattctcgatggtcaacggagacgaagaggtgatgagtcctatgccggcgaagaaactccggtttgacttcccggagaaaccctaaacataaacctaggaaaaactttacagaattcattttataggaaattgttttactgtatatacaaatatcgattttgattgatgttcttcttcactgaaaaattatgattctttgttgtataattgatgtttctgaaaaagatataactttttattgtttcac

SEQ ID NO: 100258 - protein, 238 aa, Arabidopsis thaliana
  peptide (1)..(238): Ceres Seq. ID no. 13604743
MALETLTSPRLSSPMPTLFQDSALGFHGSKGKRSKRSRSEFDRQSLTEDEYIALCLMLLARDGDRNRDLDLPSSSSSPPLLPPLPTPIYKCSVCDKAFSSYQALGGHKASHRKSFSLTQSAGGDELSTSSAITTSGISGGGGGSVKSHVCSICHKSFATGQALGGHKRCHYEGKNGGGVSSSVSNSEDVGSTSHVSSGHRGFDLNIPPIPEFSMVNGDEEVMSPMPAKKLRFDFPEKP

SEQ ID NO: 100259 - protein, 224 aa, Arabidopsis thaliana
  peptide (1)..(224): Ceres Seq. ID no. 13604744
MPTLFQDSALGFHGSKGKRSKRSRSEFDRQSLTEDEYIALCLMLLARDGDRNRDLDLPSSSSSPPLLPPLPTPIYKCSVCDKAFSSYQALGGHKASHRKSFSLTQSAGGDELSTSSAITTSGISGGGGGSVKSHVCSICHKSFATGQALGGHKRCHYEGKNGGGVSSSVSNSEDVGSTSHVSSGHRGFDLNIPPIPEFSMVNGDEEVMSPMPAKKLRFDFPEKP

SEQ ID NO: 100260 - protein, 182 aa, Arabidopsis thaliana
  peptide (1)..(182): Ceres Seq. ID no. 13604745
MLLARDGDRNRDLDLPSSSSSPPLLPPLPTPIYKCSVCDKAFSSYQALGGHKASHRKSFSLTQSAGGDELSTSSAITTSGISGGGGGSVKSHVCSICHKSFATGQALGGHKRCHYEGKNGGGVSSSVSNSEDVGSTSHVSSGHRGFDLNIPPIPEFSMVNGDEEVMSPMPAKKLRFDFPEKP

SEQ ID NO: 100261 - DNA, 839 bp, Arabidopsis thaliana
  misc_feature (1)..(839): Ceres Seq. ID no. 13604760
  misc_feature (1)..(839): Ortholog of  Ceres SEQ ID NO 12627215 as cited in SEQ ID NO 60976
  misc_feature (1)..(839): Ortholog of  Ceres SEQ ID NO 15178542 as cited in SEQ ID NO 65410
  misc_feature (1)..(839): Ortholog of  Ceres SEQ ID NO 12635879 as cited in SEQ ID NO 0
  misc_feature (1)..(839): Ortholog of  Ceres SEQ ID NO 13599649 as cited in SEQ ID NO 0
aaagagaagaaggagcaaaaaggttttgccgaagttgagagatcaatcaaagatttgaagttccgatgaattcaggaggtggaatcgttgctgcagcagctccttcaagcggcggtggtaatgttgaatggcatgtccgaccaccgaaccctaaaaacccagttgtcttcttcgacgtctctattggtggtatccccgccggtcgtatcaagatggagctcttcgccgacattgctcccaaaaccgctgaaaacttcaggcagttctgtactggtgaactcagaaaagctggaaagccgcttggttacaaagaatgtcagtttcacagagtcatcaaagattttatggttcaaagtggtgattttcttaagaatgatggtagtggatgcatgtcaatctacggccacaagtttgaggatgagaattttactgctaaacatactggaccaggattgctctccatggcaaatagtgggccaaacacaaatgggtgccagttcttcatcacttgtgcaaaatgcgattggcttgacaacaagcatgttgtctttgggagagtgcttggagatggtttgttggttatgcggaagattgagaacgtggctattggacccaataaccggcctaaacttgcggttgtaattactgagtgtggggagatgtgaaatgttttcgaatgttatgagagcccatagcttattagttttaaacttaggcattgtgacagaagccaaatcccattgtgggttatctaaaatgtcaacttcttacggcttacaaatactacagttgaggctatctatggccgttatgattgtattttaacaaaagctatttgc

SEQ ID NO: 100262 - protein, 199 aa, Arabidopsis thaliana
  peptide (1)..(199): Ceres Seq. ID no. 13604761
MNSGGGIVAAAAPSSGGGNVEWHVRPPNPKNPVVFFDVSIGGIPAGRIKMELFADIAPKTAENFRQFCTGELRKAGKPLGYKECQFHRVIKDFMVQSGDFLKNDGSGCMSIYGHKFEDENFTAKHTGPGLLSMANSGPNTNGCQFFITCAKCDWLDNKHVVFGRVLGDGLLVMRKIENVAIGPNNRPKLAVVITECGEM

SEQ ID NO: 100263 - protein, 173 aa, Arabidopsis thaliana
  peptide (1)..(173): Ceres Seq. ID no. 13604762
MLNGMSDHRTLKTQLSSSTSLLVVSPPVVSRWSSSPTLLPKPLKTSGSSVLVNSEKLESRLVTKNVSFTESSKILWFKVVIFLRMMVVDACQSTATSLRMRILLLNILDQDCSPWQIVGQTQMGASSSSLVQNAIGLTTSMLSLGECLEMVCWLCGRLRTWLLDPITGLNLRL

SEQ ID NO: 100264 - protein, 169 aa, Arabidopsis thaliana
  peptide (1)..(169): Ceres Seq. ID no. 13604763
MSDHRTLKTQLSSSTSLLVVSPPVVSRWSSSPTLLPKPLKTSGSSVLVNSEKLESRLVTKNVSFTESSKILWFKVVIFLRMMVVDACQSTATSLRMRILLLNILDQDCSPWQIVGQTQMGASSSSLVQNAIGLTTSMLSLGECLEMVCWLCGRLRTWLLDPITGLNLRL

SEQ ID NO: 100265 - DNA, 846 bp, Arabidopsis thaliana
  misc_feature (1)..(846): Ceres Seq. ID no. 13604768
  misc_feature (1)..(846): Ortholog of  Ceres SEQ ID NO 14316118 as cited in SEQ ID NO 52391
  misc_feature (1)..(846): Ortholog of  Ceres SEQ ID NO 14316060 as cited in SEQ ID NO 52465
  misc_feature (1)..(846): Ortholog of  Ceres SEQ ID NO 13664032 as cited in SEQ ID NO 67527
ataaacaccagtcgcagcgtttcgtagaaaaattcgatttctctaaagccctaaaactaaaacgactatccccaattccaagttctagggtttccatcttccccaatctagtataaatggcggatacgccttcgagcccagctggagatggcggagaaagcggcggttccgttagggagcaggatcgataccttcctatagctaatatcagcaggatcatgaagaaagcgttgcctcctaatggtaagattggaaaagatgctaaggatacagttcaggaatgcgtctctgagttcatcagcttcatcactagcgaggccagtgataagtgtcaaaaagagaaaaggaaaactgtgaatggtgatgatttgttgtgggcaatggcaacattaggatttgaggattacctggaacctctaaagatatacctagcgaggtacagggagttggagggtgataataagggatcaggaaagagtggagatggatcaaatagagatgctggtggcggtgtttctggtgaagaaatgccgagctggtaaaagaagttgcaagtagtgattaagaacaatcgccaaatgatcaagggaaattagagatcagtgagttgtttatagttgagctgatcgacaactatttcgggtttactctcaatttcggttatgttagtttgaacgtttggtttattgtttccggtttagttggttgtatttaaagatttctctgttagatgttgagaacacttgaatgaaggaaaaatttgtccacatcctgttgttattttcgattcactttcggaatttcatagctaatttattctcatttaatacaaaatccttaaattaa

SEQ ID NO: 100266 - protein, 141 aa, Arabidopsis thaliana; identical to SEQ ID NO: 27889
  peptide (1)..(141): Ceres Seq. ID no. 13604769

SEQ ID NO: 100267 - protein, 107 aa, Arabidopsis thaliana; identical to SEQ ID NO: 27890
  peptide (1)..(107): Ceres Seq. ID no. 13604770

SEQ ID NO: 100268 - DNA, 863 bp, Arabidopsis thaliana
  misc_feature (1)..(863): Ceres Seq. ID no. 13604771
  misc_feature (1)..(863): Ortholog of  Ceres SEQ ID NO 14304879 as cited in SEQ ID NO 53767
ggctgtggcgggacccaagtctttgacaatggctgaagatgaaatagtagtcgaagaagagcaatcacagccacaggagattactccagttccaccatcttcttcgtcttcgccttcgttagtggtggaagacgacgatgagatgaagctcaagcacttggaattcattcaagtcgcggcggtttacttcgccgcctgtttctcgaccctctacgagttggctaaagacaacgctggtccactcaaactcggcgtcgagaacattgaagattgcgttcgaaccgtgcttgctccattatacgaaaaattccacgacgttcctttcaagcttctccttttcgtcgatcgtaaggtggacgatgtgttcttcgatgttgagacatatgttccgtcattggtgaagcaagcttctagccaagcgctcacggtggccacggaggtgcagcgcaccggcgttgtggacactaccaagagcattgcaagaagcgtccgggacaagtacgagccagcggcagagtattacgcagcgacgctgtggcgtttactgaatcaactgccgttgttccctgaagttgcgcatttagtgatccccacggcgttttactggtcagagaagtacaacgatgcggttcgttacgttggcgacagagactactttggggcagagtatctacccatgattcctattgagaagatctctgatattttggaacaagatcagtgtcgagctgattgactatttactcttctgaagccaaagattccttcttctatagagtatatatactgtatgtactctgtttttctttcctttctgcaatttgctatcccaagagatgtaatctttcttcaatatttcattt

SEQ ID NO: 100269 - protein, 244 aa, Arabidopsis thaliana
  peptide (1)..(244): Ceres Seq. ID no. 13604772
AVAGPKSLTMAEDEIVVEEEQSQPQEITPVPPSSSSSPSLVVEDDDEMKLKHLEFIQVAAVYFAACFSTLYELAKDNAGPLKLGVENIEDCVRTVLAPLYEKFHDVPFKLLLFVDRKVDDVFFDVETYVPSLVKQASSQALTVATEVQRTGVVDTTKSIARSVRDKYEPAAEYYAATLWRLLNQLPLFPEVAHLVIPTAFYWSEKYNDAVRYVGDRDYFGAEYLPMIPIEKISDILEQDQCRAD

SEQ ID NO: 100270 - protein, 235 aa, Arabidopsis thaliana
  peptide (1)..(235): Ceres Seq. ID no. 13604773
MAEDEIVVEEEQSQPQEITPVPPSSSSSPSLVVEDDDEMKLKHLEFIQVAAVYFAACFSTLYELAKDNAGPLKLGVENIEDCVRTVLAPLYEKFHDVPFKLLLFVDRKVDDVFFDVETYVPSLVKQASSQALTVATEVQRTGVVDTTKSIARSVRDKYEPAAEYYAATLWRLLNQLPLFPEVAHLVIPTAFYWSEKYNDAVRYVGDRDYFGAEYLPMIPIEKISDILEQDQCRAD

SEQ ID NO: 100271 - protein, 197 aa, Arabidopsis thaliana
  peptide (1)..(197): Ceres Seq. ID no. 13604774
MKLKHLEFIQVAAVYFAACFSTLYELAKDNAGPLKLGVENIEDCVRTVLAPLYEKFHDVPFKLLLFVDRKVDDVFFDVETYVPSLVKQASSQALTVATEVQRTGVVDTTKSIARSVRDKYEPAAEYYAATLWRLLNQLPLFPEVAHLVIPTAFYWSEKYNDAVRYVGDRDYFGAEYLPMIPIEKISDILEQDQCRAD

SEQ ID NO: 100272 - DNA, 869 bp, Arabidopsis thaliana
  misc_feature (1)..(869): Ceres Seq. ID no. 13604775
  misc_feature (1)..(869): Ortholog of  Ceres SEQ ID NO 13664032 as cited in SEQ ID NO 67527
ctgtcaaaacgaatatttttttagatgtatacataataaacacatttatgttaaaacctctcctttttctgtgtgccatatagtttggcaaattacatatcttcgttctatatcatcattcgttgttgtgaatcatactgaaacgaacccctcaccaaacaagatttatagatcctctgctttaattataagattctgatggcggggaattatcattcgttccaaaatccaatccctcgataccagaattacaacttcgggagcagctcatctaatcatcaacatgaacatgatgggttagtggtggtggtggaggatcaacagcaagaagaaagcatgatggtaaaagaacaagacaggctacttccgatagcaaacgtaggaaggatcatgaagaacatcctcccagcaaacgcaaaggtctctaaagaagccaaagagactatgcaagaatgtgtgtccgagttcattagcttcgtcacgggagaagcatccgataaatgccacaaggagaagcgaaagaccgttaatggagacgatatctgttgggctatggctaatctagggtttgatgattacgccgcccagctcaagaagtacttacatcgttaccgagttctcgaaggtgagaaacctaatcatcacggcaaaggaggacctaaatcctcgccagataattaaaattcttccatcgctttttgattttccttgattaatctccatgtcatcatcttcctctttaggaccagctatctttttctatcttctcatatattgttctacatatataaataaattttatgtatatgatgatataacatgtatgtggtgtgaggtactgaacaaatctgtgttaattcttccagctg

SEQ ID NO: 100273 - protein, 160 aa, Arabidopsis thaliana
  peptide (1)..(160): Ceres Seq. ID no. 13604776
MAGNYHSFQNPIPRYQNYNFGSSSSNHQHEHDGLVVVVEDQQQEESMMVKEQDRLLPIANVGRIMKNILPANAKVSKEAKETMQECVSEFISFVTGEASDKCHKEKRKTVNGDDICWAMANLGFDDYAAQLKKYLHRYRVLEGEKPNHHGKGGPKSSPDN

SEQ ID NO: 100274 - protein, 114 aa, Arabidopsis thaliana
  peptide (1)..(114): Ceres Seq. ID no. 13604777
MMVKEQDRLLPIANVGRIMKNILPANAKVSKEAKETMQECVSEFISFVTGEASDKCHKEKRKTVNGDDICWAMANLGFDDYAAQLKKYLHRYRVLEGEKPNHHGKGGPKSSPDN

SEQ ID NO: 100275 - protein, 113 aa, Arabidopsis thaliana
  peptide (1)..(113): Ceres Seq. ID no. 13604778
MVKEQDRLLPIANVGRIMKNILPANAKVSKEAKETMQECVSEFISFVTGEASDKCHKEKRKTVNGDDICWAMANLGFDDYAAQLKKYLHRYRVLEGEKPNHHGKGGPKSSPDN

SEQ ID NO: 100276 - DNA, 1792 bp, Arabidopsis thaliana
  misc_feature (1)..(1792): Ceres Seq. ID no. 13604779
  misc_feature (1)..(1792): Ortholog of  Ceres SEQ ID NO 13597865 as cited in SEQ ID NO 64954
atgacggatgtgtccccactttcggaccagaccactttactccccgagttagcaagtgaagtgagaaaactgtctgtgtgtcacatgttggccactcgcgcgctatccccgcccaaggaccttaccgtcattttggttggaaactatttggtgagaggagtttttactagtatcttttttactgtacaccaaatccctaaatttaaggacatgtatgctcgcaatcctcccctcaatggctcacaatctgctcaagctcccgactggacccctgcagatgccgataccggactccaaggtctcgcatgcgctttgattctcagcaactggttgggtagcgactcgtaccctgagagaccaggtgctcctgactgtgcctactacatgcgaactggtgtctgtggctacggtaatagatgtcgttacaatcaccctcgcgatcgtgcctcggttgaagcaactgttagagctaccgggcagtatcctgaacgttttggtgaacccccatgccagttttacttgaaaactggaacttgtaaatttggggcgtcatgcaaattccaccatccaaagaatgcaggtggatccatgagccacgttccactaaatatatatggataccctgtacgagagggtgataacgaatgctcctactatttgaaaacggggcaatgcaaatttggtataacctgtaaatttcatcatcctcagcctgctggtactactgtcccaccaccaccagcatctgcacctcagttttatccatcggtgcagtcacttatgcctgaccagtatggaggtccatcttctagcttgagagttgcaagaactcttcttcctggttcttatatgcaaggcgcctatggtccaatgctattaacccccggggtcgttcctattccaggctggagtccttactcgtctcttactgtctcacttttgcttttgcttcaggcacctgtgagccctgctctatctcctggtgcgcagcacgctgttggggcaacttctttatatggagttacacagctcacttccaccactccttcgcttcccggggtttatccatctctgtcctctcctacaggtgttatacagaaagaacaggcctttccagagagacctggtgaaccagagtgccaatactatttgaaaacaggagattgtaagtttggaacatcttgtaagtttcatcatcctcgagatcgggttccaccaagagcgaattgcgtcctcagccccattggtcttcctctacgcccgggtgtgcaacggtgcactttctacgtacaaaacggcttctgtaagtttggatcaacatgtaagtttgatcatccaatgggaacgatcagatacaatccttctgcgtcctctctagctgatgcaccggtggctccttacccagtgagctctctcttgggtgctctggcagctgccccttcttcttcatcgacagagctcatagcaggcggtgcaaaagatgcttacatgaccggtgtgcctacatcaagaagcacatcaaacatctcggcaggtttgattttctcccagagcggtgggtcaattccattctcagagctgcaactctcgagccagagctctcttcctctaacaggtagcagaatcacaagacaagggcgtgaaattcgtcgatccttttgaatagatcacctcagaaaagggtacgcatacgcaggtcctctggatcaccttttagcaattcttaatctatatgactattattatatagaagcatgtgatgtgaatttatatatataatcttcgtaccttg

SEQ ID NO: 100277 - protein, 553 aa, Arabidopsis thaliana
  peptide (1)..(553): Ceres Seq. ID no. 13604780
MTDVSPLSDQTTLLPELASEVRKLSVCHMLATRALSPPKDLTVILVGNYLVRGVFTSIFFTVHQIPKFKDMYARNPPLNGSQSAQAPDWTPADADTGLQGLACALILSNWLGSDSYPERPGAPDCAYYMRTGVCGYGNRCRYNHPRDRASVEATVRATGQYPERFGEPPCQFYLKTGTCKFGASCKFHHPKNAGGSMSHVPLNIYGYPVREGDNECSYYLKTGQCKFGITCKFHHPQPAGTTVPPPPASAPQFYPSVQSLMPDQYGGPSSSLRVARTLLPGSYMQGAYGPMLLTPGVVPIPGWSPYSSLTVSLLLLLQAPVSPALSPGAQHAVGATSLYGVTQLTSTTPSLPGVYPSLSSPTGVIQKEQAFPERPGEPECQYYLKTGDCKFGTSCKFHHPRDRVPPRANCVLSPIGLPLRPGVQRCTFYVQNGFCKFGSTCKFDHPMGTIRYNPSASSLADAPVAPYPVSSLLGALAAAPSSSSTELIAGGAKDAYMTGVPTSRSTSNISAGLIFSQSGGSIPFSELQLSSQSSLPLTGSRITRQGREIRRSF

SEQ ID NO: 100278 - protein, 525 aa, Arabidopsis thaliana
  peptide (1)..(525): Ceres Seq. ID no. 13604781
MLATRALSPPKDLTVILVGNYLVRGVFTSIFFTVHQIPKFKDMYARNPPLNGSQSAQAPDWTPADADTGLQGLACALILSNWLGSDSYPERPGAPDCAYYMRTGVCGYGNRCRYNHPRDRASVEATVRATGQYPERFGEPPCQFYLKTGTCKFGASCKFHHPKNAGGSMSHVPLNIYGYPVREGDNECSYYLKTGQCKFGITCKFHHPQPAGTTVPPPPASAPQFYPSVQSLMPDQYGGPSSSLRVARTLLPGSYMQGAYGPMLLTPGVVPIPGWSPYSSLTVSLLLLLQAPVSPALSPGAQHAVGATSLYGVTQLTSTTPSLPGVYPSLSSPTGVIQKEQAFPERPGEPECQYYLKTGDCKFGTSCKFHHPRDRVPPRANCVLSPIGLPLRPGVQRCTFYVQNGFCKFGSTCKFDHPMGTIRYNPSASSLADAPVAPYPVSSLLGALAAAPSSSSTELIAGGAKDAYMTGVPTSRSTSNISAGLIFSQSGGSIPFSELQLSSQSSLPLTGSRITRQGREIRRSF

SEQ ID NO: 100279 - protein, 483 aa, Arabidopsis thaliana
  peptide (1)..(483): Ceres Seq. ID no. 13604782
MYARNPPLNGSQSAQAPDWTPADADTGLQGLACALILSNWLGSDSYPERPGAPDCAYYMRTGVCGYGNRCRYNHPRDRASVEATVRATGQYPERFGEPPCQFYLKTGTCKFGASCKFHHPKNAGGSMSHVPLNIYGYPVREGDNECSYYLKTGQCKFGITCKFHHPQPAGTTVPPPPASAPQFYPSVQSLMPDQYGGPSSSLRVARTLLPGSYMQGAYGPMLLTPGVVPIPGWSPYSSLTVSLLLLLQAPVSPALSPGAQHAVGATSLYGVTQLTSTTPSLPGVYPSLSSPTGVIQKEQAFPERPGEPECQYYLKTGDCKFGTSCKFHHPRDRVPPRANCVLSPIGLPLRPGVQRCTFYVQNGFCKFGSTCKFDHPMGTIRYNPSASSLADAPVAPYPVSSLLGALAAAPSSSSTELIAGGAKDAYMTGVPTSRSTSNISAGLIFSQSGGSIPFSELQLSSQSSLPLTGSRITRQGREIRRSF

SEQ ID NO: 100280 - DNA, 1561 bp, Arabidopsis thaliana
  misc_feature (1)..(1561): Ceres Seq. ID no. 13604808
  misc_feature (1)..(1561): Ortholog of  Ceres SEQ ID NO 14308209 as cited in SEQ ID NO 58800
tgtttgggctcaatttgggctctgtctgttatccacaaattaagagacgcaaacctaaaacgacgccgttccatagttttcctttgaagaagagagagacgtcacaaaggaaagcactcaatcgtcatttcctcggtatctcctcctcgaaagaagaatgcctggaattagaggtccttcggaatactcgcaggaaccacctcgtcacccttctctcaaggtcaacgccaaggaacctttcaacgccgagcctccccgctcggccttagtctcatcttatgtcactcccgtcgaccttttctacaagcgaaatcatggtcccatccccattgttgatcaccttcaaagctactccgtcacccttactggattgatccagaacccgagaaagctctttatcaaagacatcaggtccctcccaaagtacaatgttactgctactcttcagtgtgccggtaacagaaggactgccatgagcaaagttaggaatgttagaggtgttggatgggatgtttctgctattggcaacgctgtctggggtggggcgaaactggccgatgttcttgagcttgtggggataccaaagctgactgcttctaccaatttaggagccagacatgttgagttcgttagtgttgatcgctgtaaggaggaaaatgggggcccttataaggcgtcaatcactctaagtcaagccacaaatcctgaagcggatgttctactcgcttatgagatgaatggagagaccctgaacagggatcacggatttccgttaagggtggttgtccctggtgtgattggtgctcgttcggtcaaatggcttgattccatcaatgtcatcgctgaagaaagccagggattcttcatgcaaaaagattacaaaatgtttccaccctctgtcaattgggataatatcaactggtcctctaggagaccgcaaatggatttccctgttcagagtgcaatctgctctgtggaggatgtgcaaatggtgaagcctggaaaggtaagtatcaaaggatatgcggtttcaggaggtggacgcgggatagaaagagtggacatatccctggatggaggcaaaaactgggtggaagcttctagaacgcaggaaccaggaaagcagtacatctcagaacacagctccagtgacaaatgggcatgggtgttgtttgaagccaccattgatgtttcacagactacagaggtcatcgccaaagcggttgattcggcggcgaatgttcaaccggaaaatgtggagtcggtgtggaacctaagaggggttctcaacacttcgtggcaccgtgtccttctccggcttggccactctaacttgtagaccaagttaccactatgcgtctggtctctctttatcttttctttaagaactaaaacatccttgaatatgcttgtccttgtggatctgtgagagcaaaatactgtttatagttaaataaaatgggaaaacccatctgttgtcatgtggtggattataaattatttatttatatgatagaactgttattcattattatatattaatgaaatcatatggttgagc

SEQ ID NO: 100281 - protein, 393 aa, Arabidopsis thaliana; identical to SEQ ID NO: 26544
  peptide (1)..(393): Ceres Seq. ID no. 13604809

SEQ ID NO: 100282 - protein, 288 aa, Arabidopsis thaliana; identical to SEQ ID NO: 26545
  peptide (1)..(288): Ceres Seq. ID no. 13604810

SEQ ID NO: 100283 - protein, 201 aa, Arabidopsis thaliana; identical to SEQ ID NO: 26546
  peptide (1)..(201): Ceres Seq. ID no. 13604811

SEQ ID NO: 100284 - DNA, 1671 bp, Arabidopsis thaliana
  misc_feature (1)..(1671): Ceres Seq. ID no. 13604820
  misc_feature (1)..(1671): Ortholog of  Ceres SEQ ID NO 14307863 as cited in SEQ ID NO 20504
tagaaatcgaaaaaatcagatctagatctaaaagaagagcgtcttcataaacgcccttcttcttcttcgtcttcttccctgcaaatctagtttctagatcttttctttcttccgcgaaacgaaaatgagagagtgcatttcgatccacattggtcaggccggtatccaggtcggaaatgcttgctgggagctttactgtcttgaacatggcattcagcctgatggccagatgccgagtgacaagactgttggcggaggtgacgatgctttcaacaccttcttcagtgagaccggtgcagggaagcacgtcccacgtgctgtctttgttgatcttgagccaactgtgatcgatgaggtcaggactggtacttaccgtcagcttttccaccctgagcaactcatcagcggtaaagaagacgcagctaacaatttcgcccgtgggcattacaccattgggaaagagattgttgatctgtgcttggaccgtatcagaaagctcgctgataactgtactggtctccaaggattcctcgtcttcaacgctgttggtggagggactggatctggtcttggatctctcctccttgagagactttctgttgactacgggaaaaagtccaagttgggtttcacagtttacccatctccacaggtctccacctctgttgttgagccttacaacagtgtcctctccactcactcactcttggaacacactgatgtctctatcctcctcgacaatgaagctatctatgacatctgcagacgttccctaagcattgagagacccacctacaccaacctcaaccgtctcgtctctcaggttatctcatccttgactgcttctctgaggttcgatggtgccttgaatgttgatgtgactgagttccaaaccaacttggtcccatacccaagaatccacttcatgctttcctcctatgccccagtcatctccgcagagaaggccttccatgagcagctctcggttgctgagatcacaaacagtgcttttgagccagcatccatgatggcaaagtgtgaccctcgtcacggaaagtacatggcttgctgtttgatgtaccgtggtgatgtcgtccccaaggatgtgaacgcagctgttggcaccatcaagaccaagcgtactattcagtttgtggactggtgtcctactggattcaagtgtggaatcaactaccagccaccaactgttgttccaggaggtgatcttgctaaagtccagagagctgtgtgtatgatctcaaactccaccagtgttgctgaggtgttctcccgtattgatcacaagtttgatcttatgtacgcaaaacgtgctttcgttcactggtatgtgggtgagggtatggaagaaggagaattttcagaggctcgtgaggatcttgcagcattggagaaggattacgaagaggttggtgctgaaggtggtgacgatgaggatgatgaaggagaggagtactaagaaggttgtcggttttatgtgggatttctattatctcgtgtttgtgtgaataggctcgaaactcttacgagtcgtacttgtgttttcaaaaaccatatttctatctcttgcttgtggcggtagccatttgttctagttcgtttgtttctgataatattttcatctccaagaactgaatttaagctgggtttggt

SEQ ID NO: 100285 - protein, 450 aa, Arabidopsis thaliana; identical to SEQ ID NO: 24489
  peptide (1)..(450): Ceres Seq. ID no. 13604821

SEQ ID NO: 100286 - protein, 415 aa, Arabidopsis thaliana; identical to SEQ ID NO: 24490
  peptide (1)..(415): Ceres Seq. ID no. 13604822

SEQ ID NO: 100287 - DNA, 1732 bp, Arabidopsis thaliana
  misc_feature (1)..(1732): Ceres Seq. ID no. 13604823
  misc_feature (1)..(1732): Ortholog of  Ceres SEQ ID NO 13502874 as cited in SEQ ID NO 66298
  misc_feature (1)..(1732): Ortholog of  Ceres SEQ ID NO 12614124 as cited in SEQ ID NO 68392
atggcagcaatcaccgttgactttcagctctgcttcatcttcatcctcctaggaatcttctcactcttctgtctctctgctttcttcttcaagaaaccaaaagacccacaacttcaaggctgtggtctacctccgagcccaccctctctaccggtcataggtcatcttcaccttctcctctctgttccatgtcacaaatcctttcagaaactctcctccaagtatggtcccctccttcaccttcgtgcattcaatatcccaatagttatagtctcttccggctccatggccaacgaagttttgaggacccaagacctgaactttgctacccgtcaacgtgaggtttctataatggaaaaatcattactttttggatcttttggctttgtctcagctccttatggagattactggagattcatgaagaagctcttagtcacaaaccttttcgggtctcattccctcgagcagacacggctcattcgtgagaaagaactcaagactttccgtactatgttgttcgataaggcggcaaagaaggggacagttgatgttggtaaagagatgatgaagctaacgaataacagcatttgcaggatgataatggggaggaggtgttcagaggagaacagtgaagcagagaaagtcgaagacttggtgatcaaatcatttagtttggtgaagaaggtccttatagctaacacggttggtcgacttctcaagaagtttgggatctctctgtttgagaaggaaatcatggaggtctcgcagaggtacgatgaattgctggaaaaaattattaaagaacacgaagaggatccgaacaagaaagaggatagagacatgatggatgttctgttggaagtttgtgcagacgacaaggctgaggttaagattaccaggaaccaaatcaaagcgcttattgtggagcttttccttggaggcactgatacttcagcacaaacaatacagtggataatggccgaactcattaaccatcccgagattcttaaaatattaagagaagagatagaatctgttgtcggaacaacgaggtttattcaagaaacagatctctcaaacctgccgtatttgcaggctgtgatgaaagaaggacaaagactacacccacattcgccaatgttggtgaggaatgcaaccaaaggatgcaagattggagggtactacataccgcagaacacaacgatgctaataaacacctatgcgatgatgatagatccagattcatgggaaaatccagacaagtttcagcccgagaggttcatggtgtctccttcaaaagggaaagacgatgagagagaacagctagctttgaacttcattcctttcgggagcggaagaagagcatgtccaggagaaaaattgggctatctcttcactggagtagccattggaacaatggtacagtgttttgactggataatcgatggagataaggttaacgtggaagaggctggagaaatgacgctgaccatggctcatccacttaaatgcactcctgtgactcgagttaacccattagctagctttgaatctgaagatcctaagtggttgatggaggagtttgatatgtattgttgaagttgcagacatatgtctgaaactaataatggaacatgctgtctttgttttttcatatggagtttgatcactaatattgttgtttcataacagaacttgttgtctttatgtatttctgctgtttcacaac

SEQ ID NO: 100288 - protein, 533 aa, Arabidopsis thaliana
  peptide (1)..(533): Ceres Seq. ID no. 13604824
MAAITVDFQLCFIFILLGIFSLFCLSAFFFKKPKDPQLQGCGLPPSPPSLPVIGHLHLLLSVPCHKSFQKLSSKYGPLLHLRAFNIPIVIVSSGSMANEVLRTQDLNFATRQREVSIMEKSLLFGSFGFVSAPYGDYWRFMKKLLVTNLFGSHSLEQTRLIREKELKTFRTMLFDKAAKKGTVDVGKEMMKLTNNSICRMIMGRRCSEENSEAEKVEDLVIKSFSLVKKVLIANTVGRLLKKFGISLFEKEIMEVSQRYDELLEKIIKEHEEDPNKKEDRDMMDVLLEVCADDKAEVKITRNQIKALIVELFLGGTDTSAQTIQWIMAELINHPEILKILREEIESVVGTTRFIQETDLSNLPYLQAVMKEGQRLHPHSPMLVRNATKGCKIGGYYIPQNTTMLINTYAMMIDPDSWENPDKFQPERFMVSPSKGKDDEREQLALNFIPFGSGRRACPGEKLGYLFTGVAIGTMVQCFDWIIDGDKVNVEEAGEMTLTMAHPLKCTPVTRVNPLASFESEDPKWLMEEFDMYC

SEQ ID NO: 100289 - protein, 438 aa, Arabidopsis thaliana
  peptide (1)..(438): Ceres Seq. ID no. 13604825
MANEVLRTQDLNFATRQREVSIMEKSLLFGSFGFVSAPYGDYWRFMKKLLVTNLFGSHSLEQTRLIREKELKTFRTMLFDKAAKKGTVDVGKEMMKLTNNSICRMIMGRRCSEENSEAEKVEDLVIKSFSLVKKVLIANTVGRLLKKFGISLFEKEIMEVSQRYDELLEKIIKEHEEDPNKKEDRDMMDVLLEVCADDKAEVKITRNQIKALIVELFLGGTDTSAQTIQWIMAELINHPEILKILREEIESVVGTTRFIQETDLSNLPYLQAVMKEGQRLHPHSPMLVRNATKGCKIGGYYIPQNTTMLINTYAMMIDPDSWENPDKFQPERFMVSPSKGKDDEREQLALNFIPFGSGRRACPGEKLGYLFTGVAIGTMVQCFDWIIDGDKVNVEEAGEMTLTMAHPLKCTPVTRVNPLASFESEDPKWLMEEFDMYC

SEQ ID NO: 100290 - protein, 416 aa, Arabidopsis thaliana
  peptide (1)..(416): Ceres Seq. ID no. 13604826
MEKSLLFGSFGFVSAPYGDYWRFMKKLLVTNLFGSHSLEQTRLIREKELKTFRTMLFDKAAKKGTVDVGKEMMKLTNNSICRMIMGRRCSEENSEAEKVEDLVIKSFSLVKKVLIANTVGRLLKKFGISLFEKEIMEVSQRYDELLEKIIKEHEEDPNKKEDRDMMDVLLEVCADDKAEVKITRNQIKALIVELFLGGTDTSAQTIQWIMAELINHPEILKILREEIESVVGTTRFIQETDLSNLPYLQAVMKEGQRLHPHSPMLVRNATKGCKIGGYYIPQNTTMLINTYAMMIDPDSWENPDKFQPERFMVSPSKGKDDEREQLALNFIPFGSGRRACPGEKLGYLFTGVAIGTMVQCFDWIIDGDKVNVEEAGEMTLTMAHPLKCTPVTRVNPLASFESEDPKWLMEEFDMYC

SEQ ID NO: 100291 - DNA, 2018 bp, Arabidopsis thaliana
  misc_feature (1)..(2018): Ceres Seq. ID no. 13604831
  misc_feature (1)..(2018): Ortholog of  Ceres SEQ ID NO 13594536 as cited in SEQ ID NO 51382
  misc_feature (1)..(2018): Ortholog of  Ceres SEQ ID NO 15172549 as cited in SEQ ID NO 57185
aaaaagaagtcttcttccatagttactagttagagctgcgaaacgaaaatcgtaacgatagtgcatcaatggcttatgcgtcacgcatcattaatcattccaagaagttgaaggatgtttccactttactacgccgtgagaatgctgcaacgatccgctactactcgaatactaatcgagctcctctgaacagagaagatactttcaattcccgtcttggttatcccccactggagaggatttccatatgtagcaccagcactttaccggtgtccattattttttcaactacgagatcaaatctaagcagtgcaatgggaaggccaatatttggaaaagaattttcatgtttgatgcaatcagctagaggattttcatcgggttcagatctgcctcctcatcaagagatcgggatgccttctctctcgccaacaatgactgagggtaacatcgccaggtggctgaaaaaagaaggtgataaagttgctcctggggaagtactctgtgaagttgaaactgacaaagcaactgtcgaaatggaatgcatggaagagggctatctcgccaagattgtaaaggcggaaggttcaaaagaaattcaagtcggcgaggtaattgctattacagttgaagatgaagaggacattggaaagttcaaagattacaccccatcatctactgctgatgccgctcctacaaaagcagaaccaactcctgccccaccaaaggaagagaaggtcaaacagccatcatcgcctcctgaaccgaaggcctccaagcctagcacacctcccacaggagatcgtgtttttgctagtcctcttgcaagaaagttggctgaagataataacgtgcctctctcagacatcgaaggcacaggtcctgaaggacggatagtgaaggcagatatcgatgagtatttagcttcaagtggtaaaggagctactgcgaagccatctaagtcaactgattctaaggccccagctttggactatgttgacatccctcattctcagatacgaaaggtcacagcctcacgtttggcattctcaaagcaaactatccctcactattacttaaccgtcgatacatgtgttgacaaacttatggctctgaggagtcagcttaattcattcaaagaggcttctggtgggaaacggatatctgtcaatgatcttgttgttaaggctgctgcattagctctcagaaaagttcctcagtgcaatagttcatggactgacgattacatccgccagtttaaaaatgtgaacatcaacgtcgcggtgcagacagaaaacgggctgtatgtccctgttgtgaaggacgcagacaggaagggtctgtccacaattggagaagaagttcggttattagctcaaaaagcaaaagagaacagcttaaagccagaagattatgagggaggaacatttactgtctctaacttgggaggaccttttggcatcaagcaattctgtgcagtcgttaatccacctcaagccgccattctagcagttggatccgctgaaaagagagttgtccctggtaacggtccagatcaattcaactttgcttcttacatgcctgttacactgagctgtgaccatcgcgtagtagacggtgccattggagctgaatggttgaaagcatttaagggatacatcgagaaccctaaatctatgttactctaaaagagaaccaaccacgcaatggaaaaaaacacatcaaaagctgtcgtaagagtctctgtaccaattagattttctttgttttcctctgtttctttcgggtttttctaaaaaagacttttgttgttttctgaataaatatggtgtgagggattcagcatttccactgtaaactggattttaggatattctttgctggttctggttgttcaatgttcattgaggagggctgtgaaataaaactcccattattttgtcatgtgaagtactaccctatatgggatgggttttgtaaccatgcttgatagttgatacaagtggatggatttgagt

SEQ ID NO: 100292 - protein, 539 aa, Arabidopsis thaliana
  peptide (1)..(539): Ceres Seq. ID no. 13604832
MAYASRIINHSKKLKDVSTLLRRENAATIRYYSNTNRAPLNREDTFNSRLGYPPLERISICSTSTLPVSIIFSTTRSNLSSAMGRPIFGKEFSCLMQSARGFSSGSDLPPHQEIGMPSLSPTMTEGNIARWLKKEGDKVAPGEVLCEVETDKATVEMECMEEGYLAKIVKAEGSKEIQVGEVIAITVEDEEDIGKFKDYTPSSTADAAPTKAEPTPAPPKEEKVKQPSSPPEPKASKPSTPPTGDRVFASPLARKLAEDNNVPLSDIEGTGPEGRIVKADIDEYLASSGKGATAKPSKSTDSKAPALDYVDIPHSQIRKVTASRLAFSKQTIPHYYLTVDTCVDKLMALRSQLNSFKEASGGKRISVNDLVVKAAALALRKVPQCNSSWTDDYIRQFKNVNINVAVQTENGLYVPVVKDADRKGLSTIGEEVRLLAQKAKENSLKPEDYEGGTFTVSNLGGPFGIKQFCAVVNPPQAAILAVGSAEKRVVPGNGPDQFNFASYMPVTLSCDHRVVDGAIGAEWLKAFKGYIENPKSMLL

SEQ ID NO: 100293 - protein, 457 aa, Arabidopsis thaliana
  peptide (1)..(457): Ceres Seq. ID no. 13604833
MGRPIFGKEFSCLMQSARGFSSGSDLPPHQEIGMPSLSPTMTEGNIARWLKKEGDKVAPGEVLCEVETDKATVEMECMEEGYLAKIVKAEGSKEIQVGEVIAITVEDEEDIGKFKDYTPSSTADAAPTKAEPTPAPPKEEKVKQPSSPPEPKASKPSTPPTGDRVFASPLARKLAEDNNVPLSDIEGTGPEGRIVKADIDEYLASSGKGATAKPSKSTDSKAPALDYVDIPHSQIRKVTASRLAFSKQTIPHYYLTVDTCVDKLMALRSQLNSFKEASGGKRISVNDLVVKAAALALRKVPQCNSSWTDDYIRQFKNVNINVAVQTENGLYVPVVKDADRKGLSTIGEEVRLLAQKAKENSLKPEDYEGGTFTVSNLGGPFGIKQFCAVVNPPQAAILAVGSAEKRVVPGNGPDQFNFASYMPVTLSCDHRVVDGAIGAEWLKAFKGYIENPKSMLL

SEQ ID NO: 100294 - protein, 444 aa, Arabidopsis thaliana
  peptide (1)..(444): Ceres Seq. ID no. 13604834
MQSARGFSSGSDLPPHQEIGMPSLSPTMTEGNIARWLKKEGDKVAPGEVLCEVETDKATVEMECMEEGYLAKIVKAEGSKEIQVGEVIAITVEDEEDIGKFKDYTPSSTADAAPTKAEPTPAPPKEEKVKQPSSPPEPKASKPSTPPTGDRVFASPLARKLAEDNNVPLSDIEGTGPEGRIVKADIDEYLASSGKGATAKPSKSTDSKAPALDYVDIPHSQIRKVTASRLAFSKQTIPHYYLTVDTCVDKLMALRSQLNSFKEASGGKRISVNDLVVKAAALALRKVPQCNSSWTDDYIRQFKNVNINVAVQTENGLYVPVVKDADRKGLSTIGEEVRLLAQKAKENSLKPEDYEGGTFTVSNLGGPFGIKQFCAVVNPPQAAILAVGSAEKRVVPGNGPDQFNFASYMPVTLSCDHRVVDGAIGAEWLKAFKGYIENPKSMLL

SEQ ID NO: 100295 - DNA, 2117 bp, Arabidopsis thaliana
  misc_feature (1)..(2117): Ceres Seq. ID no. 13604839
  misc_feature (1)..(2117): Ortholog of  Ceres SEQ ID NO 15168488 as cited in SEQ ID NO 59179
agcttagcaaaattcttctgaatgaataatcggcgattatgtctttgaaaaacgatgcgagtagtagccacgacggtggaagcaacagagaaagcgtaatcgatgatcatggccgccgtaaaagcacttgcggctactgtaaatccccagctcggtccagtatctctcacggtttatcagcacagactcttaccgtttatgactaccaagctcttattgaccgaggctggagaagatctggtacttatctttacaaacatgagatggataaaacgtgttgccctccttatacgatacgtttgaaagcaagtgattttgttcctactaaagagcagcagcgagtttctagaagactagaaaggttcttggatggcaaactagatgtgcagcccagggaacaaagaggtgcttcttcctctggtgatgtttcagatacaaggagaaaaacacttggagctgctaaaagtgaagagaataagaaagttgaagcagttatggatgatttgtctaaaaatattgaccaagctgtgcaattatgcatacggagtggggaattcccgtctaatatgcagataccaaaagcttcagtgaagaaggttttctgtgctagaagaaagaaactagctgaaggaacagaacaaatcttatacaccagcaacattgcttttccaatagcagctgcaataaaacgcatccagacatctgagaaagaggggataaatagtgcagaaggaaatagattatcacctgaaactatttctgagatgttgttgagtgcaatgcataaggtgggggaaactcctgatgtgtctatcaaagtctgtaagggccatatcaatttcctttcatctgccaaagattctttttctgatagagatgttgtacctaatggtaacatctcgagaggagccaattctttagatggaagtgaaacccttcacgctaagaaggattcagaaaaccatcaggcaagaaagcgaaagctggagatacatttgaaaaggtctagttttgatcctgaagaacatgagttatacaaacggtatcagctgaaagtgcacaatgataagccagggcacgttgtagaaagttcatacagaaggtttttggtcgactctcctttaatagatgttcaaccttcaggtgatgaaaaggttccgccttgtggcttcggctctttccaccaacaatatagaattgatggccgcctaattgccgtcggggttgtagacattcttcctaaatgtttgtcaagtgtatacttattctgggatccagactatgcattcttatcgctcggaaaatattctgccattcaagaaattaattgggttatagagaaccaagctcgctgcccttctcttcagtattactatcttggttattatatacattcctgcagcaagatgagatataaagcagcctatcgtccatctgagcttctatgtcctctccgtttccagtgggttccatttgaagtagcaaggccgatgcttgataaaaagccatatgtcatattgtccgatattgctatttcacataatcaatgttctttactagctggtgcttctgaaactctcgtggaaccagcagcaagtgaacatgaagacatggaacaaggggagacgaatgataactttatgggctgcagtgatgaggatgaagatgaggatgaggatgatgatgatgatgatgatgatgatgaggaaatgtatgagactgaatcagaggactctcatattgagtcagaccctggatccaaagataacgacattaacaacatccttatcggtctttatggatcccaatatagatacaaggaaatgcggcagatcataactcccgtaggcaggaagcaactggaaccgatgttacaaagctaccgcaaggttgtgggcgctgagctttcagagagaatggtgtatgaaatcaactgaagcttcaacaataccaagctccattgagctttggtaccattagtcattagataaaactcaaaattgtttgtattcatgtttcagttgttgtatatctatgactatgagacttgtacatggtgtctttctttaagtttgtattttctgattacctttatattgaaaaaatttctgtccaag

SEQ ID NO: 100296 - protein, 632 aa, Arabidopsis thaliana
  peptide (1)..(632): Ceres Seq. ID no. 13604840
MSLKNDASSSHDGGSNRESVIDDHGRRKSTCGYCKSPARSSISHGLSAQTLTVYDYQALIDRGWRRSGTYLYKHEMDKTCCPPYTIRLKASDFVPTKEQQRVSRRLERFLDGKLDVQPREQRGASSSGDVSDTRRKTLGAAKSEENKKVEAVMDDLSKNIDQAVQLCIRSGEFPSNMQIPKASVKKVFCARRKKLAEGTEQILYTSNIAFPIAAAIKRIQTSEKEGINSAEGNRLSPETISEMLLSAMHKVGETPDVSIKVCKGHINFLSSAKDSFSDRDVVPNGNISRGANSLDGSETLHAKKDSENHQARKRKLEIHLKRSSFDPEEHELYKRYQLKVHNDKPGHVVESSYRRFLVDSPLIDVQPSGDEKVPPCGFGSFHQQYRIDGRLIAVGVVDILPKCLSSVYLFWDPDYAFLSLGKYSAIQEINWVIENQARCPSLQYYYLGYYIHSCSKMRYKAAYRPSELLCPLRFQWVPFEVARPMLDKKPYVILSDIAISHNQCSLLAGASETLVEPAASEHEDMEQGETNDNFMGCSDEDEDEDEDDDDDDDDDEEMYETESEDSHIESDPGSKDNDINNILIGLYGSQYRYKEMRQIITPVGRKQLEPMLQSYRKVVGAELSERMVYEIN

SEQ ID NO: 100297 - protein, 557 aa, Arabidopsis thaliana
  peptide (1)..(557): Ceres Seq. ID no. 13604841
MDKTCCPPYTIRLKASDFVPTKEQQRVSRRLERFLDGKLDVQPREQRGASSSGDVSDTRRKTLGAAKSEENKKVEAVMDDLSKNIDQAVQLCIRSGEFPSNMQIPKASVKKVFCARRKKLAEGTEQILYTSNIAFPIAAAIKRIQTSEKEGINSAEGNRLSPETISEMLLSAMHKVGETPDVSIKVCKGHINFLSSAKDSFSDRDVVPNGNISRGANSLDGSETLHAKKDSENHQARKRKLEIHLKRSSFDPEEHELYKRYQLKVHNDKPGHVVESSYRRFLVDSPLIDVQPSGDEKVPPCGFGSFHQQYRIDGRLIAVGVVDILPKCLSSVYLFWDPDYAFLSLGKYSAIQEINWVIENQARCPSLQYYYLGYYIHSCSKMRYKAAYRPSELLCPLRFQWVPFEVARPMLDKKPYVILSDIAISHNQCSLLAGASETLVEPAASEHEDMEQGETNDNFMGCSDEDEDEDEDDDDDDDDDEEMYETESEDSHIESDPGSKDNDINNILIGLYGSQYRYKEMRQIITPVGRKQLEPMLQSYRKVVGAELSERMVYEIN

SEQ ID NO: 100298 - protein, 480 aa, Arabidopsis thaliana
  peptide (1)..(480): Ceres Seq. ID no. 13604842
MDDLSKNIDQAVQLCIRSGEFPSNMQIPKASVKKVFCARRKKLAEGTEQILYTSNIAFPIAAAIKRIQTSEKEGINSAEGNRLSPETISEMLLSAMHKVGETPDVSIKVCKGHINFLSSAKDSFSDRDVVPNGNISRGANSLDGSETLHAKKDSENHQARKRKLEIHLKRSSFDPEEHELYKRYQLKVHNDKPGHVVESSYRRFLVDSPLIDVQPSGDEKVPPCGFGSFHQQYRIDGRLIAVGVVDILPKCLSSVYLFWDPDYAFLSLGKYSAIQEINWVIENQARCPSLQYYYLGYYIHSCSKMRYKAAYRPSELLCPLRFQWVPFEVARPMLDKKPYVILSDIAISHNQCSLLAGASETLVEPAASEHEDMEQGETNDNFMGCSDEDEDEDEDDDDDDDDDEEMYETESEDSHIESDPGSKDNDINNILIGLYGSQYRYKEMRQIITPVGRKQLEPMLQSYRKVVGAELSERMVYEIN

SEQ ID NO: 100299 - DNA, 951 bp, Arabidopsis thaliana
  misc_feature (1)..(951): Ceres Seq. ID no. 13604843
  misc_feature (1)..(951): Ortholog of  Ceres SEQ ID NO 13638877 as cited in SEQ ID NO 55794
  misc_feature (1)..(951): Ortholog of  Ceres SEQ ID NO 13656156 as cited in SEQ ID NO 64620
atggcgattgatacgatacaaaaaacaaaaaagcttcggtggggagaaattgacgaagaagaaggcgactatgatttccttcttccgcctaagcagatgattagtccggaccagaacggtgtaaagaaggtgattgagtacaaattcaacgaagaggacaaaaaggtcaaaatcactaccacgacccgtgttcagaagcgagctctcaccaaacaagccgtggagcgacggagctggaataagttcggagacgcagctcatgaagaatccagtagttacctcacaatgcgttcaacagaggatatcatcttggaacgaattagagctcctggtagcaacgcggaacagtcgaccgtatcaggagatagcatgtctcagttgggcaaaccgggtgcggtcctcatggtctgcaggttatgccaaaagaaaggtgaccactggacatcaagatgcccacagaaggatctcttatccttaatggacgagcctttaacagcagaaacttctacatcgaccataactggaactggcagggcggcttatgtcccgccaagcatgagagaaggtgcagacagaaaagctggtggttcagacatgaggagtagacatgatgagaactctgtccgtgtgactaatttgtctgaagatacccgtggaccagatttgatggagttgtttcgtccgtttggtgctgtaacccgttgtcatgtagccattgatcagaagacaagcatgagcagaggatttggttttgtcagttttgtgagcagggaagatgcacagcgagcaatcaacaaattgaatggctatggttatgataacctcattcttagggttgaatggtccactcctaaaacccaattagatccgttttcattcgctgattataataatctttgtaagttgttgaatatatgtcattcatgattataagttctcgcgaagggtggg

SEQ ID NO: 100300 - protein, 308 aa, Arabidopsis thaliana
  peptide (1)..(308): Ceres Seq. ID no. 13604844
MAIDTIQKTKKLRWGEIDEEEGDYDFLLPPKQMISPDQNGVKKVIEYKFNEEDKKVKITTTTRVQKRALTKQAVERRSWNKFGDAAHEESSSYLTMRSTEDIILERIRAPGSNAEQSTVSGDSMSQLGKPGAVLMVCRLCQKKGDHWTSRCPQKDLLSLMDEPLTAETSTSTITGTGRAAYVPPSMREGADRKAGGSDMRSRHDENSVRVTNLSEDTRGPDLMELFRPFGAVTRCHVAIDQKTSMSRGFGFVSFVSREDAQRAINKLNGYGYDNLILRVEWSTPKTQLDPFSFADYNNLCKLLNICHS

SEQ ID NO: 100301 - protein, 276 aa, Arabidopsis thaliana; identical to SEQ ID NO: 75813
  peptide (1)..(276): Ceres Seq. ID no. 13604845

SEQ ID NO: 100302 - protein, 213 aa, Arabidopsis thaliana; identical to SEQ ID NO: 75814
  peptide (1)..(213): Ceres Seq. ID no. 13604846

SEQ ID NO: 100303 - DNA, 1103 bp, Arabidopsis thaliana
  misc_feature (1)..(1103): Ceres Seq. ID no. 13604847
  misc_feature (1)..(1103): Ortholog of  Ceres SEQ ID NO 12609045 as cited in SEQ ID NO 51314
  misc_feature (1)..(1103): Ortholog of  Ceres SEQ ID NO 14316312 as cited in SEQ ID NO 60042
  misc_feature (1)..(1103): Ortholog of  Ceres SEQ ID NO 13595877 as cited in SEQ ID NO 67702
  misc_feature (1)..(1103): Ortholog of  Ceres SEQ ID NO 13654367 as cited in SEQ ID NO 67993
atccaaaaccaaaagggagagactaagaatggggtcactaggagaagaaccacaagtagcagaagactgcatgggtttgcttcaactcctaagcaacggtaccgttttgagatccgagagcattgaccttattacccaacaaatcccattcaaaaacaaccaaaccgttctcttcaaagactcaatctatcacaaacctaacaaccttcacctccgtctctacaaacccatttccgcctccaaccgtaccgctctccctgtcgtggtcttcttccacggcgggggcttctgcttcgggtcacgttcttggcctcactttcacaacttctgtctaactcttgcatcgtcccttaacgcccttgtcgtctcacctgactaccggttagcacccgaacaccgcctcccggctgcctttgaggatgctgaggcggtgcttacatggctctgggaccaagctgtttccgatggtgtgaaccactggtttgaagatggaacagacgttgactttgacagggtttttgttgttggtgattcatccggtgggaacatagctcatcaactcgctgtccggttcggatccggttcaatcgagttgacaccggttcgggtacgcggttacgttcttatgggaccgttttttggcggggaagagaggactaactccgagaatggcccctctgaagctttgctcagcttggatttgcttgacaagttttggagattgtcactaccaaacggtgcaacaagagatcaccacatggctaacccttttggaccaacgagtcctacactcgaatcaattagcttagagccaatgttggtgattgtcggcggctcagaactcttgagagatagggccaaggaatatgcatataaattaaagaagatgggaggaaaaagggtagattacattgaattcgaaaacaaggagcatggtttctactccaactatccatcttccgaggctgcggaacaagttctccgtatcattggagactttatgaacaacttgtcttaagtattttagcatttggcttgttgaaggtaattaagtgtttaattcaattaggattccatctcaataatattaagtttgcttggtg

SEQ ID NO: 100304 - protein, 338 aa, Arabidopsis thaliana
  peptide (1)..(338): Ceres Seq. ID no. 13604848
SKTKRERLRMGSLGEEPQVAEDCMGLLQLLSNGTVLRSESIDLITQQIPFKNNQTVLFKDSIYHKPNNLHLRLYKPISASNRTALPVVVFFHGGGFCFGSRSWPHFHNFCLTLASSLNALVVSPDYRLAPEHRLPAAFEDAEAVLTWLWDQAVSDGVNHWFEDGTDVDFDRVFVVGDSSGGNIAHQLAVRFGSGSIELTPVRVRGYVLMGPFFGGEERTNSENGPSEALLSLDLLDKFWRLSLPNGATRDHHMANPFGPTSPTLESISLEPMLVIVGGSELLRDRAKEYAYKLKKMGGKRVDYIEFENKEHGFYSNYPSSEAAEQVLRIIGDFMNNLS

SEQ ID NO: 100305 - protein, 329 aa, Arabidopsis thaliana
  peptide (1)..(329): Ceres Seq. ID no. 13604849
MGSLGEEPQVAEDCMGLLQLLSNGTVLRSESIDLITQQIPFKNNQTVLFKDSIYHKPNNLHLRLYKPISASNRTALPVVVFFHGGGFCFGSRSWPHFHNFCLTLASSLNALVVSPDYRLAPEHRLPAAFEDAEAVLTWLWDQAVSDGVNHWFEDGTDVDFDRVFVVGDSSGGNIAHQLAVRFGSGSIELTPVRVRGYVLMGPFFGGEERTNSENGPSEALLSLDLLDKFWRLSLPNGATRDHHMANPFGPTSPTLESISLEPMLVIVGGSELLRDRAKEYAYKLKKMGGKRVDYIEFENKEHGFYSNYPSSEAAEQVLRIIGDFMNNLS

SEQ ID NO: 100306 - protein, 315 aa, Arabidopsis thaliana
  peptide (1)..(315): Ceres Seq. ID no. 13604850
MGLLQLLSNGTVLRSESIDLITQQIPFKNNQTVLFKDSIYHKPNNLHLRLYKPISASNRTALPVVVFFHGGGFCFGSRSWPHFHNFCLTLASSLNALVVSPDYRLAPEHRLPAAFEDAEAVLTWLWDQAVSDGVNHWFEDGTDVDFDRVFVVGDSSGGNIAHQLAVRFGSGSIELTPVRVRGYVLMGPFFGGEERTNSENGPSEALLSLDLLDKFWRLSLPNGATRDHHMANPFGPTSPTLESISLEPMLVIVGGSELLRDRAKEYAYKLKKMGGKRVDYIEFENKEHGFYSNYPSSEAAEQVLRIIGDFMNNLS

SEQ ID NO: 100307 - DNA, 1126 bp, Arabidopsis thaliana
  misc_feature (1)..(1126): Ceres Seq. ID no. 13604855
  misc_feature (1)..(1126): Ortholog of  Ceres SEQ ID NO 15178797 as cited in SEQ ID NO 1152
  misc_feature (1)..(1126): Ortholog of  Ceres SEQ ID NO 15175688 as cited in SEQ ID NO 60465
  misc_feature (1)..(1126): Ortholog of  Ceres SEQ ID NO 13495628 as cited in SEQ ID NO 60727
catcaaaattcaaaaccaacaccatggataagacagcgacattgtgtctcttgttcttgttcacattcctcacgacctgtttgtctaaagatctctgtaaccaaaatgacaaaaacaccctcctcaagatcaagaaatctctaaacaacccttatcacctcgcttcatgggaccctcaaaccgactgttgctcctggtactgccttgagtgcggcgacgccaccgttaaccaccgtgttaccgccttaaccatattctccggccagatctccggtcagatcccggctgaagtcggtgacttgccgtatcttgagacccttgtcttccgcaaactctctaacctcaccggtacaatccaacccaccatcgccaaactcaagaacctccgaatgctcaggctcagctggacgaatctgacaggtccaattcctgactttataagtcagctcaagaatctcgagttcttagaactttccttcaatgatctctctggttccattccaagttctctctctacgttacctaaaatcttggctcttgaacttagcaggaacaaacttacaggttccataccagagtcatttgggtcgtttccaggaacagtccctgaccttcgcctatcacataaccagctctccggtccaatacccaaatcattaggcaacatcgactttaaccggatcgatttatcccgcaacaagctccaaggtgatgcttcgatgttgtttggttccaacaaaacaacctggtctattgacttatcaagaaacatgttccagttcgatatctcaaaggttgatatccctaaaacacttggtatcttggacttgaaccacaatgggatcactgggaatattccggtgcagtggactgaagctcctcttcagttcttcaatgttagctacaacaaactgtgtggacacatcccaactggagggaaacttcagacatttgattcttattcctattttcacaacaagtgtttgtgtggtgctcctcttgaaatttgcaagtaaaccaagcttatctctaggattacgaaaaaatatatttgagtcaataatatagacaaatatgtaatgttattcggattgattaataaaacatgaaccaaacctctcatttg

SEQ ID NO: 100308 - protein, 337 aa, Arabidopsis thaliana
  peptide (1)..(337): Ceres Seq. ID no. 13604856
SKFKTNTMDKTATLCLLFLFTFLTTCLSKDLCNQNDKNTLLKIKKSLNNPYHLASWDPQTDCCSWYCLECGDATVNHRVTALTIFSGQISGQIPAEVGDLPYLETLVFRKLSNLTGTIQPTIAKLKNLRMLRLSWTNLTGPIPDFISQLKNLEFLELSFNDLSGSIPSSLSTLPKILALELSRNKLTGSIPESFGSFPGTVPDLRLSHNQLSGPIPKSLGNIDFNRIDLSRNKLQGDASMLFGSNKTTWSIDLSRNMFQFDISKVDIPKTLGILDLNHNGITGNIPVQWTEAPLQFFNVSYNKLCGHIPTGGKLQTFDSYSYFHNKCLCGAPLEICK

SEQ ID NO: 100309 - protein, 330 aa, Arabidopsis thaliana
  peptide (1)..(330): Ceres Seq. ID no. 13604857
MDKTATLCLLFLFTFLTTCLSKDLCNQNDKNTLLKIKKSLNNPYHLASWDPQTDCCSWYCLECGDATVNHRVTALTIFSGQISGQIPAEVGDLPYLETLVFRKLSNLTGTIQPTIAKLKNLRMLRLSWTNLTGPIPDFISQLKNLEFLELSFNDLSGSIPSSLSTLPKILALELSRNKLTGSIPESFGSFPGTVPDLRLSHNQLSGPIPKSLGNIDFNRIDLSRNKLQGDASMLFGSNKTTWSIDLSRNMFQFDISKVDIPKTLGILDLNHNGITGNIPVQWTEAPLQFFNVSYNKLCGHIPTGGKLQTFDSYSYFHNKCLCGAPLEICK

SEQ ID NO: 100310 - protein, 208 aa, Arabidopsis thaliana; identical to SEQ ID NO: 27082
  peptide (1)..(208): Ceres Seq. ID no. 13604858

SEQ ID NO: 100311 - DNA, 1549 bp, Arabidopsis thaliana
  misc_feature (1)..(1549): Ceres Seq. ID no. 13604859
  misc_feature (1)..(1549): Ortholog of  Ceres SEQ ID NO 14314363 as cited in SEQ ID NO 52272
ttgcggcaaaataaaaaaaaagaagatcgtacaactaaaaatacctcaaagaaggaagatacaaaagtagtaacctttgttggtgattgatactatatctgttgtgggttttagacaaagaccacgtctttgcagttgtagattggaattttccggatctttctctaaatcgctttttctccgagcaacttttgtttggggttaagctcaaagaatccgttcttttcagtctttactccatctagggtaccacgattggatcggtttttatctgatgatttagtaacagagattttgaagaaaaagaaaaatgggagatactagtccaagaacatcagtctcaacagatggagacactgatcataataacctaatgttcgatgaagggcatttgggtatcggtgcttctgattctagtgaccgttcaaagagtaaaatggatcaaaagacgcttcgtaggctcgctcaaaaccgtgaggctgcaaggaaaagcagattgaggaagaaagcatatgttcagcagctagagaacagtcgattgaagctaacacaacttgagcaggagctacaaagagcacggcaacagggtgtctttatctcaagctctggagaccaagcccattctaccgctggagatggggcaatggcatttgatgtagaatacagacgatggcaggaagataaaaacagacagatgaaggagctgagttctgctatagattctcacgcgactgattctgagcttcggataattgtagatggagtaatagctcactatgaggagctttacaggataaaaggcaacgcagctaagagtgatgtcttccatttattatcagggatgtggaaaaccccagctgagagatgtttcttgtggctcggcggtttccgttcatcagaacttctcaagcttatagcgagtcagttggagcccttgacagaacaacaatcgctagacataaataacttgcaacagtcttctcagcaagcagaagatgctttgtctcaagggatggacaacttacagcaatcactcgctgatactttatcgagtgggactctcggttcaagttcatcagggaatgtagctagctacatgggtcagatggccatggcgatggggaagttaggtacccttgaaggatttatccgccaggctgataacttaaggctacaaacatatcaacagatggtgagactattaacaacccgacaatcggctcgtgctctccttgcagtacacaattatacattgcggttacgtgctcttagctctctatggcttgccagaccaagagagtgaaccatgactctattatacttcaacgaaggtccagaaaatttgagattcttagcataagatttgacgactttagacacgtagctcgtatacaagattatgattatactgttttgtgttgtaatgtttgtgtgtaatgaatgtatcttgaaatcataaaagtcccgtaacatttgaaaagcattaggatactaaagagaagcagtgactttggttttgtacaatatcattacaaattataaacacagt

SEQ ID NO: 100312 - protein, 330 aa, Arabidopsis thaliana
  peptide (1)..(330): Ceres Seq. ID no. 13604860
MGDTSPRTSVSTDGDTDHNNLMFDEGHLGIGASDSSDRSKSKMDQKTLRRLAQNREAARKSRLRKKAYVQQLENSRLKLTQLEQELQRARQQGVFISSSGDQAHSTAGDGAMAFDVEYRRWQEDKNRQMKELSSAIDSHATDSELRIIVDGVIAHYEELYRIKGNAAKSDVFHLLSGMWKTPAERCFLWLGGFRSSELLKLIASQLEPLTEQQSLDINNLQQSSQQAEDALSQGMDNLQQSLADTLSSGTLGSSSSGNVASYMGQMAMAMGKLGTLEGFIRQADNLRLQTYQQMVRLLTTRQSARALLAVHNYTLRLRALSSLWLARPRE

SEQ ID NO: 100313 - protein, 309 aa, Arabidopsis thaliana
  peptide (1)..(309): Ceres Seq. ID no. 13604861
MFDEGHLGIGASDSSDRSKSKMDQKTLRRLAQNREAARKSRLRKKAYVQQLENSRLKLTQLEQELQRARQQGVFISSSGDQAHSTAGDGAMAFDVEYRRWQEDKNRQMKELSSAIDSHATDSELRIIVDGVIAHYEELYRIKGNAAKSDVFHLLSGMWKTPAERCFLWLGGFRSSELLKLIASQLEPLTEQQSLDINNLQQSSQQAEDALSQGMDNLQQSLADTLSSGTLGSSSSGNVASYMGQMAMAMGKLGTLEGFIRQADNLRLQTYQQMVRLLTTRQSARALLAVHNYTLRLRALSSLWLARPRE

SEQ ID NO: 100314 - protein, 288 aa, Arabidopsis thaliana
  peptide (1)..(288): Ceres Seq. ID no. 13604862
MDQKTLRRLAQNREAARKSRLRKKAYVQQLENSRLKLTQLEQELQRARQQGVFISSSGDQAHSTAGDGAMAFDVEYRRWQEDKNRQMKELSSAIDSHATDSELRIIVDGVIAHYEELYRIKGNAAKSDVFHLLSGMWKTPAERCFLWLGGFRSSELLKLIASQLEPLTEQQSLDINNLQQSSQQAEDALSQGMDNLQQSLADTLSSGTLGSSSSGNVASYMGQMAMAMGKLGTLEGFIRQADNLRLQTYQQMVRLLTTRQSARALLAVHNYTLRLRALSSLWLARPRE

SEQ ID NO: 100315 - DNA, 1500 bp, Arabidopsis thaliana
  misc_feature (1)..(1500): Ceres Seq. ID no. 13604867
  misc_feature (1)..(1500): Ortholog of  Ceres SEQ ID NO 12636774 as cited in SEQ ID NO 372
  misc_feature (1)..(1500): Ortholog of  Ceres SEQ ID NO 12476493 as cited in SEQ ID NO 58163
  misc_feature (1)..(1500): Ortholog of  Ceres SEQ ID NO 13597295 as cited in SEQ ID NO 63743
  misc_feature (1)..(1500): Ortholog of  Ceres SEQ ID NO 13597439 as cited in SEQ ID NO 64081
  misc_feature (1)..(1500): Ortholog of  Ceres SEQ ID NO 13597233 as cited in SEQ ID NO 64370
  misc_feature (1)..(1500): Ortholog of  Ceres SEQ ID NO 15226354 as cited in SEQ ID NO 0
accgaccactgtactgaatctttaagcctctcaacgtgttttttatatatattttgaaaatcttttacgccttaaaaggatctacgataattaaaaaaaaatggcaacggaatgcattgcaacggtccctcaaatattcagtgaaaacaaaaccaaagaggattcttcgatcttcgatgcaaagctccttaatcagcactcgcaccacatacctcaacagttcgtatggcccgaccacgagaaaccttctacggatgttcaacctctccaagtcccactcatagacctagccggtttcctctccggcgactcgtgcttggcatcggaggctactagactcgtctcaaaggctgcaacgaaacatggcttcttcctaatcactaaccatggtgtcgatgagagcctcttgtctcgtgcctatctgcatatggactctttctttaaggccccggcttgtgagaagcagaaggctcagaggaagtggggtgagagctccggttacgctagtagtttcgtcgggagattctcctcaaagctcccgtggaaggagactctgtcgtttaagttctctcccgaggagaagatccattcccaaaccgttaaagactttgtttctaagaaaatgggcgatggatacgaagatttcgggaaggtttatcaagaatacgcggaggccatgaacactctctcactaaagatcatggagcttcttggaatgagtcttggggtcgagaggagatattttaaagagtttttcgaagacagcgattcaatattccggttgaattactacccgcagtgcaagcaaccggagcttgcactagggacaggaccccactgcgacccaacatctctaaccatacttcatcaagaccaagttggcggtctgcaagttttcgtggacaacaaatggcaatccattcctcctaaccctcacgctttcgtggtgaacataggcgacaccttcatggctctaacgaatggaagatacaagagttgtttgcatcgggcggtggtgaacagcgagagagaaaggaagacgtttgcattcttcctatgtccgaaaggggaaaaagtggtgaagccaccagaagaactagtaaacggagtgaagtctggtgaaagaaagtatcctgattttacgtggtctatgtttcttgagttcacacagaagcattatagggcagacatgaacactcttgacgagttctcaatttggcttaagaacagaagaagtttctaaaattgaggagacaatgttgtggtccagaaggtcacttgtagttatgtatagagctttcactgtttttcttaagatgttcaagacttgttaaggatcggagactttttttgttcttttattatcttgctctaggttgtctggtgttaaataaaagtagcaaaaaaataaaaatatatgtactccattgggtctacttatgatttgtttcgaaatggtttttttatagtctctaatgttaaatttatgtcactattact

SEQ ID NO: 100316 - protein, 380 aa, Arabidopsis thaliana
  peptide (1)..(380): Ceres Seq. ID no. 13604868
MATECIATVPQIFSENKTKEDSSIFDAKLLNQHSHHIPQQFVWPDHEKPSTDVQPLQVPLIDLAGFLSGDSCLASEATRLVSKAATKHGFFLITNHGVDESLLSRAYLHMDSFFKAPACEKQKAQRKWGESSGYASSFVGRFSSKLPWKETLSFKFSPEEKIHSQTVKDFVSKKMGDGYEDFGKVYQEYAEAMNTLSLKIMELLGMSLGVERRYFKEFFEDSDSIFRLNYYPQCKQPELALGTGPHCDPTSLTILHQDQVGGLQVFVDNKWQSIPPNPHAFVVNIGDTFMALTNGRYKSCLHRAVVNSERERKTFAFFLCPKGEKVVKPPEELVNGVKSGERKYPDFTWSMFLEFTQKHYRADMNTLDEFSIWLKNRRSF

SEQ ID NO: 100317 - protein, 271 aa, Arabidopsis thaliana
  peptide (1)..(271): Ceres Seq. ID no. 13604869
MDSFFKAPACEKQKAQRKWGESSGYASSFVGRFSSKLPWKETLSFKFSPEEKIHSQTVKDFVSKKMGDGYEDFGKVYQEYAEAMNTLSLKIMELLGMSLGVERRYFKEFFEDSDSIFRLNYYPQCKQPELALGTGPHCDPTSLTILHQDQVGGLQVFVDNKWQSIPPNPHAFVVNIGDTFMALTNGRYKSCLHRAVVNSERERKTFAFFLCPKGEKVVKPPEELVNGVKSGERKYPDFTWSMFLEFTQKHYRADMNTLDEFSIWLKNRRSF

SEQ ID NO: 100318 - protein, 206 aa, Arabidopsis thaliana
  peptide (1)..(206): Ceres Seq. ID no. 13604870
MGDGYEDFGKVYQEYAEAMNTLSLKIMELLGMSLGVERRYFKEFFEDSDSIFRLNYYPQCKQPELALGTGPHCDPTSLTILHQDQVGGLQVFVDNKWQSIPPNPHAFVVNIGDTFMALTNGRYKSCLHRAVVNSERERKTFAFFLCPKGEKVVKPPEELVNGVKSGERKYPDFTWSMFLEFTQKHYRADMNTLDEFSIWLKNRRSF

SEQ ID NO: 100319 - DNA, 864 bp, Arabidopsis thaliana
  misc_feature (1)..(864): Ceres Seq. ID no. 13604873
  misc_feature (1)..(864): Ortholog of  Ceres SEQ ID NO 13595919 as cited in SEQ ID NO 67751
atgttattttcgtcgtgcaaaataattttccaatataccctcaaggaaatgtcatcccacggccgagaagtagaggtgaccatctcatcggcaaaggatatcaagaacgtgaactggcgcaacggcccaaacaagccatacgccgttgtatggatcgatccgaagttcaaatcctccacaagagttgacgaagacggcaacacttgtacaacgtggaacgagacatttgtcatcgctttacctccggccaacgacgatgacgacaaggtatacatcaacatcgtacacgcaggccgtgaagagaacacaaagcccctcatcggctccgcccatctcagcctccgtgatgtcattgatgacgtcggcttcggcgtccccttcatgaaaaccctcaagctcaaacgcccctctggccgacctcagggcaaactcgacgtcactgtcaccgttcgagagactccaggatcaaattacgcgcttccttatggcgatccatacgcgccggaaaaggggagcaagttcggtgggatggggactggactggcggtcggggcggtggccggagttttgggtggggtggcattagcggagggactggaggctgtggaaggcgatgaggatgatgatgatgacgatgatgctgctgctgctgctgctgctgatgatgatgatgatgatgatgatgatgatgatgatgatgacgagtgagactttgagtttacagctatatcatctttcattggtgaagtcctgaattctgtgttgcaacataacaagcctaataacttcgattgaaaaacaagtaactcacattaatgttcgggtaagacttcacagaaaataatgcaaaggattgatatattc

SEQ ID NO: 100320 - protein, 235 aa, Arabidopsis thaliana
  peptide (1)..(235): Ceres Seq. ID no. 13604874
MLFSSCKIIFQYTLKEMSSHGREVEVTISSAKDIKNVNWRNGPNKPYAVVWIDPKFKSSTRVDEDGNTCTTWNETFVIALPPANDDDDKVYINIVHAGREENTKPLIGSAHLSLRDVIDDVGFGVPFMKTLKLKRPSGRPQGKLDVTVTVRETPGSNYALPYGDPYAPEKGSKFGGMGTGLAVGAVAGVLGGVALAEGLEAVEGDEDDDDDDDAAAAAAADDDDDDDDDDDDDDE

SEQ ID NO: 100321 - protein, 219 aa, Arabidopsis thaliana; identical to SEQ ID NO: 72769
  peptide (1)..(219): Ceres Seq. ID no. 13604875

SEQ ID NO: 100322 - DNA, 1756 bp, Arabidopsis thaliana
  misc_feature (1)..(1756): Ceres Seq. ID no. 13604876
  misc_feature (1)..(1756): Ortholog of  Ceres SEQ ID NO 15179918 as cited in SEQ ID NO 57077
ccacgcgtccggcaatgacttacgcgtggttatggacgcttctcgcctttgttctgacatggatggtttttcacctcatcaagatgaagaaggcggcaaccggagatttagaggccgaggcagaagcaagaagagatggtgcaacggatgtcatcattgttggggcgggtgttgcaggcgcttctcttgcttatgctttagctaaggatggacgacgagtacatgtgatagagagggacttaaaagagccacaaagattcatgggagagctgatgcaagcgggaggtcgcttcatgttagcccagcttggcctcgaagattgtttggaggacatagacgcacaagaagcgaagtccttggcaatatacaaggatggaaaacacgcgacattgccttttccagatgacaagagttttcctcatgagccagtaggtagactcttacgtaatggtcggctggtacaacgtttacgccaaaaagcagcttctcttagcaatgttcaattagaagaaggaacagtgaagtctttaattgaagaagaaggagtggtcaaaggagtgacatacaaaaatagcgcaggcgaagaaataacggcctttgcacctcttactgtcgtatgcgatggttgttattcgaaccttcgtcggtcactcgtggataatactgaggaagtcctctcgtacatggtgggttacgtcacgaagaatagccgacttgaagatccccatagtctacatttgatattttctaaacctttggtttgtgttatatatcaaataaccagtgatgaagttcgttgtgttgccgaagttcccgctgatagtattccttctatatcgaatggtgaaatgtctaccttcctcaagaaatcaatggctcctcagatacctgaaactggaaatcttcgggagatatttttgaaaggcatagaggaaggattaccagagataaaatcaacagcgacgaaaagtatgtcatcgagattgtgtgataaaagaggagtgattgtgttgggagatgcattcaatatgcgtcatcctataatcgcgtcaggaatgatggttgcactctcggacatttgcattctacgcaatcttctcaaaccattgcctaacctcagcaatactaagaaagtctctgatcttgtcaagtccttttacatcatccgcaagccaatgtcagcgaccgtgaacacgctcgcgagtatcttttcacaagtgcttgttgctacaacagacgaagcaagagagggaatgcgacaaggctgcttcaattacctagctcgtggagattttaaaacaaggggattgatgactattctcggaggcatgaaccctcaccctcttactctagtccttcatcttgtagccatcacccttacgtccatgggccacttgctctctccgtttccttcgcctcgtcgcttttggcatagcctcagaattcttgcctgggctttgcaaatgttgggtgcacatttagtggatgaaggattcaaggaaatgttgattccaacaaacgcagctgcttatcgaaggaactatatcgccacaaccactgtttgatcaatccataacacgaagactgttttattcggagatgaaaaataacaactcaaacagttaactttctacaaccaaataaataattgtgtgtatatgaagttgagcctatggttaagctctactgaattgtgttgaaaacaaacatggatatgttacatgctaatttgttatattctatttattgattcttg

SEQ ID NO: 100323 - protein, 520 aa, Arabidopsis thaliana
  peptide (1)..(520): Ceres Seq. ID no. 13604877
TRPAMTYAWLWTLLAFVLTWMVFHLIKMKKAATGDLEAEAEARRDGATDVIIVGAGVAGASLAYALAKDGRRVHVIERDLKEPQRFMGELMQAGGRFMLAQLGLEDCLEDIDAQEAKSLAIYKDGKHATLPFPDDKSFPHEPVGRLLRNGRLVQRLRQKAASLSNVQLEEGTVKSLIEEEGVVKGVTYKNSAGEEITAFAPLTVVCDGCYSNLRRSLVDNTEEVLSYMVGYVTKNSRLEDPHSLHLIFSKPLVCVIYQITSDEVRCVAEVPADSIPSISNGEMSTFLKKSMAPQIPETGNLREIFLKGIEEGLPEIKSTATKSMSSRLCDKRGVIVLGDAFNMRHPIIASGMMVALSDICILRNLLKPLPNLSNTKKVSDLVKSFYIIRKPMSATVNTLASIFSQVLVATTDEAREGMRQGCFNYLARGDFKTRGLMTILGGMNPHPLTLVLHLVAITLTSMGHLLSPFPSPRRFWHSLRILAWALQMLGAHLVDEGFKEMLIPTNAAAYRRNYIATTTV

SEQ ID NO: 100324 - protein, 516 aa, Arabidopsis thaliana
  peptide (1)..(516): Ceres Seq. ID no. 13604878
MTYAWLWTLLAFVLTWMVFHLIKMKKAATGDLEAEAEARRDGATDVIIVGAGVAGASLAYALAKDGRRVHVIERDLKEPQRFMGELMQAGGRFMLAQLGLEDCLEDIDAQEAKSLAIYKDGKHATLPFPDDKSFPHEPVGRLLRNGRLVQRLRQKAASLSNVQLEEGTVKSLIEEEGVVKGVTYKNSAGEEITAFAPLTVVCDGCYSNLRRSLVDNTEEVLSYMVGYVTKNSRLEDPHSLHLIFSKPLVCVIYQITSDEVRCVAEVPADSIPSISNGEMSTFLKKSMAPQIPETGNLREIFLKGIEEGLPEIKSTATKSMSSRLCDKRGVIVLGDAFNMRHPIIASGMMVALSDICILRNLLKPLPNLSNTKKVSDLVKSFYIIRKPMSATVNTLASIFSQVLVATTDEAREGMRQGCFNYLARGDFKTRGLMTILGGMNPHPLTLVLHLVAITLTSMGHLLSPFPSPRRFWHSLRILAWALQMLGAHLVDEGFKEMLIPTNAAAYRRNYIATTTV

SEQ ID NO: 100325 - protein, 500 aa, Arabidopsis thaliana
  peptide (1)..(500): Ceres Seq. ID no. 13604879
MVFHLIKMKKAATGDLEAEAEARRDGATDVIIVGAGVAGASLAYALAKDGRRVHVIERDLKEPQRFMGELMQAGGRFMLAQLGLEDCLEDIDAQEAKSLAIYKDGKHATLPFPDDKSFPHEPVGRLLRNGRLVQRLRQKAASLSNVQLEEGTVKSLIEEEGVVKGVTYKNSAGEEITAFAPLTVVCDGCYSNLRRSLVDNTEEVLSYMVGYVTKNSRLEDPHSLHLIFSKPLVCVIYQITSDEVRCVAEVPADSIPSISNGEMSTFLKKSMAPQIPETGNLREIFLKGIEEGLPEIKSTATKSMSSRLCDKRGVIVLGDAFNMRHPIIASGMMVALSDICILRNLLKPLPNLSNTKKVSDLVKSFYIIRKPMSATVNTLASIFSQVLVATTDEAREGMRQGCFNYLARGDFKTRGLMTILGGMNPHPLTLVLHLVAITLTSMGHLLSPFPSPRRFWHSLRILAWALQMLGAHLVDEGFKEMLIPTNAAAYRRNYIATTTV

SEQ ID NO: 100326 - DNA, 3510 bp, Arabidopsis thaliana
  misc_feature (1)..(3510): Ceres Seq. ID no. 13604883
  misc_feature (1)..(3510): Ortholog of  Ceres SEQ ID NO 13658778 as cited in SEQ ID NO 66511
atggcgtccacgcctcctcaaacttctaaaaaggtccgtaacaattccggtagcggccaaaccgtcaaatttgcaagacgaacatctagcggaagatatgtgagtttatctcgagataatatagaattatcaggcgagctctccggggattattctaactatacggtgcacatacctccgacgccggacaatcagcccatggccaccaaagccgaagagcaatacgtgtcaaattctttatttactggtggtttcaacagtgtaacacgtgcacatcttatggacaaagtgatcgattcagatgtcacacaccctcagatggctggcgctaaaggctcttcgtgtgccatgcctgcttgcgacggaaatgtcatgaaagacgagagaggaaaggacgtgatgccatgtgaatgccggtttaagatctgtagggattgcttcatggacgcccagaaagagacaggcctttgtccaggatgcaaggaacaatacaaaatcggggacctagatgacgatacgcctgactattctagtggtgctctccccttaccagctccagggaaagatcaacgtgggaacaacaacaacatgtctatgatgaagaggaaccaaaacggtgaatttgatcacaacagatggctattcgagacgcaaggcacatatgggtacggtaatgcgtattggcctcaagacgaaatgtatggcgatgatatggatgaagggatgagaggcggcatggtggaaacagctgacaagccatggcggccactgagccgacgaatccctattccagccgccatcattagtccttacagattactaatcgtcattcgttttgtcgtgctatgtttttttctaacttggaggatccgaaatcctaacgaagacgcaatatggttatggctcatgtctataatatgcgagctttggtttggattttcatggattctagaccagatccctaagttgtgtccaataaaccggtccactgacctggaagttcttcgtgacaaatttgacatgccttctccctccaacccaacagggaggtcggatctcccaggtattgacctttttgtgtcaacggcagatccagagaaagagccgccccttgtcaccgccaacacgattctgtccatattggccgttgattatccggtggagaaggtgtcatgctatctttctgatgatggaggagctcttctatcctttgaagctatggcagaagctgctagctttgcggatctctgggtacctttttgtcgcaaacataacattgagcctcgaaatccagactcgtatttcagtttgaagatagatccaacaaagaataagagcagaattgattttgtcaaggacagaagaaagattaagagggagtatgatgaattcaaggttcgcatcaacggcctccctgactcaatacggaggaggtcagatgcatttaatgcaagggaggaaatgaaagctctaaaacagatgagggagagcggaggtgatccaacagagcctgtgaaagtccccaaagccacgtggatggcagatggcacccactggccaggaacttgggcagcctctactcgagagcattccaaaggtgatcatgctgggattctccaggtgatgttgaaaccacctagcagcgatccattaattggaaatagcgacgataaagtcattgatttttcagacacggacactcgtttacccatgtttgtgtatgtgtcacgtgagaagcggcctggatatgatcacaacaagaaagctggagccatgaatgcacttgttcgtgcctctgctatcctctcaaatggaccttttatccttaatcttgattgtgatcattacatctataactgtaaggccgtacgagaagggatgtgttttatgatggacagaggtggtgaagacatttgctacattcagtttccgcaaagattcgaaggcatcgatccttctgatagatatgctaacaataacactgtattttttgacggtaatatgcgtgctctcgacggtgtccagggaccagtttatgttggaacaggtactatgtttaggcgctttgctctctatggttttgatccacccaaccctgacaagcttcttgagaagaaggaatcagaaacagaggctctaaccaccagtgactttgacccggaccttgatgtcacacaactccccaagcgctttgggaactccacactcctagctgagtcaattccaattgcagagttccaaggtcgtccattggcagaccacccggctgtcaagtacggtcgtcctcccggagcccttagagtccctcgtgacccacttgatgctaccactgtcgcagagtctgtttctgtaatctcttgttggtatgaggataaaacggagtggggagatagagttggatggatttatgggtcggtgacagaggacgtggtcacaggataccgcatgcataatcgtgggtggcgctcggtttactgcataactaagcgagattcttttcgaggctctgcacccattaatctcacggatcgtcttcaccaggtgttgcggtgggccactgggtctgttgagatcttcttctctagaaacaacgccattctcgcctccaaacgtctcaagttcctccaacgtctcgcatacctcaatgttgggatataccctttcacgtctctgtttctcatcctctattgttttcttccggcattctctcttttctctggacagttcatcgtgcggacgctcagtatctccttcttggtctaccttcttatgatcaccatttgtttgattggattggcggttttggaggtcaagtggtctggcattgggctggaagaatggtggagaaacgaacagtggtggctcatctcaggaacaagctctcacctttacgcagtggtccaaggagtcctcaaagtgattgcagggatcgagatctcctttaccttgacgaccaagtcagggggagatgacaatgaagacatatacgcggatttgtacatagtgaaatggtcgtcgctgatgataccgcctatagtgatagcaatggtgaacataatagcgattgtggtggcgttcatcaggacaatataccaagcggtgccacaatggagcaagctaatcggaggagcatttttcagcttctgggtgttggcgcatttgtatccatttgcaaaaggattgatgggacgaagaggcaaaactccaaccatagtttttgtgtgggcaggtctcattgccatcaccatctctctactgtggacggccataaacccaaacaccggacctgcagctgctgcagagggtgttggaggcggtggttttcaattcccgtaattaaaaaagcattcatataggcgacttgagagttttgtagactaatcacaagaaattaatacgtatactatctttgtttctttttgtttttgtttttgttcctggtagtaaattttcagataactacatgtatatctggattgagatgtcatgactgtataaatcagcctttgt

SEQ ID NO: 100327 - protein, 1111 aa, Arabidopsis thaliana
  peptide (1)..(1111): Ceres Seq. ID no. 13604884
MASTPPQTSKKVRNNSGSGQTVKFARRTSSGRYVSLSRDNIELSGELSGDYSNYTVHIPPTPDNQPMATKAEEQYVSNSLFTGGFNSVTRAHLMDKVIDSDVTHPQMAGAKGSSCAMPACDGNVMKDERGKDVMPCECRFKICRDCFMDAQKETGLCPGCKEQYKIGDLDDDTPDYSSGALPLPAPGKDQRGNNNNMSMMKRNQNGEFDHNRWLFETQGTYGYGNAYWPQDEMYGDDMDEGMRGGMVETADKPWRPLSRRIPIPAAIISPYRLLIVIRFVVLCFFLTWRIRNPNEDAIWLWLMSIICELWFGFSWILDQIPKLCPINRSTDLEVLRDKFDMPSPSNPTGRSDLPGIDLFVSTADPEKEPPLVTANTILSILAVDYPVEKVSCYLSDDGGALLSFEAMAEAASFADLWVPFCRKHNIEPRNPDSYFSLKIDPTKNKSRIDFVKDRRKIKREYDEFKVRINGLPDSIRRRSDAFNAREEMKALKQMRESGGDPTEPVKVPKATWMADGTHWPGTWAASTREHSKGDHAGILQVMLKPPSSDPLIGNSDDKVIDFSDTDTRLPMFVYVSREKRPGYDHNKKAGAMNALVRASAILSNGPFILNLDCDHYIYNCKAVREGMCFMMDRGGEDICYIQFPQRFEGIDPSDRYANNNTVFFDGNMRALDGVQGPVYVGTGTMFRRFALYGFDPPNPDKLLEKKESETEALTTSDFDPDLDVTQLPKRFGNSTLLAESIPIAEFQGRPLADHPAVKYGRPPGALRVPRDPLDATTVAESVSVISCWYEDKTEWGDRVGWIYGSVTEDVVTGYRMHNRGWRSVYCITKRDSFRGSAPINLTDRLHQVLRWATGSVEIFFSRNNAILASKRLKFLQRLAYLNVGIYPFTSLFLILYCFLPAFSLFSGQFIVRTLSISFLVYLLMITICLIGLAVLEVKWSGIGLEEWWRNEQWWLISGTSSHLYAVVQGVLKVIAGIEISFTLTTKSGGDDNEDIYADLYIVKWSSLMIPPIVIAMVNIIAIVVAFIRTIYQAVPQWSKLIGGAFFSFWVLAHLYPFAKGLMGRRGKTPTIVFVWAGLIAITISLLWTAINPNTGPAAAAEGVGGGGFQFP

SEQ ID NO: 100328 - protein, 1045 aa, Arabidopsis thaliana
  peptide (1)..(1045): Ceres Seq. ID no. 13604885
MATKAEEQYVSNSLFTGGFNSVTRAHLMDKVIDSDVTHPQMAGAKGSSCAMPACDGNVMKDERGKDVMPCECRFKICRDCFMDAQKETGLCPGCKEQYKIGDLDDDTPDYSSGALPLPAPGKDQRGNNNNMSMMKRNQNGEFDHNRWLFETQGTYGYGNAYWPQDEMYGDDMDEGMRGGMVETADKPWRPLSRRIPIPAAIISPYRLLIVIRFVVLCFFLTWRIRNPNEDAIWLWLMSIICELWFGFSWILDQIPKLCPINRSTDLEVLRDKFDMPSPSNPTGRSDLPGIDLFVSTADPEKEPPLVTANTILSILAVDYPVEKVSCYLSDDGGALLSFEAMAEAASFADLWVPFCRKHNIEPRNPDSYFSLKIDPTKNKSRIDFVKDRRKIKREYDEFKVRINGLPDSIRRRSDAFNAREEMKALKQMRESGGDPTEPVKVPKATWMADGTHWPGTWAASTREHSKGDHAGILQVMLKPPSSDPLIGNSDDKVIDFSDTDTRLPMFVYVSREKRPGYDHNKKAGAMNALVRASAILSNGPFILNLDCDHYIYNCKAVREGMCFMMDRGGEDICYIQFPQRFEGIDPSDRYANNNTVFFDGNMRALDGVQGPVYVGTGTMFRRFALYGFDPPNPDKLLEKKESETEALTTSDFDPDLDVTQLPKRFGNSTLLAESIPIAEFQGRPLADHPAVKYGRPPGALRVPRDPLDATTVAESVSVISCWYEDKTEWGDRVGWIYGSVTEDVVTGYRMHNRGWRSVYCITKRDSFRGSAPINLTDRLHQVLRWATGSVEIFFSRNNAILASKRLKFLQRLAYLNVGIYPFTSLFLILYCFLPAFSLFSGQFIVRTLSISFLVYLLMITICLIGLAVLEVKWSGIGLEEWWRNEQWWLISGTSSHLYAVVQGVLKVIAGIEISFTLTTKSGGDDNEDIYADLYIVKWSSLMIPPIVIAMVNIIAIVVAFIRTIYQAVPQWSKLIGGAFFSFWVLAHLYPFAKGLMGRRGKTPTIVFVWAGLIAITISLLWTAINPNTGPAAAAEGVGGGGFQFP

SEQ ID NO: 100329 - protein, 1018 aa, Arabidopsis thaliana
  peptide (1)..(1018): Ceres Seq. ID no. 13604886
MDKVIDSDVTHPQMAGAKGSSCAMPACDGNVMKDERGKDVMPCECRFKICRDCFMDAQKETGLCPGCKEQYKIGDLDDDTPDYSSGALPLPAPGKDQRGNNNNMSMMKRNQNGEFDHNRWLFETQGTYGYGNAYWPQDEMYGDDMDEGMRGGMVETADKPWRPLSRRIPIPAAIISPYRLLIVIRFVVLCFFLTWRIRNPNEDAIWLWLMSIICELWFGFSWILDQIPKLCPINRSTDLEVLRDKFDMPSPSNPTGRSDLPGIDLFVSTADPEKEPPLVTANTILSILAVDYPVEKVSCYLSDDGGALLSFEAMAEAASFADLWVPFCRKHNIEPRNPDSYFSLKIDPTKNKSRIDFVKDRRKIKREYDEFKVRINGLPDSIRRRSDAFNAREEMKALKQMRESGGDPTEPVKVPKATWMADGTHWPGTWAASTREHSKGDHAGILQVMLKPPSSDPLIGNSDDKVIDFSDTDTRLPMFVYVSREKRPGYDHNKKAGAMNALVRASAILSNGPFILNLDCDHYIYNCKAVREGMCFMMDRGGEDICYIQFPQRFEGIDPSDRYANNNTVFFDGNMRALDGVQGPVYVGTGTMFRRFALYGFDPPNPDKLLEKKESETEALTTSDFDPDLDVTQLPKRFGNSTLLAESIPIAEFQGRPLADHPAVKYGRPPGALRVPRDPLDATTVAESVSVISCWYEDKTEWGDRVGWIYGSVTEDVVTGYRMHNRGWRSVYCITKRDSFRGSAPINLTDRLHQVLRWATGSVEIFFSRNNAILASKRLKFLQRLAYLNVGIYPFTSLFLILYCFLPAFSLFSGQFIVRTLSISFLVYLLMITICLIGLAVLEVKWSGIGLEEWWRNEQWWLISGTSSHLYAVVQGVLKVIAGIEISFTLTTKSGGDDNEDIYADLYIVKWSSLMIPPIVIAMVNIIAIVVAFIRTIYQAVPQWSKLIGGAFFSFWVLAHLYPFAKGLMGRRGKTPTIVFVWAGLIAITISLLWTAINPNTGPAAAAEGVGGGGFQFP

SEQ ID NO: 100330 - DNA, 1662 bp, Arabidopsis thaliana
  misc_feature (1)..(1662): Ceres Seq. ID no. 13604887
  misc_feature (1)..(1662): Ortholog of  Ceres SEQ ID NO 14305697 as cited in SEQ ID NO 52505
  misc_feature (1)..(1662): Ortholog of  Ceres SEQ ID NO 15179023 as cited in SEQ ID NO 0
atatcatcaccttccccactaatactctatagtttgtttttgttcttcttataatctttatattttcagcaaacgaaagggaagtgtgtcagaaatctcagagggtgagaatcccaatgaggatcttacccgaacctcgaggttcggttccgtgtcttctccttcttgtgtcggttctcttatcagcgactctctcactcgctcgtgtcgtcgaagttgtcggttacgccgagagcaagatcaaaaccccccatgcattttcaggacttcgagtgacgatcgactgtaaggtgaataaaggccattttgttacaaaaggttcgggaaacattgacgacaaaggaaagtttggtcttaatattcctcatgacattgtctccgacaacggagcgttaaaggaggagtgttacgctcagcttcacagcgcggcgggaacaccttgtccggctcacgacggccttgagtccaccaagatcgtgtttttatccaaatccggggataaacacattttgggtctcaaacaaaatctgaaattttcaccggagatttgcgtttccaaattcttctggcctatgcctaagttgcctccttttaagggctttgatcatcctttccctttacctccacctttggaacttccaccgtttctcaagaagccatgtccacctaaatacagtcctcctgtggaggttccacccccggtaccagtttacgagccgccgccaaagaaagagattcccccgccggttccggtttacgatccaccgcctaagaaagaggttccaccacctgtcccagtttacaagccaccaccaaaggtggagcttccaccgcctattcctaagaagccttgtccacctaaaccgccgaagatagagcacccacctccggttccggtttacaagccaccgccaaagatagagaagccacctccggttccggtttacaagcccccgccaaagatagagcacccacctcccgttccggtacacaagctaccgaagaagccatgtccgcctaagaaagttgatccaccgccggtgccagtccacaaaccaccaacgaagaagccttgtccgcctaagaaagttgatccaccgccggttccagtccacaagccgccgccaaagatagtcattccaccgccgaagatagagcacccacctccagttccggtttacaagccgccgccgaagatagagcatccaccaatctacataccaccaattgtgaagaagccgtgtcctccgccggtaccaatatacaaaccaccggttgtgatccccaagaagccatgccctccgccggtaccagtatacaaaccaccggtagtggtgattccaaagaagccatgtccgccacttccacagctcccaccacttccaaagtttccacctcttcctcctaaatacattcaccaccccaagttcgggaaatggcctccgttgcctccacacccttgagaaacattaaatacgtatatatagatatacgtatactcatgtataatcaacgtgtttgcctttttttaatattttatctttgcatatgttttatatcttgtttcttttgttggctttgagttctctttgtgtagactggttgtttatattcccgcaatcttccaacaataatatggtaatgatacgtttctcttttatc

SEQ ID NO: 100331 - protein, 448 aa, Arabidopsis thaliana; identical to SEQ ID NO: 26270
  peptide (1)..(448): Ceres Seq. ID no. 13604888

SEQ ID NO: 100332 - protein, 296 aa, Arabidopsis thaliana; identical to SEQ ID NO: 26271
  peptide (1)..(296): Ceres Seq. ID no. 13604889

SEQ ID NO: 100333 - DNA, 3736 bp, Arabidopsis thaliana
  misc_feature (1)..(3736): Ceres Seq. ID no. 13604890
  misc_feature (1)..(3736): Ortholog of  Ceres SEQ ID NO 14303524 as cited in SEQ ID NO 59500
  misc_feature (1)..(3736): Ortholog of  Ceres SEQ ID NO 13658778 as cited in SEQ ID NO 66511
gaattcgcggccgcgtcgatacggctgcgagaagacgacagaaggggattgtcgattcggtttatttcgtctccttcgtcttccactcttactagtgcatgctctgaatctgtatgtaatgggagttcaacagtctggatccattatcctagccgggtcgggtcaaggtctttgagtaagagagacaattcgttttgattcggtgtagaagacatcatgaatactggtggtcggctcattgctggctctcacaacagaaacgaattcgttctcattaacgccgatgagagtgccagaatacgatcagtacaagaactgagtgggcaaacatgtcaaatctgtggagatgaaatcgaattaacggttagcagtgagctctttgttgcttgcaacgaatgcgcattcccggtttgtagaccatgctatgagtatgaacgtagagaaggaaatcaagcttgtcctcagtgcaaaactcgatacaaaaggattaaaggtagtccacgggttgatggagatgatgaagaagaagaagacattgatgatcttgagtatgagtttgatcatgggatggaccctgaacatgccgctgaagccgcactctcttcacgccttaacaccggtcgtggtggattggattcagctccacctggctctcagattcctcttttgacttattgtgatgaagatgctgatatgtattctgatcgtcatgctcttatcgtgcctccttcaacgggatatgggaatcgcgtctatcctgcaccgtttacagattcttctgcacctccacaggcgagatcaatggttcctcagaaagatattgcggaatatggttatggaagtgttgcttggaaggaccgtatggaagtttggaagagacgacaaggcgaaaagcttcaagtcattaagcatgaaggaggaaacaatggtcgaggttccaatgatgacgacgaactagatgatcctgacatgcctatgatggatgaaggaagacaacctctctcaagaaagctacctattcgttcaagcagaataaatccttacaggatgttaattctgtgtcgcctcgcgattcttggtcttttctttcattatagaattctccatccagtcaatgatgcatatggattatggttaacgtcagttatatgcgagatatggtttgcagtgtcttggattcttgatcaattccccaaatggtatcctatagaacgtgaaacatacctcgatagactctctctcaggtacgagaaggaaggaaaaccgtcaggattagcacctgttgatgtttttgttagtacagtggatccgttgaaagagccacccttgattacagcaaacacagttctttccattctagcagttgattatcctgtggataaggttgcgtgttatgtatcagacgatggtgcagctatgcttacatttgaagctctctctgatacagctgagtttgctagaaaatgggttcctttttgtaagaagtttaatatcgagccacgagctcctgagtggtatttttctcagaagatggattacctgaagaacaaagttcatcctgcttttgtcagggaacgtcgtgctatgaagagagattatgaggagtttaaagtgaagataaatgcactggttgctactgcacagaaagtgcctgaggaaggttggactatgcaagatggaactccttggcctggaaacaacgtccgtgaccatcctggaatgattcaggtgttcttgggtcatagtggagttcgtgatacggatggtaatgagttaccacgtctagtgtatgtttctcgtgagaagcggcctggatttgatcaccacaagaaagctggagctatgaattccttgatccgagtctctgctgttctatcaaacgctccttaccttcttaatgtcgattgtgatcactacatcaacaacagcaaagcaattagagaatctatgtgtttcatgatggacccgcaatcgggaaagaaagtttgttatgttcagtttccgcagagatttgatgggattgatagacatgatagatactcaaaccgtaacgttgtgttctttgatattaacatgaaaggtcttgatgggatacaaggaccgatatatgtcgggacaggttgtgtgtttagaagacaggctctttatggttttgatgcaccaaagaagaagaaaccaccaggcaaaacctgtaactgttggcctaaatggtgttgtttgtgttgtgggttgagaaagaagagtaaaacgaaagccaaagataagaaaactaacactaaagagacttcaaagcagattcatgcgctagagaatgtcgacgaaggtgttatcgtcccagtgtcaaatgttgagaagagatctgaagcaacacaattgaaattggagaagaagtttggacaatctccggttttcgttgcctctgctgttctacagaacggtggagttccccgtaacgcaagccccgcatgtttgttaagagaagccattcaagttattagctgcgggtacgaagataaaaccgaatggggaaaagagatcgggtggatttatggatcggtgactgaagatatcctgacgggtttcaagatgcattgccatggatggagatctgtgtactgtatgcctaagcgtgcagcttttaaaggatctgctcctattaacttgtcagatcgtcttcatcaagttctacgttgggctcttggctctgtagagattttcttgagcagacattgtccgatatggtatggttatggtggtggtttaaaatggttggagagattctcttacatcaactctgtcgtctatccttggacttcacttccattgatcgtctattgttctctccccgcggtttgtttactcacaggaaaattcatcgtccctgagataagcaactacgcaggtatactcttcatgctcatgttcatatccatagcagtaactggaatcctcgaaatgcaatggggaggtgtcggaatcgatgattggtggagaaacgagcagttttgggtaatcggaggggcctcctcgcatctatttgctctgtttcaaggtttgctcaaagttctagccggagttaacacgaatttcacagtcacttcaaaagcagcagacgatggagctttctctgagctttacatcttcaagtggacaactttgttgattcctccgacaacacttctgatcattaacatcattggagttattgtcggcgtttctgatgccattagcaatggctatgactcatggggacctctctttgggagacttttcttcgctctttgggtcattgttcatttatacccattcctcaagggaatgcttgggaagcaagacaaaatgcctacgattattgtggtctggtctattcttctagcttcgatcttgacactcttgtgggtcagagttaacccgtttgtggctaaagggggaccagtgttggagatctgtggtctgaattgtggaaactaagatcctcagtgaaagaagagcaaaggagtttgtgttggagctttggaagcaaatgtgttgatgatgatgcaagtgtgtttgtagacgaagatgtgcagtttttactttttacgacttgttaaaccttttttgttacccctaaattaattcttttgttatcatggttatactaatagaattgtttgtttttcttttttacatgtacttttagttattccgtagttattgtataatactgataacgatcatatatacacactttgtt

SEQ ID NO: 100334 - protein, 1084 aa, Arabidopsis thaliana
  peptide (1)..(1084): Ceres Seq. ID no. 13604891
MNTGGRLIAGSHNRNEFVLINADESARIRSVQELSGQTCQICGDEIELTVSSELFVACNECAFPVCRPCYEYERREGNQACPQCKTRYKRIKGSPRVDGDDEEEEDIDDLEYEFDHGMDPEHAAEAALSSRLNTGRGGLDSAPPGSQIPLLTYCDEDADMYSDRHALIVPPSTGYGNRVYPAPFTDSSAPPQARSMVPQKDIAEYGYGSVAWKDRMEVWKRRQGEKLQVIKHEGGNNGRGSNDDDELDDPDMPMMDEGRQPLSRKLPIRSSRINPYRMLILCRLAILGLFFHYRILHPVNDAYGLWLTSVICEIWFAVSWILDQFPKWYPIERETYLDRLSLRYEKEGKPSGLAPVDVFVSTVDPLKEPPLITANTVLSILAVDYPVDKVACYVSDDGAAMLTFEALSDTAEFARKWVPFCKKFNIEPRAPEWYFSQKMDYLKNKVHPAFVRERRAMKRDYEEFKVKINALVATAQKVPEEGWTMQDGTPWPGNNVRDHPGMIQVFLGHSGVRDTDGNELPRLVYVSREKRPGFDHHKKAGAMNSLIRVSAVLSNAPYLLNVDCDHYINNSKAIRESMCFMMDPQSGKKVCYVQFPQRFDGIDRHDRYSNRNVVFFDINMKGLDGIQGPIYVGTGCVFRRQALYGFDAPKKKKPPGKTCNCWPKWCCLCCGLRKKSKTKAKDKKTNTKETSKQIHALENVDEGVIVPVSNVEKRSEATQLKLEKKFGQSPVFVASAVLQNGGVPRNASPACLLREAIQVISCGYEDKTEWGKEIGWIYGSVTEDILTGFKMHCHGWRSVYCMPKRAAFKGSAPINLSDRLHQVLRWALGSVEIFLSRHCPIWYGYGGGLKWLERFSYINSVVYPWTSLPLIVYCSLPAVCLLTGKFIVPEISNYAGILFMLMFISIAVTGILEMQWGGVGIDDWWRNEQFWVIGGASSHLFALFQGLLKVLAGVNTNFTVTSKAADDGAFSELYIFKWTTLLIPPTTLLIINIIGVIVGVSDAISNGYDSWGPLFGRLFFALWVIVHLYPFLKGMLGKQDKMPTIIVVWSILLASILTLLWVRVNPFVAKGGPVLEICGLNCGN

SEQ ID NO: 100335 - protein, 967 aa, Arabidopsis thaliana
  peptide (1)..(967): Ceres Seq. ID no. 13604892
MDPEHAAEAALSSRLNTGRGGLDSAPPGSQIPLLTYCDEDADMYSDRHALIVPPSTGYGNRVYPAPFTDSSAPPQARSMVPQKDIAEYGYGSVAWKDRMEVWKRRQGEKLQVIKHEGGNNGRGSNDDDELDDPDMPMMDEGRQPLSRKLPIRSSRINPYRMLILCRLAILGLFFHYRILHPVNDAYGLWLTSVICEIWFAVSWILDQFPKWYPIERETYLDRLSLRYEKEGKPSGLAPVDVFVSTVDPLKEPPLITANTVLSILAVDYPVDKVACYVSDDGAAMLTFEALSDTAEFARKWVPFCKKFNIEPRAPEWYFSQKMDYLKNKVHPAFVRERRAMKRDYEEFKVKINALVATAQKVPEEGWTMQDGTPWPGNNVRDHPGMIQVFLGHSGVRDTDGNELPRLVYVSREKRPGFDHHKKAGAMNSLIRVSAVLSNAPYLLNVDCDHYINNSKAIRESMCFMMDPQSGKKVCYVQFPQRFDGIDRHDRYSNRNVVFFDINMKGLDGIQGPIYVGTGCVFRRQALYGFDAPKKKKPPGKTCNCWPKWCCLCCGLRKKSKTKAKDKKTNTKETSKQIHALENVDEGVIVPVSNVEKRSEATQLKLEKKFGQSPVFVASAVLQNGGVPRNASPACLLREAIQVISCGYEDKTEWGKEIGWIYGSVTEDILTGFKMHCHGWRSVYCMPKRAAFKGSAPINLSDRLHQVLRWALGSVEIFLSRHCPIWYGYGGGLKWLERFSYINSVVYPWTSLPLIVYCSLPAVCLLTGKFIVPEISNYAGILFMLMFISIAVTGILEMQWGGVGIDDWWRNEQFWVIGGASSHLFALFQGLLKVLAGVNTNFTVTSKAADDGAFSELYIFKWTTLLIPPTTLLIINIIGVIVGVSDAISNGYDSWGPLFGRLFFALWVIVHLYPFLKGMLGKQDKMPTIIVVWSILLASILTLLWVRVNPFVAKGGPVLEICGLNCGN

SEQ ID NO: 100336 - protein, 925 aa, Arabidopsis thaliana
  peptide (1)..(925): Ceres Seq. ID no. 13604893
MYSDRHALIVPPSTGYGNRVYPAPFTDSSAPPQARSMVPQKDIAEYGYGSVAWKDRMEVWKRRQGEKLQVIKHEGGNNGRGSNDDDELDDPDMPMMDEGRQPLSRKLPIRSSRINPYRMLILCRLAILGLFFHYRILHPVNDAYGLWLTSVICEIWFAVSWILDQFPKWYPIERETYLDRLSLRYEKEGKPSGLAPVDVFVSTVDPLKEPPLITANTVLSILAVDYPVDKVACYVSDDGAAMLTFEALSDTAEFARKWVPFCKKFNIEPRAPEWYFSQKMDYLKNKVHPAFVRERRAMKRDYEEFKVKINALVATAQKVPEEGWTMQDGTPWPGNNVRDHPGMIQVFLGHSGVRDTDGNELPRLVYVSREKRPGFDHHKKAGAMNSLIRVSAVLSNAPYLLNVDCDHYINNSKAIRESMCFMMDPQSGKKVCYVQFPQRFDGIDRHDRYSNRNVVFFDINMKGLDGIQGPIYVGTGCVFRRQALYGFDAPKKKKPPGKTCNCWPKWCCLCCGLRKKSKTKAKDKKTNTKETSKQIHALENVDEGVIVPVSNVEKRSEATQLKLEKKFGQSPVFVASAVLQNGGVPRNASPACLLREAIQVISCGYEDKTEWGKEIGWIYGSVTEDILTGFKMHCHGWRSVYCMPKRAAFKGSAPINLSDRLHQVLRWALGSVEIFLSRHCPIWYGYGGGLKWLERFSYINSVVYPWTSLPLIVYCSLPAVCLLTGKFIVPEISNYAGILFMLMFISIAVTGILEMQWGGVGIDDWWRNEQFWVIGGASSHLFALFQGLLKVLAGVNTNFTVTSKAADDGAFSELYIFKWTTLLIPPTTLLIINIIGVIVGVSDAISNGYDSWGPLFGRLFFALWVIVHLYPFLKGMLGKQDKMPTIIVVWSILLASILTLLWVRVNPFVAKGGPVLEICGLNCGN

SEQ ID NO: 100337 - DNA, 2603 bp, Arabidopsis thaliana
  misc_feature (1)..(2603): Ceres Seq. ID no. 13604898
  misc_feature (1)..(2603): Ortholog of  Ceres SEQ ID NO 13657677 as cited in SEQ ID NO 66119
actgtaaaagttttcaagtttcaatttttgttctcaatcgaaatcaaattgagtctctctcaaccacaaaaaatgattgttcaccgtataataccttcccgcgtaaaagaccctctcactcgatttaaacctctcaaaaacttgacaacttcttcatctcccgtattcgaaccctcttcttcttcttcttcttcttcttcttcggcttcgttttctgtttcagattctttcttggtggagaagatttgttttagtttgaagcaaggtaacaataatgtgagaaaccacctgattcggttaaaccctttagccgtcgttgaggttttataccgctgccgcaatgatttaactttaggtcaaagattcgtggatcaattaggtttccattttccgaatttcaagcatacgtctttgtctttaagcgctatgattcatattctcgtgaggagtggaagattatcagatgcacagagttgtcttcttaggatgattaggaggagtggtgtttctagactagagattgtgaattccttggattctacgtttagtaattgtggttccaatgattcggtttttgatttgttgattaggacttatgttcaggctaggaaacttagagaagcacatgaggcttttacattgctgagaagcaaaggttttacggtttctatcgatgcgtgtaacgctcttatcgggagcttggtgaggatcgggtgggttgaactggcttggggtgtttatcaggagatttctcggagtggtgttggtattaatgtctatactctcaatatcatggttaatgctttgtgcaaagatggtaaaatggaaaaagtcggaacctttttatcacaagtgcaagagaaaggggtttatccggatattgtaacatataatacattgattagtgcctactctagtaaaggtctcatggaagaggcatttgagttgatgaatgctatgccgggcaaagggtttagtcctggtgtttatacttataatactgtgataaatggactgtgtaagcatgggaaatatgagagagccaaggaagttttcgcggagatgttaagatccgggttgagtcctgactccactacctacagatcgttgctgatggaggcttgtaagaagggagatgtggttgaaacggaaaaggttttcagtgatatgagatctagagatgttgttcctgatttggtttgctttagctcgatgatgagtctttttactcggagtggaaatctcgataaggcattaatgtattttaacagtgtgaaggaggctggtctgattcctgacaatgtgatctataccattcttatccaagggtattgtagaaaaggtatgatctctgtagctatgaatttgagaaatgaaatgcttcagcagggttgtgctatggatgttgttacctacaacaccattttgcatggcttatgcaaacggaaaatgttgggtgaagcggataaattgttcaacgaaatgactgaaagggctttgtttccagattcttatactttaactatactgattgatggacattgtaagctcgggaatctgcagaacgcaatggagctctttcaaaagatgaaggaaaagagaatcagactcgatgttgtgacatacaacactctgttagatgggtttggtaaagtaggcgatatcgatacagcaaaagagatatgggcagatatggtatcaaaagagatacttcccactccaatatcttacagcattttggttaacgcgttgtgcagtaaaggccatctggctgaggcatttcgagtttgggatgaaatgatcagtaaaaatataaagccaacggtaatgatttgtaactctatgataaagggatattgtcgttctggtaatgcctcagatggagaaagctttttagagaagatgatctcggaaggttttgtgccggattgcatcagttacaacacattaatatatggttttgttagagaagaaaacatgagcaaagcttttggtttggtaaagaagatggaggaggagcaaggaggattagtacctgatgtatttacatataattcgatcttacatgggttttgtagacaaaatcagatgaaagaagccgaggttgtgctaaggaagatgatcgagagaggtgtcaatcccgataggtcaacgtatacttgtatgatcaatggatttgtttctcaagataacttaaccgaggcatttcggattcacgatgagatgctgcaaagaggattctctcctgatgataaattctgaatcagtatattttggattcttgctcaaattctacttgtgatagcttcaagctgatatcctagattgagttgatattggtgttttttggtcaaaggaccaaagatgtgtgtcactactcactacagaagctcaaggaacttgactttatcgaatagcaaaatggtccccgtacttgagaacatttcatattagacctcagtttcttgtaatctaccatttagtccttcaacatttatacgcatacgttttaattcttctgaaattaccaaattttgttgtatttagtcaaattatatgtatcagtattcataagtaaaatatatgaaagttgaaacagtagt

SEQ ID NO: 100338 - protein, 753 aa, Arabidopsis thaliana
  peptide (1)..(753): Ceres Seq. ID no. 13604899
TVKVFKFQFLFSIEIKLSLSQPQKMIVHRIIPSRVKDPLTRFKPLKNLTTSSSPVFEPSSSSSSSSSSASFSVSDSFLVEKICFSLKQGNNNVRNHLIRLNPLAVVEVLYRCRNDLTLGQRFVDQLGFHFPNFKHTSLSLSAMIHILVRSGRLSDAQSCLLRMIRRSGVSRLEIVNSLDSTFSNCGSNDSVFDLLIRTYVQARKLREAHEAFTLLRSKGFTVSIDACNALIGSLVRIGWVELAWGVYQEISRSGVGINVYTLNIMVNALCKDGKMEKVGTFLSQVQEKGVYPDIVTYNTLISAYSSKGLMEEAFELMNAMPGKGFSPGVYTYNTVINGLCKHGKYERAKEVFAEMLRSGLSPDSTTYRSLLMEACKKGDVVETEKVFSDMRSRDVVPDLVCFSSMMSLFTRSGNLDKALMYFNSVKEAGLIPDNVIYTILIQGYCRKGMISVAMNLRNEMLQQGCAMDVVTYNTILHGLCKRKMLGEADKLFNEMTERALFPDSYTLTILIDGHCKLGNLQNAMELFQKMKEKRIRLDVVTYNTLLDGFGKVGDIDTAKEIWADMVSKEILPTPISYSILVNALCSKGHLAEAFRVWDEMISKNIKPTVMICNSMIKGYCRSGNASDGESFLEKMISEGFVPDCISYNTLIYGFVREENMSKAFGLVKKMEEEQGGLVPDVFTYNSILHGFCRQNQMKEAEVVLRKMIERGVNPDRSTYTCMINGFVSQDNLTEAFRIHDEMLQRGFSPDDKF

SEQ ID NO: 100339 - protein, 729 aa, Arabidopsis thaliana
  peptide (1)..(729): Ceres Seq. ID no. 13604900
MIVHRIIPSRVKDPLTRFKPLKNLTTSSSPVFEPSSSSSSSSSSASFSVSDSFLVEKICFSLKQGNNNVRNHLIRLNPLAVVEVLYRCRNDLTLGQRFVDQLGFHFPNFKHTSLSLSAMIHILVRSGRLSDAQSCLLRMIRRSGVSRLEIVNSLDSTFSNCGSNDSVFDLLIRTYVQARKLREAHEAFTLLRSKGFTVSIDACNALIGSLVRIGWVELAWGVYQEISRSGVGINVYTLNIMVNALCKDGKMEKVGTFLSQVQEKGVYPDIVTYNTLISAYSSKGLMEEAFELMNAMPGKGFSPGVYTYNTVINGLCKHGKYERAKEVFAEMLRSGLSPDSTTYRSLLMEACKKGDVVETEKVFSDMRSRDVVPDLVCFSSMMSLFTRSGNLDKALMYFNSVKEAGLIPDNVIYTILIQGYCRKGMISVAMNLRNEMLQQGCAMDVVTYNTILHGLCKRKMLGEADKLFNEMTERALFPDSYTLTILIDGHCKLGNLQNAMELFQKMKEKRIRLDVVTYNTLLDGFGKVGDIDTAKEIWADMVSKEILPTPISYSILVNALCSKGHLAEAFRVWDEMISKNIKPTVMICNSMIKGYCRSGNASDGESFLEKMISEGFVPDCISYNTLIYGFVREENMSKAFGLVKKMEEEQGGLVPDVFTYNSILHGFCRQNQMKEAEVVLRKMIERGVNPDRSTYTCMINGFVSQDNLTEAFRIHDEMLQRGFSPDDKF

SEQ ID NO: 100340 - protein, 611 aa, Arabidopsis thaliana
  peptide (1)..(611): Ceres Seq. ID no. 13604901
MIHILVRSGRLSDAQSCLLRMIRRSGVSRLEIVNSLDSTFSNCGSNDSVFDLLIRTYVQARKLREAHEAFTLLRSKGFTVSIDACNALIGSLVRIGWVELAWGVYQEISRSGVGINVYTLNIMVNALCKDGKMEKVGTFLSQVQEKGVYPDIVTYNTLISAYSSKGLMEEAFELMNAMPGKGFSPGVYTYNTVINGLCKHGKYERAKEVFAEMLRSGLSPDSTTYRSLLMEACKKGDVVETEKVFSDMRSRDVVPDLVCFSSMMSLFTRSGNLDKALMYFNSVKEAGLIPDNVIYTILIQGYCRKGMISVAMNLRNEMLQQGCAMDVVTYNTILHGLCKRKMLGEADKLFNEMTERALFPDSYTLTILIDGHCKLGNLQNAMELFQKMKEKRIRLDVVTYNTLLDGFGKVGDIDTAKEIWADMVSKEILPTPISYSILVNALCSKGHLAEAFRVWDEMISKNIKPTVMICNSMIKGYCRSGNASDGESFLEKMISEGFVPDCISYNTLIYGFVREENMSKAFGLVKKMEEEQGGLVPDVFTYNSILHGFCRQNQMKEAEVVLRKMIERGVNPDRSTYTCMINGFVSQDNLTEAFRIHDEMLQRGFSPDDKF

SEQ ID NO: 100341 - DNA, 1953 bp, Arabidopsis thaliana
  misc_feature (1)..(1953): Ceres Seq. ID no. 13604902
  misc_feature (1)..(1953): Ortholog of  Ceres SEQ ID NO 15171212 as cited in SEQ ID NO 56899
  misc_feature (1)..(1953): Ortholog of  Ceres SEQ ID NO 12613725 as cited in SEQ ID NO 68196
atggaagatgacaaggatatatacacaaaagatggaactcttgacattcacaagaaaccagccaacaagaataaaactggaacctggaaagcttgcagattcattcttggaactgagtgctgtgaaagattagcttactatggaatgagtactaatctcatcaactatctcgagaaacaaatgaatatggaaaacgtctctgcttctaagagtgtcagtaactggtctggaacatgttacgctactcctttgatcggtgcttttatcgccgatgcttatctcggtcgatactggaccatcgcttcctttgtcgtcatctacattgccggaatgacgctattgacgatatcagcttcggttcctggtctaacaccaacctgcagcggagaaacctgtcacgcaacagcgggtcaaaccgctattacattcatagcgctttacttgatcgcactcggaactggagggatcaagccttgtgtctcttcctttggtgctgatcagtttgatgatacagacgaaaaagagaaagagtctaagagctctttctttaactggttctactttgtgatcaacgttggtgcaatgattgcttcctctgttctcgtttggattcagatgaatgttggttggggttggggtttaggtgttcccaccgtcgcaatggctatagccgtcgtgttcttcttcgccggaagcaacttctacaggctgcagaaaccaggaggaagtcctctcacaagaatgctgcaagtcattgtggcttcatgcagaaaatctaaagtgaaaattcctgaagatgaatctcttctctacgagaaccaagacgccgaaagcagtatcataggaagccgcaagctcgaacacaccaaaatattaacgttctttgataaggcagcagtggaaacagagagtgacaacaaaggagcagctaagtcgtcttcatggaagctatgcacagtgacacaagtagaagagctcaaagcactgatccgtctcttaccgatttgggccacagggattgttttcgcttcggtttatagccaaatggggactgtgtttgtactacaaggcaacacactggaccaacacatgggacctaacttcaaaatcccttccgcatcactctccttattcgatacgcttagtgtcctgttttgggcacctgtctacgacaagctaattgttcccttcgcccggaaatacacaggtcacgaacgcggattcacacagcttcaacggattggaatcgggcttgtaatctccatcttttctatggtctctgcgggaatcctcgaggtcgcaaggttaaactacgttcaaacacacaatctttacaatgaagagactatcccgatgacgattttctggcaagttccgcagtattttttggtgggttgcgccgaggttttcacgtttataggtcagcttgagttcttctatgaccaagctcctgatgctatgaggagtctctgctcggctttgtcgctcaccgcaattgcatttgggaactatctgagcacatttctggtgacattggtcactaaagtcacgagatcaggtggaagaccaggctggatcgctaagaacctcaacaatggtcatcttgattacttcttttggctattagctggtctgagtttcttgaatttcttggtctacctttggattgctaaatggtacacttacaagaaaacgaccgggcatgcgctttgatgatacaaaaaacataacgatggctgcaatcacgaattctgatttgaaattagtcgcaatgtttgataatctcgttactgaaacatatttacagatattatttttatttttcataaacaagcaagtttgaagttctttgcttgagtttaggttacaagatactacttttgaattcgactatccttattgctttgtggttgcagagttcaagggtttgtatttaacacaagcgttgtgctg

SEQ ID NO: 100342 - protein, 570 aa, Arabidopsis thaliana
  peptide (1)..(570): Ceres Seq. ID no. 13604903
MEDDKDIYTKDGTLDIHKKPANKNKTGTWKACRFILGTECCERLAYYGMSTNLINYLEKQMNMENVSASKSVSNWSGTCYATPLIGAFIADAYLGRYWTIASFVVIYIAGMTLLTISASVPGLTPTCSGETCHATAGQTAITFIALYLIALGTGGIKPCVSSFGADQFDDTDEKEKESKSSFFNWFYFVINVGAMIASSVLVWIQMNVGWGWGLGVPTVAMAIAVVFFFAGSNFYRLQKPGGSPLTRMLQVIVASCRKSKVKIPEDESLLYENQDAESSIIGSRKLEHTKILTFFDKAAVETESDNKGAAKSSSWKLCTVTQVEELKALIRLLPIWATGIVFASVYSQMGTVFVLQGNTLDQHMGPNFKIPSASLSLFDTLSVLFWAPVYDKLIVPFARKYTGHERGFTQLQRIGIGLVISIFSMVSAGILEVARLNYVQTHNLYNEETIPMTIFWQVPQYFLVGCAEVFTFIGQLEFFYDQAPDAMRSLCSALSLTAIAFGNYLSTFLVTLVTKVTRSGGRPGWIAKNLNNGHLDYFFWLLAGLSFLNFLVYLWIAKWYTYKKTTGHAL

SEQ ID NO: 100343 - protein, 522 aa, Arabidopsis thaliana
  peptide (1)..(522): Ceres Seq. ID no. 13604904
MSTNLINYLEKQMNMENVSASKSVSNWSGTCYATPLIGAFIADAYLGRYWTIASFVVIYIAGMTLLTISASVPGLTPTCSGETCHATAGQTAITFIALYLIALGTGGIKPCVSSFGADQFDDTDEKEKESKSSFFNWFYFVINVGAMIASSVLVWIQMNVGWGWGLGVPTVAMAIAVVFFFAGSNFYRLQKPGGSPLTRMLQVIVASCRKSKVKIPEDESLLYENQDAESSIIGSRKLEHTKILTFFDKAAVETESDNKGAAKSSSWKLCTVTQVEELKALIRLLPIWATGIVFASVYSQMGTVFVLQGNTLDQHMGPNFKIPSASLSLFDTLSVLFWAPVYDKLIVPFARKYTGHERGFTQLQRIGIGLVISIFSMVSAGILEVARLNYVQTHNLYNEETIPMTIFWQVPQYFLVGCAEVFTFIGQLEFFYDQAPDAMRSLCSALSLTAIAFGNYLSTFLVTLVTKVTRSGGRPGWIAKNLNNGHLDYFFWLLAGLSFLNFLVYLWIAKWYTYKKTTGHAL

SEQ ID NO: 100344 - protein, 510 aa, Arabidopsis thaliana
  peptide (1)..(510): Ceres Seq. ID no. 13604905
MNMENVSASKSVSNWSGTCYATPLIGAFIADAYLGRYWTIASFVVIYIAGMTLLTISASVPGLTPTCSGETCHATAGQTAITFIALYLIALGTGGIKPCVSSFGADQFDDTDEKEKESKSSFFNWFYFVINVGAMIASSVLVWIQMNVGWGWGLGVPTVAMAIAVVFFFAGSNFYRLQKPGGSPLTRMLQVIVASCRKSKVKIPEDESLLYENQDAESSIIGSRKLEHTKILTFFDKAAVETESDNKGAAKSSSWKLCTVTQVEELKALIRLLPIWATGIVFASVYSQMGTVFVLQGNTLDQHMGPNFKIPSASLSLFDTLSVLFWAPVYDKLIVPFARKYTGHERGFTQLQRIGIGLVISIFSMVSAGILEVARLNYVQTHNLYNEETIPMTIFWQVPQYFLVGCAEVFTFIGQLEFFYDQAPDAMRSLCSALSLTAIAFGNYLSTFLVTLVTKVTRSGGRPGWIAKNLNNGHLDYFFWLLAGLSFLNFLVYLWIAKWYTYKKTTGHAL

SEQ ID NO: 100345 - DNA, 1575 bp, Arabidopsis thaliana
  misc_feature (1)..(1575): Ceres Seq. ID no. 13604906
  misc_feature (1)..(1575): Ortholog of  Ceres SEQ ID NO 15171245 as cited in SEQ ID NO 52264
  misc_feature (1)..(1575): Ortholog of  Ceres SEQ ID NO 14303576 as cited in SEQ ID NO 68428
acttgtcagagacagaagattaaagaagaagaggcgtttctctctctttttttgcttcagaaaaaatggggtttttcttgtgttcctcttcttcaatcttcttcaagttcggaatctctataatctttctagtttctttctctggtttaactccttcagaagcttatgatcctttggacccgagtgggaacattactgtcaaatgggatatcataacctggactggagatggctatgtggcgactgtaacggtatataattttcagcaatatcgacacattcaagctccaggttggactcttggatggtcatgggcaaagagagaggttatatggggaatgaatggaggacaaaccacagaacaaggagattgttctaaattcaaaggaaccattcctcattgctgtaaaaagacaccttctgttgttgatctcttacctggatctccttacaatcagcagattgctaattgttgcagagggggtgtgcttaactcgtgggctcaagatcccgcaactgctgtttccgctttccagcttactgttggacaagctggaaccacaaataagacagttagggtacctaagaatttcactctcaaagctcctggaccgggatatacttgtagccccgcgaagattgtaaaaccgactagattcatcggtactgataaacgaagagttactcaagcattaatgacttggaatgtaacttgcacatactcgcagttcttagctcagaaaacaccaacttgctgtgtatctctttcatcgttttataacaagacaatagtttcttgtccaacatgctcttgtggatgcagaaacacttctcagccagggaattgtgtagacccaaaaggtccacggatagcatcagtcattccaaatccggggaagaacgcatatataccgcctctggtccaatgtacaaagcatatgtgtccagttagaatccactggcatgtgaaagtcaactacaaacagtactggagagttaaagtcaccatcacaaatttcaactacaacatgaactattcacagtggaatctcgtcgtgcagcatccgaatttcgacaatctaactcagacttttagcttcaactataaacctctgactccttatgcttccataaatgatactgggattctctggggaataaagttctacaatgatctgttgatgcaagctgggccatttggtaatgtacaatctgagctacttttccagaaagaagcatcagctttcacatttgagaaaggttgggcgtttccaagaagaatctatttcaatggagataactgtgtgatgcctcctcctgattcttacccttggctgcccaataccggctcgcacaaatcagtcggttccctgtttgcagcaatggccttgttactgattgtgttcctacatggaaacttgtaagaatcatcaagtgtagaattcttctgctgcagtttttcgaactgatataacccatcaagagagagttggtagcttagttttttgtgttctctcttgtctgtcctcttcctgtacaacgctttaatattagatggttaactagatccccttg

SEQ ID NO: 100346 - protein, 452 aa, Arabidopsis thaliana
  peptide (1)..(452): Ceres Seq. ID no. 13604907
MGFFLCSSSSIFFKFGISIIFLVSFSGLTPSEAYDPLDPSGNITVKWDIITWTGDGYVATVTVYNFQQYRHIQAPGWTLGWSWAKREVIWGMNGGQTTEQGDCSKFKGTIPHCCKKTPSVVDLLPGSPYNQQIANCCRGGVLNSWAQDPATAVSAFQLTVGQAGTTNKTVRVPKNFTLKAPGPGYTCSPAKIVKPTRFIGTDKRRVTQALMTWNVTCTYSQFLAQKTPTCCVSLSSFYNKTIVSCPTCSCGCRNTSQPGNCVDPKGPRIASVIPNPGKNAYIPPLVQCTKHMCPVRIHWHVKVNYKQYWRVKVTITNFNYNMNYSQWNLVVQHPNFDNLTQTFSFNYKPLTPYASINDTGILWGIKFYNDLLMQAGPFGNVQSELLFQKEASAFTFEKGWAFPRRIYFNGDNCVMPPPDSYPWLPNTGSHKSVGSLFAAMALLLIVFLHGNL

SEQ ID NO: 100347 - protein, 361 aa, Arabidopsis thaliana
  peptide (1)..(361): Ceres Seq. ID no. 13604908
MNGGQTTEQGDCSKFKGTIPHCCKKTPSVVDLLPGSPYNQQIANCCRGGVLNSWAQDPATAVSAFQLTVGQAGTTNKTVRVPKNFTLKAPGPGYTCSPAKIVKPTRFIGTDKRRVTQALMTWNVTCTYSQFLAQKTPTCCVSLSSFYNKTIVSCPTCSCGCRNTSQPGNCVDPKGPRIASVIPNPGKNAYIPPLVQCTKHMCPVRIHWHVKVNYKQYWRVKVTITNFNYNMNYSQWNLVVQHPNFDNLTQTFSFNYKPLTPYASINDTGILWGIKFYNDLLMQAGPFGNVQSELLFQKEASAFTFEKGWAFPRRIYFNGDNCVMPPPDSYPWLPNTGSHKSVGSLFAAMALLLIVFLHGNL

SEQ ID NO: 100348 - protein, 242 aa, Arabidopsis thaliana
  peptide (1)..(242): Ceres Seq. ID no. 13604909
MTWNVTCTYSQFLAQKTPTCCVSLSSFYNKTIVSCPTCSCGCRNTSQPGNCVDPKGPRIASVIPNPGKNAYIPPLVQCTKHMCPVRIHWHVKVNYKQYWRVKVTITNFNYNMNYSQWNLVVQHPNFDNLTQTFSFNYKPLTPYASINDTGILWGIKFYNDLLMQAGPFGNVQSELLFQKEASAFTFEKGWAFPRRIYFNGDNCVMPPPDSYPWLPNTGSHKSVGSLFAAMALLLIVFLHGNL

SEQ ID NO: 100349 - DNA, 1360 bp, Arabidopsis thaliana
  misc_feature (1)..(1360): Ceres Seq. ID no. 13604910
  misc_feature (1)..(1360): Ortholog of  Ceres SEQ ID NO 14306627 as cited in SEQ ID NO 53023
  misc_feature (1)..(1360): Ortholog of  Ceres SEQ ID NO 15174917 as cited in SEQ ID NO 53650
  misc_feature (1)..(1360): Ortholog of  Ceres SEQ ID NO 14304034 as cited in SEQ ID NO 53878
  misc_feature (1)..(1360): Ortholog of  Ceres SEQ ID NO 14307559 as cited in SEQ ID NO 54006
  misc_feature (1)..(1360): Ortholog of  Ceres SEQ ID NO 13663874 as cited in SEQ ID NO 67003
ataacttttatagattcacaaaaacttttcttcagattcacaatctcatcacaacccttcaaaaagagaaaagatctaaagaataaacaagagccctaatatcaaatcacaaccaaaaaaaccaaagaaagctaattaaagttttctctctagctattcctcttcttttcttgttcttgaaaactagggtttacttcaccaaaagataagatctttccccagaaaaagcaatacccaagtcatgtttctgtgtgtctgtatatagataaaacattacataccctaataaggttacacaaatagctataaaagagggaaaataagatagggattttttggggtgaggaaagatgggaagaggaagagtagagctcaagaggatagagaacaaaatcaacagacaagtgacgtttgctaaacgtagaaatggtttgctgaaaaaagcttatgagctttctgttctctgcgatgctgaagtctctctcatcgtcttctccaaccgtggcaagctctacgagttctgcagcacctccaacatgctcaagacactggaaaggtatcagaagtgtagctatggctccattgaagtcaacaacaaacctgctaaagagcttgagaacagctacagagagtacttgaagctgaaaggtagatatgaaaatctgcaacgtcagcagagaaatcttcttggagaggatcttggacctctgaattcaaaggagctagagcagcttgagcgtcaactagacggctctctgaagcaagttcgctgcatcaagacacagtatatgcttgaccagctctctgatcttcaaggtaaggagcatatcttgcttgatgccaacagagctttgtcaatgaagctggaagatatgatcggcgtgagacatcaccatataggaggaggatgggaaggtggtgatcaacagaatattgcctatggacatcctcaggctcattctcagggactataccaatctcttgaatgtgatcccactttgcaaattggatatagccatccagtgtgctcagagcaaatggctgtgacggtgcaaggtcagtcccaacaaggaaacggctacatccctggctggatgctgtgagcgatacttcttcccccaataaagatcttaagcaagtactggtggggtcttcgtggtgtgatcttagatcttatgcatatgaataataatgttattgcacaagacttttgcttttgtagacacaagtggctatagctgtaatagccttcaacatctctcttctgtttcaggatttgtttgtgcctattgtaattgcttatatatgtatggtttgtataatgtgtgaaatgttaacatcgaccatgtctcatctggtg

SEQ ID NO: 100350 - protein, 250 aa, Arabidopsis thaliana
  peptide (1)..(250): Ceres Seq. ID no. 13604911
MGRGRVELKRIENKINRQVTFAKRRNGLLKKAYELSVLCDAEVSLIVFSNRGKLYEFCSTSNMLKTLERYQKCSYGSIEVNNKPAKELENSYREYLKLKGRYENLQRQQRNLLGEDLGPLNSKELEQLERQLDGSLKQVRCIKTQYMLDQLSDLQGKEHILLDANRALSMKLEDMIGVRHHHIGGGWEGGDQQNIAYGHPQAHSQGLYQSLECDPTLQIGYSHPVCSEQMAVTVQGQSQQGNGYIPGWML

SEQ ID NO: 100351 - protein, 188 aa, Arabidopsis thaliana
  peptide (1)..(188): Ceres Seq. ID no. 13604912
MLKTLERYQKCSYGSIEVNNKPAKELENSYREYLKLKGRYENLQRQQRNLLGEDLGPLNSKELEQLERQLDGSLKQVRCIKTQYMLDQLSDLQGKEHILLDANRALSMKLEDMIGVRHHHIGGGWEGGDQQNIAYGHPQAHSQGLYQSLECDPTLQIGYSHPVCSEQMAVTVQGQSQQGNGYIPGWML

SEQ ID NO: 100352 - DNA, 2146 bp, Arabidopsis thaliana
  misc_feature (1)..(2146): Ceres Seq. ID no. 13604913
  misc_feature (1)..(2146): Ortholog of  Ceres SEQ ID NO 13654989 as cited in SEQ ID NO 63117
  misc_feature (1)..(2146): Ortholog of  Ceres SEQ ID NO 13584744 as cited in SEQ ID NO 69137
gtcaacttcatcttcttcttctctttctcctttcattttttttcttgtgtttcttcttttacgtgggtccttcaatctccatgaaggacccgaccattgcttaatcctaaacaaaactccaaaaatctaattcttttcgatctgttttatcttcaaataataatactctttgattgctaaaaccgattttgatcatcatcatgcactgttttccgtgtttctcttcgccaaagaacaagaaatcttcaactacgaatgagaccaacgacaacaacgaacccaaaccagatgataggagacgtgcagaagaaacagaggaaatagagcaatcggaaggaacatcgttgaagatattcactttccgggaattagctacagccacaaagaatttccggcaagagtgtttgctaggagaaggtggatttggtagggtttacaaaggaaccctcaaatctactggccaggtggtggctgtaaagcaactagacaagcatggattacatggaaacaaagagtttcaagctgaggttttgtctttaggccaacttgatcatccgaatcttgttaagcttattggttactgcgcggatggagatcaaaggcttttggtctatgattatatctctggaggttcacttcaagaccatcttcatgaaccaaaagcagacagtgatccgatggattggacaactaggatgcagatagcgtatgctgcagcgcaagggcttgattacttgcacgataaagcgaatccacccgtgatatacagagatttgaaagcttcaaacattttgttagatgatgacttttctcctaagctttctgattttggtctacataagctaggacccgggacaggtgataagatgatggctttatcttcacgagtaatgggaacttatggttactctgcacctgagtatacacgaggcggaaatctcactttgaaatcagatgtctatagctttggtgttgtgttgcttgagcttatcacgggtcgaagagctcttgatactactaggcctaatgatgaacagaacttagtttcttgggcacaaccgatatttagagatccgaagaggtatcccgatatggcagatccagttttggagaataaattctcagagagaggattaaaccaagcagtggcaatagcttcaatgtgtgtgcaagaggaagcatcagctcgtcctcttataagcgatgtaatggttgcgcttagcttcctttcgatgcctacagaagatggtattcccacaacagttcctatcttatccttcaaagacaagagcatgtctatagccttaagccgacatgattcaaatcttgtatctcctcctcctgagctagctacggaagatgacaaatctagtacctcatcaggcgaagaatcatctttggagagcgaaaaggagagtgtgagtaagaatgagtataagaagaaacatgaagaggaagatagctcaatggaatctgatgatgagtctgattctaactctgaacatgaaaaggaccaaccaccaaagcctattgatgagaagaaccaggcgcaaagcttgaagataaagtatagatatagctgggaagatattgatgtcaatgatgagaggctaagcagtaaaagcagccaaaaatcaaacgacgaaagtacttcttcgcgttatgatagcgacagagatcaagacgagaaagggaaagaagaagaggaagaggaagaggcagaagaaaagcatactcatattgaacacattgatagctcaaaaactgatgatgatcaaagtgtttactttgataatgatgatgattcaggagatgacaatggaggctctttgcatcggataaaatcagatgttgcgatcgattctattaaagagtgacatttttcaagattttttatcaatccgttgaagctcacaagaagtatttgaaacttttttgggtttatttttgggaaaaattcttaattgggtattaaaataagatacatattgacggtttttcttaacaaattataaccatctctctttatacatgatgaagatgttttggattgatagattaataaagaaacaagttgtataatcagataatctgattgagaaaacttatctcagcttttgtaatcctttaaaaaaaaatgttacgt

SEQ ID NO: 100353 - protein, 558 aa, Arabidopsis thaliana
  peptide (1)..(558): Ceres Seq. ID no. 13604914
MHCFPCFSSPKNKKSSTTNETNDNNEPKPDDRRRAEETEEIEQSEGTSLKIFTFRELATATKNFRQECLLGEGGFGRVYKGTLKSTGQVVAVKQLDKHGLHGNKEFQAEVLSLGQLDHPNLVKLIGYCADGDQRLLVYDYISGGSLQDHLHEPKADSDPMDWTTRMQIAYAAAQGLDYLHDKANPPVIYRDLKASNILLDDDFSPKLSDFGLHKLGPGTGDKMMALSSRVMGTYGYSAPEYTRGGNLTLKSDVYSFGVVLLELITGRRALDTTRPNDEQNLVSWAQPIFRDPKRYPDMADPVLENKFSERGLNQAVAIASMCVQEEASARPLISDVMVALSFLSMPTEDGIPTTVPILSFKDKSMSIALSRHDSNLVSPPPELATEDDKSSTSSGEESSLESEKESVSKNEYKKKHEEEDSSMESDDESDSNSEHEKDQPPKPIDEKNQAQSLKIKYRYSWEDIDVNDERLSSKSSQKSNDESTSSRYDSDRDQDEKGKEEEEEEEAEEKHTHIEHIDSSKTDDDQSVYFDNDDDSGDDNGGSLHRIKSDVAIDSIKE

SEQ ID NO: 100354 - protein, 399 aa, Arabidopsis thaliana
  peptide (1)..(399): Ceres Seq. ID no. 13604915
MDWTTRMQIAYAAAQGLDYLHDKANPPVIYRDLKASNILLDDDFSPKLSDFGLHKLGPGTGDKMMALSSRVMGTYGYSAPEYTRGGNLTLKSDVYSFGVVLLELITGRRALDTTRPNDEQNLVSWAQPIFRDPKRYPDMADPVLENKFSERGLNQAVAIASMCVQEEASARPLISDVMVALSFLSMPTEDGIPTTVPILSFKDKSMSIALSRHDSNLVSPPPELATEDDKSSTSSGEESSLESEKESVSKNEYKKKHEEEDSSMESDDESDSNSEHEKDQPPKPIDEKNQAQSLKIKYRYSWEDIDVNDERLSSKSSQKSNDESTSSRYDSDRDQDEKGKEEEEEEEAEEKHTHIEHIDSSKTDDDQSVYFDNDDDSGDDNGGSLHRIKSDVAIDSIKE

SEQ ID NO: 100355 - protein, 393 aa, Arabidopsis thaliana
  peptide (1)..(393): Ceres Seq. ID no. 13604916
MQIAYAAAQGLDYLHDKANPPVIYRDLKASNILLDDDFSPKLSDFGLHKLGPGTGDKMMALSSRVMGTYGYSAPEYTRGGNLTLKSDVYSFGVVLLELITGRRALDTTRPNDEQNLVSWAQPIFRDPKRYPDMADPVLENKFSERGLNQAVAIASMCVQEEASARPLISDVMVALSFLSMPTEDGIPTTVPILSFKDKSMSIALSRHDSNLVSPPPELATEDDKSSTSSGEESSLESEKESVSKNEYKKKHEEEDSSMESDDESDSNSEHEKDQPPKPIDEKNQAQSLKIKYRYSWEDIDVNDERLSSKSSQKSNDESTSSRYDSDRDQDEKGKEEEEEEEAEEKHTHIEHIDSSKTDDDQSVYFDNDDDSGDDNGGSLHRIKSDVAIDSIKE

SEQ ID NO: 100356 - DNA, 1936 bp, Arabidopsis thaliana
  misc_feature (1)..(1936): Ceres Seq. ID no. 13604921
  misc_feature (1)..(1936): Ortholog of  Ceres SEQ ID NO 15174638 as cited in SEQ ID NO 53185
  misc_feature (1)..(1936): Ortholog of  Ceres SEQ ID NO 15169072 as cited in SEQ ID NO 53955
  misc_feature (1)..(1936): Ortholog of  Ceres SEQ ID NO 13657460 as cited in SEQ ID NO 66115
  misc_feature (1)..(1936): Ortholog of  Ceres SEQ ID NO 13659394 as cited in SEQ ID NO 67049
atcagtctcttaactcaccatcacaagaacaagaaagatgaagagaggatacggagaaacatgggatccgccaccaaaaccactaccagcttctcgttccggagaaggtccttcaatggcggataagaagaaggctgatgatgacaacaacaacagcaacatggatgatgagcttcttgctgttcttggctacaaggttcgatcttctgagatggctgaagtagcacagaagcttgaacaacttgagatggtcttgtctaatgatgatgttggttctactgtcttaaacgactctgttcattataacccatctgatctctctaactgggtcgagagcatgctttctgagctgaacaacccggcttcttcggatcttgacacgacccgaagttgtgtggatagatccgaatacgatctcagagcaattccgggtctttctgcgtttccaaaggaagaggaagtctttgacgaggaagctagcagcaagaggatccgactcggatcgtggtgcgaatcgtcggacgagtcaactcggtccgtggtgctcgttgactctcaggagaccggagttagacttgtccacgcactagtggcgtgcgctgaggcgattcaccaggagaatctcaacttagctgacgcgctggtgaaacgcgtgggaacactcgcgggttctcaagctggagctatgggaaaagtcgctacgtattttgctcaagccttggctcgtcgtatttaccgtgattacacggcggagacggacgtttgcgcggcggtgaacccatctttcgaagaggttttggagatgcacttttacgagtcttgcccttacctgaagttcgctcatttcacggcgaaccaagcgattctagaagctgttacgacggcgcgtagagttcacgtcattgatttagggcttaatcaagggatgcaatggcctgctttaatgcaagctttagctctccgacccggtggacctccgtcgtttcgtctcaccggaatcggaccaccgcagacggagaattcagattcgcttcaacagttaggttggaaattagctcaattcgctcagaacatgggcgttgaattcgaattcaaaggcttagccgctgagagtttatcggatcttgaacccgaaatgttcgaaacccgacccgaatctgaaaccttagtggttaattcggtatttgagctccaccggttattagcccgatccggttcaatcgaaaagcttctcaatacggttaaagctattaaaccgagtatcgtaacggtggttgagcaagaagcgaaccacaacggaatcgtcttcctcgataggttcaacgaagcgcttcattactactcgagcttgtttgactcgctcgaagacagttatagtttaccgagtcaagaccgagttatgtcagaagtgtacttagggagacagatactcaacgttgttgcggcggaagggtccgatcgggtcgagcggcacgagacggctgcacagtggaggattcggatgaaatccgctgggtttgacccgattcatctcggatctagcgcgtttaaacaagcgagtatgcttttatcgctttacgctaccggagatggatacagagttgaagaaaatgacggatgtttaatgatagggtggcagacgcgaccactcatcacaacctcggcgtggaaactcgcctgagtcgcggcggtagagatgactcgcctgaaaccgggaaaaacaataaatgttttaaaaaattaggaaaagagaccgtaactttagttatgtttttactttttaacccgaagtttttgtgtgtttaacctttttgcctaaatgtttacaactttatctttttggaccttgtgcgtatctttgagagttaagagaacgagtaaaaaatcttgtatcgtagatcgagctaagtagttttcaataaatggaaggataacc

SEQ ID NO: 100357 - protein, 547 aa, Arabidopsis thaliana
  peptide (1)..(547): Ceres Seq. ID no. 13604922
MKRGYGETWDPPPKPLPASRSGEGPSMADKKKADDDNNNSNMDDELLAVLGYKVRSSEMAEVAQKLEQLEMVLSNDDVGSTVLNDSVHYNPSDLSNWVESMLSELNNPASSDLDTTRSCVDRSEYDLRAIPGLSAFPKEEEVFDEEASSKRIRLGSWCESSDESTRSVVLVDSQETGVRLVHALVACAEAIHQENLNLADALVKRVGTLAGSQAGAMGKVATYFAQALARRIYRDYTAETDVCAAVNPSFEEVLEMHFYESCPYLKFAHFTANQAILEAVTTARRVHVIDLGLNQGMQWPALMQALALRPGGPPSFRLTGIGPPQTENSDSLQQLGWKLAQFAQNMGVEFEFKGLAAESLSDLEPEMFETRPESETLVVNSVFELHRLLARSGSIEKLLNTVKAIKPSIVTVVEQEANHNGIVFLDRFNEALHYYSSLFDSLEDSYSLPSQDRVMSEVYLGRQILNVVAAEGSDRVERHETAAQWRIRMKSAGFDPIHLGSSAFKQASMLLSLYATGDGYRVEENDGCLMIGWQTRPLITTSAWKLA

SEQ ID NO: 100358 - protein, 521 aa, Arabidopsis thaliana
  peptide (1)..(521): Ceres Seq. ID no. 13604923
MADKKKADDDNNNSNMDDELLAVLGYKVRSSEMAEVAQKLEQLEMVLSNDDVGSTVLNDSVHYNPSDLSNWVESMLSELNNPASSDLDTTRSCVDRSEYDLRAIPGLSAFPKEEEVFDEEASSKRIRLGSWCESSDESTRSVVLVDSQETGVRLVHALVACAEAIHQENLNLADALVKRVGTLAGSQAGAMGKVATYFAQALARRIYRDYTAETDVCAAVNPSFEEVLEMHFYESCPYLKFAHFTANQAILEAVTTARRVHVIDLGLNQGMQWPALMQALALRPGGPPSFRLTGIGPPQTENSDSLQQLGWKLAQFAQNMGVEFEFKGLAAESLSDLEPEMFETRPESETLVVNSVFELHRLLARSGSIEKLLNTVKAIKPSIVTVVEQEANHNGIVFLDRFNEALHYYSSLFDSLEDSYSLPSQDRVMSEVYLGRQILNVVAAEGSDRVERHETAAQWRIRMKSAGFDPIHLGSSAFKQASMLLSLYATGDGYRVEENDGCLMIGWQTRPLITTSAWKLA

SEQ ID NO: 100359 - protein, 506 aa, Arabidopsis thaliana
  peptide (1)..(506): Ceres Seq. ID no. 13604924
MDDELLAVLGYKVRSSEMAEVAQKLEQLEMVLSNDDVGSTVLNDSVHYNPSDLSNWVESMLSELNNPASSDLDTTRSCVDRSEYDLRAIPGLSAFPKEEEVFDEEASSKRIRLGSWCESSDESTRSVVLVDSQETGVRLVHALVACAEAIHQENLNLADALVKRVGTLAGSQAGAMGKVATYFAQALARRIYRDYTAETDVCAAVNPSFEEVLEMHFYESCPYLKFAHFTANQAILEAVTTARRVHVIDLGLNQGMQWPALMQALALRPGGPPSFRLTGIGPPQTENSDSLQQLGWKLAQFAQNMGVEFEFKGLAAESLSDLEPEMFETRPESETLVVNSVFELHRLLARSGSIEKLLNTVKAIKPSIVTVVEQEANHNGIVFLDRFNEALHYYSSLFDSLEDSYSLPSQDRVMSEVYLGRQILNVVAAEGSDRVERHETAAQWRIRMKSAGFDPIHLGSSAFKQASMLLSLYATGDGYRVEENDGCLMIGWQTRPLITTSAWKLA

SEQ ID NO: 100360 - DNA, 2021 bp, Arabidopsis thaliana
  misc_feature (1)..(2021): Ceres Seq. ID no. 13604933
  misc_feature (1)..(2021): Ortholog of  Ceres SEQ ID NO 13594037 as cited in SEQ ID NO 55666
  misc_feature (1)..(2021): Ortholog of  Ceres SEQ ID NO 13657707 as cited in SEQ ID NO 66407
gttctaagcattgtgtataccaaacacgaaaagatcccttccccctaaaaaaaaaataaaaaaattcagagctagaaggggcctcatagttatagccacagttataggccccatctgctccatttttaacatgtgtagaaaatcatattagaaaagtaggaaaaaatacttgagcaaagatacctttttcgacctttagaatttttgtgaatatataggaaacagaaaaaatgggttctgatggtgacaagaagaagaaattcatcgtcgccggtagtgtctccggttttctagtcatcatggttgtctctgtagccgttgtaacgtctaaacactctcccaaagacgatgaaaatcatatcagaaaaaccaccaaagcggttcaagcagtttgtgcacccactgacttcaaagacacttgtgttaacagcttaatgggtgcttctcccgattccgatgaccctgtcgacctcatcaaactcggcttcaaggtcactatcaaatccatcaacgaaagcctggaaaaggcctctggagatatcaaagccaaggctgacaagaacccagaagcaaagggtgctttcgagctgtgtgagaagctgatgattgatgctatcgatgacttgaagaagtgtatggatcatggattctcggttgatcagatcgaggtctttgttgaggatctacgggtttggctaagtggctccatcgcattccagcaaacatgtatggattcctttggggaaattaagtctaatcttatgcaagacatgctcaagatcttcaaaacatcaagagagcttagtagcaatagccttgccatggttactagaatctccactcttatcccaaactccaaccttacaggactaaccggagctttagcaaagtacgcgagaaagcttctgtctacagaagatagtatcccaacttgggttggaccagaggcacgacggctcatggcagctcaaggaggaggacctggacctgtgaaggctaatgccgtggtggctcaagacggaactggacagttcaagactatcaccgatgctctaaatgctgtgcctaaaggcaacaaagtgccattcatcattcacatcaaagaaggtatctacaaggagaaagttacggtcaccaagaaaatgcctcacgtaactttcatcggcgatgggccaaacaagactctaatcaccggtagtctcaatttcggtatcggcaaggtcaagaccttcctaacagccacaatcacaatcgaaggcgaccacttcacagcgaagaacatcggaatcgagaacacagctggaccagaaggaggacaagcggtggcgttaagagtctcggctgattacgccgtattccacagctgtcaaatcgacgggcaccaagacacgttatacgttcactctcaccggcaattctaccgtgactgcacagtctcgggcaccgtcgatttcatcttcggagacgcgaaatgcatcctccagaactgtaaaatcgtcgtccgaaaacctaacaaaggtcaaacgtgtatggttacagctcagggacgaagtaacgtccgtgaatcgacaggattggtgctccatggctgccatataacgggagatccagcgtatattccgatgaaatctgtgaataaagcttacttaggaagaccgtggaaggagttctcgaggacaatcattatgaaaacgacgatcgatgacgtcatcgatccggcgggatggcttccctggagtggagattttgcgctcaagacgctatactacgccgagcatatgaatactgggcctggatcgaatcaggcccaaagagttaaatggcccggaattaagaaactaacgccccaagatgctcttttatacactggcgacagattcttacgtggcgatacgtggatcccacaaacacaagttccgtatacagctaaagtgtaggagattccaaattttgtaaattgatttaatttgtaaatgttttaaaactaaaaactgtttgaagaatgattaattgattatgtc

SEQ ID NO: 100361 - protein, 568 aa, Arabidopsis thaliana
  peptide (1)..(568): Ceres Seq. ID no. 13604934
MGSDGDKKKKFIVAGSVSGFLVIMVVSVAVVTSKHSPKDDENHIRKTTKAVQAVCAPTDFKDTCVNSLMGASPDSDDPVDLIKLGFKVTIKSINESLEKASGDIKAKADKNPEAKGAFELCEKLMIDAIDDLKKCMDHGFSVDQIEVFVEDLRVWLSGSIAFQQTCMDSFGEIKSNLMQDMLKIFKTSRELSSNSLAMVTRISTLIPNSNLTGLTGALAKYARKLLSTEDSIPTWVGPEARRLMAAQGGGPGPVKANAVVAQDGTGQFKTITDALNAVPKGNKVPFIIHIKEGIYKEKVTVTKKMPHVTFIGDGPNKTLITGSLNFGIGKVKTFLTATITIEGDHFTAKNIGIENTAGPEGGQAVALRVSADYAVFHSCQIDGHQDTLYVHSHRQFYRDCTVSGTVDFIFGDAKCILQNCKIVVRKPNKGQTCMVTAQGRSNVRESTGLVLHGCHITGDPAYIPMKSVNKAYLGRPWKEFSRTIIMKTTIDDVIDPAGWLPWSGDFALKTLYYAEHMNTGPGSNQAQRVKWPGIKKLTPQDALLYTGDRFLRGDTWIPQTQVPYTAKV

SEQ ID NO: 100362 - protein, 545 aa, Arabidopsis thaliana
  peptide (1)..(545): Ceres Seq. ID no. 13604935
MVVSVAVVTSKHSPKDDENHIRKTTKAVQAVCAPTDFKDTCVNSLMGASPDSDDPVDLIKLGFKVTIKSINESLEKASGDIKAKADKNPEAKGAFELCEKLMIDAIDDLKKCMDHGFSVDQIEVFVEDLRVWLSGSIAFQQTCMDSFGEIKSNLMQDMLKIFKTSRELSSNSLAMVTRISTLIPNSNLTGLTGALAKYARKLLSTEDSIPTWVGPEARRLMAAQGGGPGPVKANAVVAQDGTGQFKTITDALNAVPKGNKVPFIIHIKEGIYKEKVTVTKKMPHVTFIGDGPNKTLITGSLNFGIGKVKTFLTATITIEGDHFTAKNIGIENTAGPEGGQAVALRVSADYAVFHSCQIDGHQDTLYVHSHRQFYRDCTVSGTVDFIFGDAKCILQNCKIVVRKPNKGQTCMVTAQGRSNVRESTGLVLHGCHITGDPAYIPMKSVNKAYLGRPWKEFSRTIIMKTTIDDVIDPAGWLPWSGDFALKTLYYAEHMNTGPGSNQAQRVKWPGIKKLTPQDALLYTGDRFLRGDTWIPQTQVPYTAKV

SEQ ID NO: 100363 - protein, 500 aa, Arabidopsis thaliana
  peptide (1)..(500): Ceres Seq. ID no. 13604936
MGASPDSDDPVDLIKLGFKVTIKSINESLEKASGDIKAKADKNPEAKGAFELCEKLMIDAIDDLKKCMDHGFSVDQIEVFVEDLRVWLSGSIAFQQTCMDSFGEIKSNLMQDMLKIFKTSRELSSNSLAMVTRISTLIPNSNLTGLTGALAKYARKLLSTEDSIPTWVGPEARRLMAAQGGGPGPVKANAVVAQDGTGQFKTITDALNAVPKGNKVPFIIHIKEGIYKEKVTVTKKMPHVTFIGDGPNKTLITGSLNFGIGKVKTFLTATITIEGDHFTAKNIGIENTAGPEGGQAVALRVSADYAVFHSCQIDGHQDTLYVHSHRQFYRDCTVSGTVDFIFGDAKCILQNCKIVVRKPNKGQTCMVTAQGRSNVRESTGLVLHGCHITGDPAYIPMKSVNKAYLGRPWKEFSRTIIMKTTIDDVIDPAGWLPWSGDFALKTLYYAEHMNTGPGSNQAQRVKWPGIKKLTPQDALLYTGDRFLRGDTWIPQTQVPYTAKV

SEQ ID NO: 100364 - DNA, 2237 bp, Arabidopsis thaliana
  misc_feature (1)..(2237): Ceres Seq. ID no. 13604939
  misc_feature (1)..(2237): Ortholog of  Ceres SEQ ID NO 13597375 as cited in SEQ ID NO 63986
catcgctgtctggaatgccgaactcaaggaacctcactaaactcaaatcttcctctcagtttctcccactcttcttcctcaaccttccgatttatcggattactctaaaatacccaaaatggaatctcatggaaaaacccatcagaaagagcacgataatgatctctctccgaaacccataacgttgtcaaagtattcgaaacgggtcgagttaaagactctgcttgatcggagcgaccgcggcgcaggattggctgggaaaagggttgtgattggtggttgggttaagtctgctagagcggttaagaaaaattctcctcctcctcctctgcctgtagttgccgccccttcgccgtcgagtggtggggatcaagctcatacgacggccaacattaggtgcacggagataatccaatcgaaaatgaatattttcaagagatttttcgatgtactgagcggtggtggtaagacttatccaatctttgataagacagaactcgccggtcagaaggccgtgccaccaccggagtatgttttttacttcttgatcagtgatggctcctccatctccagtctccaggttgttgttgattctgcgttgtcaactgttccagcaactcagcttatggctctagggacttgtattgtagctgaaggtgtgttaagactaccattggctgcttctgcaaaacatgtaattgagcttgaggcagagaagcttcttcatgttggaacagtggatccagagaagtatccactctcgaagaaacagcttcctctgcatatgcttagagacttctctcatttccgtccccgcacaactacggttgggtcggtgactcgagtccacagtgcgctaaccttagcaagccacacattccttcaataccatgggtttcagtatgttcaagtaccagtcatcacaacaaccactggatttggcgaaatgtttagggtcactactcttttaggtaaaactgatgataaagaggagaagaagcctcctgtccaagaaaaagatggatttagcattgacaccgtaaaggctgtgataaaggaaaagacgaggcttattgatcacctcaagagatccgacagcaaccgagaaaccgtggttgctgctgtacacgacttgaagaaaacgaacgatcttgcatcgcagattgagatgaaacaaaaatccaaaacaggaactttggtcaaacctgagaagcttgatttctcgaaagatttctttggtcgcgacacttatctgactgcttctgggaggtttcatcttgagagctatgcttctgcacttggaaaagtttatacctttggaccaagattcatagctgataaaattgacaatgcaaggcatttggcagagaagtggaatgtggaaaccgaaatggctttcgcggaattggatgatgctatggattgtgctgatgaatacttcaagttcctctgcaaatatgttctggaaaatcgcgatgaagacatgaaattcatatcaaaacgagttgacaagaccatcaccacacgtctcgaagcaacagcatccagctcccttttgagattctcctataccgaagtgattagtcttctgcaaaaggcaaccactacaaaatttgaaaccaagcctgagtggggagttgctttaacaacagagcatctaagttatctgactgatgagatctacaaaggtcctgtaattgtacatacctacccgaaagcaattaaacagttttacgtaaggttgaatgatgataagaagactgtagcagcgtttgatctggtcgtaccaaaggttggtgttgtgatcaccgggagccaaaacgaagaacggtttgagattctggatgcgaggatcggggaatccggattcacgagggagaagttcgagtggtacttagatttaaggaggcatgggacagtgaaacattcaggaataagcctaagcatggaacaaatgcttctgtatgcgaccgggcttcctgatatcaaagatgccattcctttcccaagaagttggggcaaagcaaacaattaaagcagcctcaagctatttatgtacaaacttgaagttacattgttgtgtattctctgtaaccatacttgggtgtgaaataataaggaacccctataccaaattgttcataatcctataccaagttttagtatatttgtattgataacatatctactcaaaattgtactcactgcgactagatttgatgttctatagttgattc

SEQ ID NO: 100365 - protein, 638 aa, Arabidopsis thaliana
  peptide (1)..(638): Ceres Seq. ID no. 13604940
MESHGKTHQKEHDNDLSPKPITLSKYSKRVELKTLLDRSDRGAGLAGKRVVIGGWVKSARAVKKNSPPPPLPVVAAPSPSSGGDQAHTTANIRCTEIIQSKMNIFKRFFDVLSGGGKTYPIFDKTELAGQKAVPPPEYVFYFLISDGSSISSLQVVVDSALSTVPATQLMALGTCIVAEGVLRLPLAASAKHVIELEAEKLLHVGTVDPEKYPLSKKQLPLHMLRDFSHFRPRTTTVGSVTRVHSALTLASHTFLQYHGFQYVQVPVITTTTGFGEMFRVTTLLGKTDDKEEKKPPVQEKDGFSIDTVKAVIKEKTRLIDHLKRSDSNRETVVAAVHDLKKTNDLASQIEMKQKSKTGTLVKPEKLDFSKDFFGRDTYLTASGRFHLESYASALGKVYTFGPRFIADKIDNARHLAEKWNVETEMAFAELDDAMDCADEYFKFLCKYVLENRDEDMKFISKRVDKTITTRLEATASSSLLRFSYTEVISLLQKATTTKFETKPEWGVALTTEHLSYLTDEIYKGPVIVHTYPKAIKQFYVRLNDDKKTVAAFDLVVPKVGVVITGSQNEERFEILDARIGESGFTREKFEWYLDLRRHGTVKHSGISLSMEQMLLYATGLPDIKDAIPFPRSWGKANN

SEQ ID NO: 100366 - protein, 537 aa, Arabidopsis thaliana
  peptide (1)..(537): Ceres Seq. ID no. 13604941
MNIFKRFFDVLSGGGKTYPIFDKTELAGQKAVPPPEYVFYFLISDGSSISSLQVVVDSALSTVPATQLMALGTCIVAEGVLRLPLAASAKHVIELEAEKLLHVGTVDPEKYPLSKKQLPLHMLRDFSHFRPRTTTVGSVTRVHSALTLASHTFLQYHGFQYVQVPVITTTTGFGEMFRVTTLLGKTDDKEEKKPPVQEKDGFSIDTVKAVIKEKTRLIDHLKRSDSNRETVVAAVHDLKKTNDLASQIEMKQKSKTGTLVKPEKLDFSKDFFGRDTYLTASGRFHLESYASALGKVYTFGPRFIADKIDNARHLAEKWNVETEMAFAELDDAMDCADEYFKFLCKYVLENRDEDMKFISKRVDKTITTRLEATASSSLLRFSYTEVISLLQKATTTKFETKPEWGVALTTEHLSYLTDEIYKGPVIVHTYPKAIKQFYVRLNDDKKTVAAFDLVVPKVGVVITGSQNEERFEILDARIGESGFTREKFEWYLDLRRHGTVKHSGISLSMEQMLLYATGLPDIKDAIPFPRSWGKANN

SEQ ID NO: 100367 - protein, 469 aa, Arabidopsis thaliana
  peptide (1)..(469): Ceres Seq. ID no. 13604942
MALGTCIVAEGVLRLPLAASAKHVIELEAEKLLHVGTVDPEKYPLSKKQLPLHMLRDFSHFRPRTTTVGSVTRVHSALTLASHTFLQYHGFQYVQVPVITTTTGFGEMFRVTTLLGKTDDKEEKKPPVQEKDGFSIDTVKAVIKEKTRLIDHLKRSDSNRETVVAAVHDLKKTNDLASQIEMKQKSKTGTLVKPEKLDFSKDFFGRDTYLTASGRFHLESYASALGKVYTFGPRFIADKIDNARHLAEKWNVETEMAFAELDDAMDCADEYFKFLCKYVLENRDEDMKFISKRVDKTITTRLEATASSSLLRFSYTEVISLLQKATTTKFETKPEWGVALTTEHLSYLTDEIYKGPVIVHTYPKAIKQFYVRLNDDKKTVAAFDLVVPKVGVVITGSQNEERFEILDARIGESGFTREKFEWYLDLRRHGTVKHSGISLSMEQMLLYATGLPDIKDAIPFPRSWGKANN

SEQ ID NO: 100368 - DNA, 1742 bp, Arabidopsis thaliana
  misc_feature (1)..(1742): Ceres Seq. ID no. 13604949
  misc_feature (1)..(1742): Ortholog of  Ceres SEQ ID NO 13657460 as cited in SEQ ID NO 66115
  misc_feature (1)..(1742): Ortholog of  Ceres SEQ ID NO 13659394 as cited in SEQ ID NO 67049
aaaataatatttattattgccattgaaaaagactcatttgatcgagagagaaaaagaatcatttgaaccaaaagcatctttttctatcttttcaaatgcttacttccttcaaatcctctagctcctcctccgaagatgccaccgctaccaccaccgagaatcctcctcctttgtgcatcgcctcctcctcggccgcaacctccgcctcacatcacctccgtcgtcttcttttcaccgctgcgaatttcgtctcccagtcaaacttcaccgccgctcaaaacttactctcaatcctctcccttaactcttctcctcacggcgactccaccgagcgacttgtacacctcttcactaaagccttgtccgtacgaatcaaccgtcagcaacaagatcagacggctgaaacggttgccacgtggacgacgaacgaaatgacgatgagtaactccacggtgttcacgagcagtgtatgcaaagaacagttcttgtttcgaaccaagaacaacaattctgacttcgagtcttgttactatctttggctaaaccaactaacgccgtttattcggttcggtcatttaacggcgaaccaagctatcctcgacgcgacggagacaaacgataacggagctctacatatacttgatttagatatatcacaaggacttcaatggcctccattgatgcaagccctagcagagaggtcatcaaaccctagcagtccacctccatctctccgcataaccggatgcggtcgagatgtaaccggattaaaccgaactggagaccggttaacccggttcgctgactctttaggtctccaattccagtttcacacgctagtgatcgtagaagaagatctcgccggacttttgctacagatccgattgttagctctctcagccgtacaaggagagaccattgccgtcaattgtgttcacttcctccacaaaatatttaacgacgatggagatatgatcggtcacttcttgtcagcgatcaagagcttaaactctagaatcgttacaatggcagagagagaagctaatcatggagatcactcgttcttgaatagattctctgaggcagtggatcattacatggcgatctttgattcgttggaagcgacgttgccgccaaatagccgagagagactaaccctagagcaacggtggttcggtaaggagattttggatgttgtggcggcggaagagacggagagaaagcaaagacatcggaggtttgagatttgggaagagatgatgaagaggtttggtttcgttaacgttcctattggaagctttgctttgtctcaagctaagcttcttcttagacttcattatccttcagaaggttataatcttcagttccttaacaattctttgtttcttggctggcaaaatcgtcccctcttctccgtttcgtcgtggaaatgatccaaagagaaggacaaaaaaacctatatatctaggtatatagtagacaaaaaaaaagatcgataatttttggtgttagggcaaaaaatgattaagcagatgatggaagaggacgatggctccggcgaagattgtcgacgccggcggattcttgggatgtgtgtctttttgtttcttgggaagctcaaacaaagagacaacctaatcttttgtgtttttaacctactaatatttactaatatctatattttttttgtcaaactcaatcttaggtgtatcgttttgacatatataatcccattctgtctc

SEQ ID NO: 100369 - protein, 445 aa, Arabidopsis thaliana
  peptide (1)..(445): Ceres Seq. ID no. 13604950
MLTSFKSSSSSSEDATATTTENPPPLCIASSSAATSASHHLRRLLFTAANFVSQSNFTAAQNLLSILSLNSSPHGDSTERLVHLFTKALSVRINRQQQDQTAETVATWTTNEMTMSNSTVFTSSVCKEQFLFRTKNNNSDFESCYYLWLNQLTPFIRFGHLTANQAILDATETNDNGALHILDLDISQGLQWPPLMQALAERSSNPSSPPPSLRITGCGRDVTGLNRTGDRLTRFADSLGLQFQFHTLVIVEEDLAGLLLQIRLLALSAVQGETIAVNCVHFLHKIFNDDGDMIGHFLSAIKSLNSRIVTMAEREANHGDHSFLNRFSEAVDHYMAIFDSLEATLPPNSRERLTLEQRWFGKEILDVVAAEETERKQRHRRFEIWEEMMKRFGFVNVPIGSFALSQAKLLLRLHYPSEGYNLQFLNNSLFLGWQNRPLFSVSSWK

SEQ ID NO: 100370 - protein, 333 aa, Arabidopsis thaliana
  peptide (1)..(333): Ceres Seq. ID no. 13604951
MTMSNSTVFTSSVCKEQFLFRTKNNNSDFESCYYLWLNQLTPFIRFGHLTANQAILDATETNDNGALHILDLDISQGLQWPPLMQALAERSSNPSSPPPSLRITGCGRDVTGLNRTGDRLTRFADSLGLQFQFHTLVIVEEDLAGLLLQIRLLALSAVQGETIAVNCVHFLHKIFNDDGDMIGHFLSAIKSLNSRIVTMAEREANHGDHSFLNRFSEAVDHYMAIFDSLEATLPPNSRERLTLEQRWFGKEILDVVAAEETERKQRHRRFEIWEEMMKRFGFVNVPIGSFALSQAKLLLRLHYPSEGYNLQFLNNSLFLGWQNRPLFSVSSWK

SEQ ID NO: 100371 - protein, 331 aa, Arabidopsis thaliana
  peptide (1)..(331): Ceres Seq. ID no. 13604952
MSNSTVFTSSVCKEQFLFRTKNNNSDFESCYYLWLNQLTPFIRFGHLTANQAILDATETNDNGALHILDLDISQGLQWPPLMQALAERSSNPSSPPPSLRITGCGRDVTGLNRTGDRLTRFADSLGLQFQFHTLVIVEEDLAGLLLQIRLLALSAVQGETIAVNCVHFLHKIFNDDGDMIGHFLSAIKSLNSRIVTMAEREANHGDHSFLNRFSEAVDHYMAIFDSLEATLPPNSRERLTLEQRWFGKEILDVVAAEETERKQRHRRFEIWEEMMKRFGFVNVPIGSFALSQAKLLLRLHYPSEGYNLQFLNNSLFLGWQNRPLFSVSSWK

SEQ ID NO: 100372 - DNA, 499 bp, Arabidopsis thaliana
  misc_feature (1)..(499): Ceres Seq. ID no. 13604965
  misc_feature (1)..(499): Ortholog of  Ceres SEQ ID NO 13504224 as cited in SEQ ID NO 137
  misc_feature (1)..(499): Ortholog of  Ceres SEQ ID NO 12635820 as cited in SEQ ID NO 0
gcctcttgtaaatcacactactcggctctttagaggttctttggacgatgaaacaactaatccgccgtttatcgcgtgtcgcggactcaacacagtatagcctcctccggtctgaatcccagcgtggccgcaccaagaaggagaaacacaaatcttgggttcccgaggggcacgtgcctgtttacgtaggccacgagatggagcggttcgtggtgaatgcggagctgctcaaccaccccgttttcgtagcgttgctgaagcagtcggctcaagagtatggatacgagcaacaaggagtgcttcgcatcccttgccacgtgcttgtgttcgaacgcatcttggagtctctccgtctcggactcgccgatcgagtcacatgacctacacgatctcttttgagatttaagaagtttctagtgtcttatagtatcttgctagctataggggaaacagagttatgtaaattacatattctttatctaattggtttatcagatct

SEQ ID NO: 100373 - protein, 110 aa, Arabidopsis thaliana
  peptide (1)..(110): Ceres Seq. ID no. 13604966
MKQLIRRLSRVADSTQYSLLRSESQRGRTKKEKHKSWVPEGHVPVYVGHEMERFVVNAELLNHPVFVALLKQSAQEYGYEQQGVLRIPCHVLVFERILESLRLGLADRVT

SEQ ID NO: 100374 - protein, 60 aa, Arabidopsis thaliana
  peptide (1)..(60): Ceres Seq. ID no. 13604967
MERFVVNAELLNHPVFVALLKQSAQEYGYEQQGVLRIPCHVLVFERILESLRLGLADRVT

SEQ ID NO: 100375 - DNA, 924 bp, Arabidopsis thaliana
  misc_feature (1)..(924): Ceres Seq. ID no. 13604976
  misc_feature (1)..(924): Ortholog of  Ceres SEQ ID NO 13595569 as cited in SEQ ID NO 56778
  misc_feature (1)..(924): Ortholog of  Ceres SEQ ID NO 12611159 as cited in SEQ ID NO 59821
ccacgcgtccgtaccttttacaatttgtttatatattttacgtatctatctttgttccatggagggttcgtccaaagggctgcgaaaaggtgcttggactactgaagaagatagtctcttgagacagtgcattaataagtatggagaaggcaaatggcaccaagttcctgtaagagctgggctaaaccggtgcaggaaaagttgtagattaagatggttgaactatttgaagccaagtatcaagagaggaaaacttagctctgatgaagtcgatcttcttcttcgccttcataggcttctagggaataggtggtctttaattgctggaagattacctggtcggaccgcaaatgacgtcaagaattactggaacactcatctgagtaagaaacatgaaccgtgttgtaagataaagatgaaaaagagagacattacgcccattcctacaacaccggcactaaaaaacaatgtttataagcctcgacctcgatccttcacagttaacaacgactgcaaccatctcaatgccccaccaaaagttgacgttaatcctccatgccttggacttaacatcaataatgtttgtgacaatagtatcatatacaacaaagataagaagaaagaccaactagtgaataatttgattgatggagataatatgtggttagagaaattcctagaggaaagccaagaggtagatattttggttcctgaagcgacgacaacagaaaagggggacaccttggcttttgacgttgatcaactttggagtcttttcgatggagagactgtgaaatttgattagtgtttcgaacatttgtttgcgtttgtgtataggtttgctttcaccttttaatttgtgtgttttgataaataagctaatagtttttagcattttaatgaaatatttcaagtttccgtgtt

SEQ ID NO: 100376 - protein, 267 aa, Arabidopsis thaliana
  peptide (1)..(267): Ceres Seq. ID no. 13604977
HASVPFTICLYILRIYLCSMEGSSKGLRKGAWTTEEDSLLRQCINKYGEGKWHQVPVRAGLNRCRKSCRLRWLNYLKPSIKRGKLSSDEVDLLLRLHRLLGNRWSLIAGRLPGRTANDVKNYWNTHLSKKHEPCCKIKMKKRDITPIPTTPALKNNVYKPRPRSFTVNNDCNHLNAPPKVDVNPPCLGLNINNVCDNSIIYNKDKKKDQLVNNLIDGDNMWLEKFLEESQEVDILVPEATTTEKGDTLAFDVDQLWSLFDGETVKFD

SEQ ID NO: 100377 - protein, 248 aa, Arabidopsis thaliana
  peptide (1)..(248): Ceres Seq. ID no. 13604978
MEGSSKGLRKGAWTTEEDSLLRQCINKYGEGKWHQVPVRAGLNRCRKSCRLRWLNYLKPSIKRGKLSSDEVDLLLRLHRLLGNRWSLIAGRLPGRTANDVKNYWNTHLSKKHEPCCKIKMKKRDITPIPTTPALKNNVYKPRPRSFTVNNDCNHLNAPPKVDVNPPCLGLNINNVCDNSIIYNKDKKKDQLVNNLIDGDNMWLEKFLEESQEVDILVPEATTTEKGDTLAFDVDQLWSLFDGETVKFD

SEQ ID NO: 100378 - DNA, 933 bp, Arabidopsis thaliana
  misc_feature (1)..(933): Ceres Seq. ID no. 13604979
  misc_feature (1)..(933): Ortholog of  Ceres SEQ ID NO 15176306 as cited in SEQ ID NO 52784
  misc_feature (1)..(933): Ortholog of  Ceres SEQ ID NO 13582624 as cited in SEQ ID NO 56287
  misc_feature (1)..(933): Ortholog of  Ceres SEQ ID NO 13597264 as cited in SEQ ID NO 63897
  misc_feature (1)..(933): Ortholog of  Ceres SEQ ID NO 13656452 as cited in SEQ ID NO 65745
atggcaacacaaaacaagattcagaaaaactctctcatcattttcctcttcaccttagtcgtcatcgcccagaccgctacctctcagaactgcctcaccattggttgtcctggcattaacgagtgttgtagccatacgggttactgcggcaccaatgtagagcactgcggcttttggtgcctcagcggcccttgccaactttctaagagttccagctcttacagactcaatgatggcccacgcgggaagatcgaaagcattgttacacctgcattattccacagactcatgcgtaaagtcggaagtaattgcacgggaaaaggtttctacacccgtgaggctttcatcacagcagtcaaatctttcgaaggctacaagggaacggtagctaaacgcgagattgcggccatattggctcagttctcttacgaatctggaaatttttgttacaaagaagaagtaacgagtgagacatattgctcgtcaagcaagacatacccttgtcaatcgggaaagaagtactatggtcgcggtctcttgcagtcaatcaaatggaacgagttctatggtgaggcgggaaagtaccttggcctccctctattgaaagatccagatatggtggctcgtagtccggaagtggctttcaaatttgcaatgtggttttggaagaccgaagttggtccatcactaagactaggatttggagcgaccacgatgaggatcaatggcatagagtgtggtggtatgagttggaatgctgaggctatgcagaacaggattaaccaatacttggagatctgcaagtggtttggggtgaatcctggtaaagatctatattgctaaaaggcattccatgtgatagtacgtttaacttaatttaagttgtcgattgtaatgtttccaataattagaggtttcgattgtggtgtttcc

SEQ ID NO: 100379 - protein, 280 aa, Arabidopsis thaliana
  peptide (1)..(280): Ceres Seq. ID no. 13604980
MATQNKIQKNSLIIFLFTLVVIAQTATSQNCLTIGCPGINECCSHTGYCGTNVEHCGFWCLSGPCQLSKSSSSYRLNDGPRGKIESIVTPALFHRLMRKVGSNCTGKGFYTREAFITAVKSFEGYKGTVAKREIAAILAQFSYESGNFCYKEEVTSETYCSSSKTYPCQSGKKYYGRGLLQSIKWNEFYGEAGKYLGLPLLKDPDMVARSPEVAFKFAMWFWKTEVGPSLRLGFGATTMRINGIECGGMSWNAEAMQNRINQYLEICKWFGVNPGKDLYC

SEQ ID NO: 100380 - protein, 184 aa, Arabidopsis thaliana
  peptide (1)..(184): Ceres Seq. ID no. 13604981
MRKVGSNCTGKGFYTREAFITAVKSFEGYKGTVAKREIAAILAQFSYESGNFCYKEEVTSETYCSSSKTYPCQSGKKYYGRGLLQSIKWNEFYGEAGKYLGLPLLKDPDMVARSPEVAFKFAMWFWKTEVGPSLRLGFGATTMRINGIECGGMSWNAEAMQNRINQYLEICKWFGVNPGKDLYC

SEQ ID NO: 100381 - DNA, 1069 bp, Arabidopsis thaliana
  misc_feature (1)..(1069): Ceres Seq. ID no. 13604988
  misc_feature (1)..(1069): Ortholog of  Ceres SEQ ID NO 14305743 as cited in SEQ ID NO 52462
  misc_feature (1)..(1069): Ortholog of  Ceres SEQ ID NO 13623029 as cited in SEQ ID NO 0
acttttcagttttcatataataatgaaataacttggttactctctttcctcgccgtagtctgagtctgaaccctaaaacatcccgcttcgctgctcaggaccaagaatctcagattcaactgatctttgcaacatgacgagggtttatgtcgggaatttggacccacgcgtcaccgaaagagaactcgaagacgaattcaaggccttcggtgttcttcgcaatgtctgggtagctcgtagacctcctggctacgcattcctcgagttcgatgacgaaagagatgctttggatgcaatcagcgcattggatcgaaagaatgggtggcgtgtggagctttctcataaagataaaggaggtcgtggaggtggtggtggtcgtcgtggaggtattgaggattccaagtgctatgagtgtggtgagcttggacattttgctcgcgagtgtcgccgtggtcgaggctctgtgaggcgtagaagccctagtccccgtcgtcgtaggagtccagattatgggtatgctcgcaggagtataagcccgcgtggaagaagatctcctccaaggcgtcgcagtgttactccacctcgccgtgggaggagctacagcagatcccctccttatcgtggttcacgccgtgattctcctcgccgcagagactcgccctatggtcgacgttcgccatatgccaatggggtgtgaaactggaccctgaagagaaagaagctattactaagctatgatgctatatctactctgtggcgccttttaggatagatctttatatctgctattatggtattagctcttctaggtttggttgttgagcatggacatgtcatggtatgttcgagttttattagacaattggatttggtgagttctccttcatgctgttttccaacagccgtcttgacttattctctataacacgcactggcctgctgtcttcacacagcgtccttgaacccctacacttgaggtcgttctttcgtatccataaatgttttgtctcttgttgaatgcactttccttattatatagacatatctaaaaagctcaactgtttccact

SEQ ID NO: 100382 - protein, 187 aa, Arabidopsis thaliana
  peptide (1)..(187): Ceres Seq. ID no. 13604989
MTRVYVGNLDPRVTERELEDEFKAFGVLRNVWVARRPPGYAFLEFDDERDALDAISALDRKNGWRVELSHKDKGGRGGGGGRRGGIEDSKCYECGELGHFARECRRGRGSVRRRSPSPRRRRSPDYGYARRSISPRGRRSPPRRRSVTPPRRGRSYSRSPPYRGSRRDSPRRRDSPYGRRSPYANGV

SEQ ID NO: 100383 - DNA, 2554 bp, Arabidopsis thaliana
  misc_feature (1)..(2554): Ceres Seq. ID no. 13604994
  misc_feature (1)..(2554): Ortholog of  Ceres SEQ ID NO 13657677 as cited in SEQ ID NO 66119
atctgatttagcaatctggatcaggtctgcaatttctgatgattcactctccattgttgtaaatctatgtttcagcttatgatcaaaaaccaatgcgtatgaatcgtctatgttcaccaaatcagtacacgtaaaagcgaatgtgatttctctaattctaccggagagcttattcaaacctgtaattcgcttcgtgttttgcgtatacgtctgctcaatcttcaagatcataactttttgattaacctatggctcttttaatatcttgtggggaagttacctcttctcaattcactgtatttcgcttactcaaccaaagccttgattttgttagtgacaatgtctctaggctcttagctcctattttcaccaacctcagggactttgaaatgcgtctttcttgtatcgaacgtcctccatccatttctggcaatcattctcatttgtgcactgagaaatggttttctgatcaaaaagattatgatcaaaaggaagacccggaagctattttcaatgtgttggattatatcttgaaaagcagcttggatcgtctggcttcattgagggagagtgtatgtcagacaaagagttttgattacgatgattgtttatctattcactcgtctataatgagggatctttgtttgcaagggaagttggatgctgctctctggctacggaaaaaaatgatatatagtggagttattccaggtttgatcacgcacaatcatcttttaaatgggttgtgtaaagcaggttatatcgagaaggcggatgggcttgttagagagatgagggagatgggtccttcgcctaattgtgtctcttataacaccttaatcaagggtctttgcagtgttaacaatgtagataaagctctgtacctcttcaatactatgaataaatatggtattaggccaaatagagtgacttgcaatataattgtgcatgcactttgccagaaaggtgttataggaaacaacaacaaaaagcttcttgaagagatcttagatagtagccaggcgaacgcacccttggatatagtcatctgtaccattctgatggatagttgttttaagaatggaaatgtggttcaagcccttgaggtttggaaggagatgtcacagaaaaatgtccctgctgattcagttgtgtacaatgtcattattcgtgggttatgttcgagtggaaacatggtagctgcttatgggttcatgtgtgacatggtaaagagaggagtgaatcctgatgttttcacttacaacactctcattagcgccttgtgcaaagagggaaagtttgatgaggcatgtgatctccatggtaccatgcaaaatggtggtgttgctcctgatcagatctcatacaaagttattattcaaggtttatgtatacatggagatgtgaacagggcgaacgagttccttctaagcatgctaaaaagttctctgcttccagaggttctgctatggaatgtggttattgatggttatggaagatatggtgatactagcagtgctttatctgttctgaatctaatgctttcgtacggtgttaaaccaaatgtttacacaaacaatgctttgattcatgggtatgtgaaagggggaagattaattgatgcatggtgggtcaaaaatgaaatgcgatctaccaaaatccacccagatactaccacctataatctgctactaggtgctgcttgtacattgggtcacttgcggttggcatttcagttgtatgatgaaatgctgagaaggggatgtcaacctgatatcattacgtatactgagctggttagagggctctgttggaagggtcgattgaagaaagccgaaagccttctgtcgagaatacaagcaactggtataacaatagatcatgttccatttttgatactagcaaagaaatataccagattgcagaggccaggcgaggcgtatttagtttacaaaaagtggttagcgacgaggaacagaggagtttcttgtccaagcatactaaatcacatgcatacagaagagcagtaatgcagctggtttaatcaagaaacagagcaaatttatcctaccccgaaatgcctattgcctctccggtagttgtttaaggacacctgagccaagtttagtttcttttcgaaacgtagaagattcgacacgaggaacgacagaactttgttccagatatcgatcttggtggagtcacaagaagtcactttattactacaaatggttttgatggatggttgaacgcacacagggctgtttcttcaaaaactcccaatatagtttcttgtctgaaacacgagaagcctttcatttcaatttacagggaaaatgtgaatatccctttcaagcaatgattctcgggtcagtaagagtcatgttatgctatcatattggcttattgcgtttgaaagttaatgatgataattggttcatgtacaacaagatgtttaatcatccattctggttggctttgtagaacaataatttctcaacttctgtaatattatcccaaaattttgaaattaagaaagaagctgtgttaaaac

SEQ ID NO: 100384 - protein, 593 aa, Arabidopsis thaliana
  peptide (1)..(593): Ceres Seq. ID no. 13604995
MALLISCGEVTSSQFTVFRLLNQSLDFVSDNVSRLLAPIFTNLRDFEMRLSCIERPPSISGNHSHLCTEKWFSDQKDYDQKEDPEAIFNVLDYILKSSLDRLASLRESVCQTKSFDYDDCLSIHSSIMRDLCLQGKLDAALWLRKKMIYSGVIPGLITHNHLLNGLCKAGYIEKADGLVREMREMGPSPNCVSYNTLIKGLCSVNNVDKALYLFNTMNKYGIRPNRVTCNIIVHALCQKGVIGNNNKKLLEEILDSSQANAPLDIVICTILMDSCFKNGNVVQALEVWKEMSQKNVPADSVVYNVIIRGLCSSGNMVAAYGFMCDMVKRGVNPDVFTYNTLISALCKEGKFDEACDLHGTMQNGGVAPDQISYKVIIQGLCIHGDVNRANEFLLSMLKSSLLPEVLLWNVVIDGYGRYGDTSSALSVLNLMLSYGVKPNVYTNNALIHGYVKGGRLIDAWWVKNEMRSTKIHPDTTTYNLLLGAACTLGHLRLAFQLYDEMLRRGCQPDIITYTELVRGLCWKGRLKKAESLLSRIQATGITIDHVPFLILAKKYTRLQRPGEAYLVYKKWLATRNRGVSCPSILNHMHTEEQ

SEQ ID NO: 100385 - protein, 546 aa, Arabidopsis thaliana
  peptide (1)..(546): Ceres Seq. ID no. 13604996
MRLSCIERPPSISGNHSHLCTEKWFSDQKDYDQKEDPEAIFNVLDYILKSSLDRLASLRESVCQTKSFDYDDCLSIHSSIMRDLCLQGKLDAALWLRKKMIYSGVIPGLITHNHLLNGLCKAGYIEKADGLVREMREMGPSPNCVSYNTLIKGLCSVNNVDKALYLFNTMNKYGIRPNRVTCNIIVHALCQKGVIGNNNKKLLEEILDSSQANAPLDIVICTILMDSCFKNGNVVQALEVWKEMSQKNVPADSVVYNVIIRGLCSSGNMVAAYGFMCDMVKRGVNPDVFTYNTLISALCKEGKFDEACDLHGTMQNGGVAPDQISYKVIIQGLCIHGDVNRANEFLLSMLKSSLLPEVLLWNVVIDGYGRYGDTSSALSVLNLMLSYGVKPNVYTNNALIHGYVKGGRLIDAWWVKNEMRSTKIHPDTTTYNLLLGAACTLGHLRLAFQLYDEMLRRGCQPDIITYTELVRGLCWKGRLKKAESLLSRIQATGITIDHVPFLILAKKYTRLQRPGEAYLVYKKWLATRNRGVSCPSILNHMHTEEQ

SEQ ID NO: 100386 - protein, 466 aa, Arabidopsis thaliana
  peptide (1)..(466): Ceres Seq. ID no. 13604997
MRDLCLQGKLDAALWLRKKMIYSGVIPGLITHNHLLNGLCKAGYIEKADGLVREMREMGPSPNCVSYNTLIKGLCSVNNVDKALYLFNTMNKYGIRPNRVTCNIIVHALCQKGVIGNNNKKLLEEILDSSQANAPLDIVICTILMDSCFKNGNVVQALEVWKEMSQKNVPADSVVYNVIIRGLCSSGNMVAAYGFMCDMVKRGVNPDVFTYNTLISALCKEGKFDEACDLHGTMQNGGVAPDQISYKVIIQGLCIHGDVNRANEFLLSMLKSSLLPEVLLWNVVIDGYGRYGDTSSALSVLNLMLSYGVKPNVYTNNALIHGYVKGGRLIDAWWVKNEMRSTKIHPDTTTYNLLLGAACTLGHLRLAFQLYDEMLRRGCQPDIITYTELVRGLCWKGRLKKAESLLSRIQATGITIDHVPFLILAKKYTRLQRPGEAYLVYKKWLATRNRGVSCPSILNHMHTEEQ

SEQ ID NO: 100387 - DNA, 934 bp, Arabidopsis thaliana
  misc_feature (1)..(934): Ceres Seq. ID no. 13604998
  misc_feature (1)..(934): Ortholog of  Ceres SEQ ID NO 13654322 as cited in SEQ ID NO 67858
  misc_feature (1)..(934): Ortholog of  Ceres SEQ ID NO 15226179 as cited in SEQ ID NO 0
gagggttagttttcgaagaacgacgagctcgagattattgattttcaagtggagattgaatcagtgataatggacaatgagacgaaagcaaccaccttcagcaaatcaacagggcttcctaggaagagattctacagagcaagagctcatagtaacccacttagcgattctcacttcccaatccccatatctccagctcatgtcgactattcacttcacttccccaaattcgttgaagctgacaacaaattcatcaagaaggttgagtttgcggatatcggatgcgggtttggtggcctactaatctcccttgcgacgcttttccccgatacgctaatgatcggtatggagctcagagataaagtgacggagtacgttaaagaacggatcttagctttaaggagaacaagctcggagggacagtatgagaacatctccgttgttaggacaaactcgatgaagtacattccgaattacttcgagaaaggacagctttcgaagatgtttttcctcttccctgatccacattttaaggagaagaatcataggaggagagtgattagtactcatttgttagatgagtatgcttatgttcttagagctggtgggattatttacacaatcactgatgtagaggagcttggagagtggatgaagtcttgcttagagaaacatccgatgtttgaatctctaacacaagaagagcttgtttcggatcctgttgttgagcttctatgcagtgctactgaggaaggacagaaagttgctagaaatggtggacagactttcagagcagtttttagacgcattgcatatgtttcttgaattctttatttctcgttgtagtaatctttgttgtaacacagcttctttcttaatttcaaaattttgggataatattacagaagttgagaaattattgttctacaaagcc

SEQ ID NO: 100388 - protein, 251 aa, Arabidopsis thaliana
  peptide (1)..(251): Ceres Seq. ID no. 13604999
MDNETKATTFSKSTGLPRKRFYRARAHSNPLSDSHFPIPISPAHVDYSLHFPKFVEADNKFIKKVEFADIGCGFGGLLISLATLFPDTLMIGMELRDKVTEYVKERILALRRTSSEGQYENISVVRTNSMKYIPNYFEKGQLSKMFFLFPDPHFKEKNHRRRVISTHLLDEYAYVLRAGGIIYTITDVEELGEWMKSCLEKHPMFESLTQEELVSDPVVELLCSATEEGQKVARNGGQTFRAVFRRIAYVS

SEQ ID NO: 100389 - protein, 162 aa, Arabidopsis thaliana
  peptide (1)..(162): Ceres Seq. ID no. 13605000
MIGMELRDKVTEYVKERILALRRTSSEGQYENISVVRTNSMKYIPNYFEKGQLSKMFFLFPDPHFKEKNHRRRVISTHLLDEYAYVLRAGGIIYTITDVEELGEWMKSCLEKHPMFESLTQEELVSDPVVELLCSATEEGQKVARNGGQTFRAVFRRIAYVS

SEQ ID NO: 100390 - protein, 159 aa, Arabidopsis thaliana
  peptide (1)..(159): Ceres Seq. ID no. 13605001
MELRDKVTEYVKERILALRRTSSEGQYENISVVRTNSMKYIPNYFEKGQLSKMFFLFPDPHFKEKNHRRRVISTHLLDEYAYVLRAGGIIYTITDVEELGEWMKSCLEKHPMFESLTQEELVSDPVVELLCSATEEGQKVARNGGQTFRAVFRRIAYVS

SEQ ID NO: 100391 - DNA, 859 bp, Arabidopsis thaliana
  misc_feature (1)..(859): Ceres Seq. ID no. 13605010
  misc_feature (1)..(859): Ortholog of  Ceres SEQ ID NO 12467471 as cited in SEQ ID NO 55509
  misc_feature (1)..(859): Ortholog of  Ceres SEQ ID NO 13598557 as cited in SEQ ID NO 65168
ataagctcttacactcatttcaactctctttttcgtttccattaccctcagaagaagatgaataggccgggagattggaactgcagattgtgtagccacctcaacttccagaggagggattcatgccaacgttgtagagagcctagaccgggcgggatcagtaccgatttactcagcggttttggtggccgtccggttagtagctccttcggtttcaacaccgggcccgatgtgcgacccggggattggtattgcaaccttggggattgtgggacacataattttgccaataggtccagttgtttcaagtgtggtgccgcaaaagatgagttttcatgctcaagtgctgctgcaacaaccgggtttatggacatgaatgttggtccgagacgtggcctttttggttttggcggcagcagtagtggtggtggtggtacgggccgttctccttggaaatctggagattggatttgcccaaggtcaggctgtaacgaacataacttcgcaagcaggtcagagtgtttcaggtgtaacgcaccaaaggaacttgccaccgaaccaccctattagtcatttagtcctcctaccttcttcatcatttccaatactctggaagcattagaggagagcagaaaggtgaagaatcgaagcaagataccgaccgcccttaatctcttgatttgtttaatttcttagatttgactcgttttatatctcgtagtagtcagacctatgttagaatgtaagcatgtcgagagttttccgaagcattttgttctgatatcggtctcctagctagtatgtaagtttgtttgaatgtattcttatttctgataaagttgtttccttctgattccgc

SEQ ID NO: 100392 - protein, 189 aa, Arabidopsis thaliana
  peptide (1)..(189): Ceres Seq. ID no. 13605011
ISSYTHFNSLFRFHYPQKKMNRPGDWNCRLCSHLNFQRRDSCQRCREPRPGGISTDLLSGFGGRPVSSSFGFNTGPDVRPGDWYCNLGDCGTHNFANRSSCFKCGAAKDEFSCSSAAATTGFMDMNVGPRRGLFGFGGSSSGGGGTGRSPWKSGDWICPRSGCNEHNFASRSECFRCNAPKELATEPPY

SEQ ID NO: 100393 - protein, 170 aa, Arabidopsis thaliana
  peptide (1)..(170): Ceres Seq. ID no. 13605012
MNRPGDWNCRLCSHLNFQRRDSCQRCREPRPGGISTDLLSGFGGRPVSSSFGFNTGPDVRPGDWYCNLGDCGTHNFANRSSCFKCGAAKDEFSCSSAAATTGFMDMNVGPRRGLFGFGGSSSGGGGTGRSPWKSGDWICPRSGCNEHNFASRSECFRCNAPKELATEPPY

SEQ ID NO: 100394 - DNA, 1994 bp, Arabidopsis thaliana
  misc_feature (1)..(1994): Ceres Seq. ID no. 13605032
  misc_feature (1)..(1994): Ortholog of  Ceres SEQ ID NO 15170788 as cited in SEQ ID NO 52635
  misc_feature (1)..(1994): Ortholog of  Ceres SEQ ID NO 13638058 as cited in SEQ ID NO 55054
  misc_feature (1)..(1994): Ortholog of  Ceres SEQ ID NO 15170362 as cited in SEQ ID NO 57883
  misc_feature (1)..(1994): Ortholog of  Ceres SEQ ID NO 14303297 as cited in SEQ ID NO 67765
atggacaccaaaattggagccatcgacacgtgtaagccaacaactggtgacatcggaagtccaccaagcaacgccgtcgcaacaatccaagactccgctcccatcaccacaacctccgaatcgactctaggacgtcacttatcccgccgtcttgtccaagccggagtcaccgatgttttctctgttcccggtgatttcaacctaactcttctcgaccacctcatcgccgagccagagctcaacaacatcggatgctgtaacgagcttaacgccggttacgccgccgatggatacgctcgatctcgtggagtcggtgcttgcgtcgtgactttcaccgttggtggactcagcgttttgaacgctatcgctggtgcgtacagtgagaacctaccagttatatgtatcgttggaggtcctaactccaacgattttggcactaaccggattcttcatcacaccatcggtttacctgactttagccaagagcttaggtgtttccaaactgttacttgctaccaggctgtggtgaacaatttggaggatgctcatgaacagatcgacaaggcgatagcaacagctttgaaagagagcaagcctgtgtacattagcatcagttgcaacttagctgcaactcctcatcctacgtttgctcgtgatcctgtcccttttgacctaactcctaggatgagcaacacgatgggtttagaagctgcggtggaagcaacattggagtttctgaacaaggcagtgaagccagttatggttggtggcccaaagttgcgtgtggctaaagcaagtgaggcctttttggagctagctgatgcttcaggctaccctctcgcagtgatgccttctacaaaaggccttgtaccagagaaccatcctcatttcattggcacttactggggagcagtaagcacacctttctgctctgagattgtcgaatctgcggatgcttacatcttcgcaggtccaatcttcaacgactacagctccgtaggttactctcttctcctcaagaaagaaaaagcaataattgtgcatcctgatcgagtcgttgtggctaatggtccaacgtttggttgcgttctgatgagcgatttcttcagggagttggctaagagggttaagcgtaacgagacagcttatgagaactatgagaggatctttgtacctgaaggtaagccattgaaatgcaaaccaggagagccattgagggtcaacgcaatgttccaacacattcagaagatgctctctagtgaaaccgctgtgattgctgaaactggtgattcttggttcaattgtcagaagctaaagctgcctaaaggatgtgggtacgagtttcagatgcagtatggatccattggttggtctgttggtgcgactctaggatacgcccaagcaaccccggagaagagagtgttgtctttcattggagatgggagtttccaagtgactgctcaggacatatccacgatgattcgtaacggacagaaggcgatcatcttcttgatcaacaacggtggctacaccattgaagttgagattcatgatggtccttacaatgttatcaagaactggaactacactggtcttgtcgatgctattcataacggtgaaggaaaatgctggaccacaaaggtgagatacgaggaggagttagtggaagcgattaagactgcgacaacggagaagaaagatagtctttgtttcattgaagtgattgttcacaaagatgatacaagcaaagagttgcttgagtggggatctcgcgtctcagctgctaatggtcgtcctcccaatcctcagtagaagcaagagaaaagaatcttgagtgtgactcaagcatctctcgtttctttgcaattgaattagattgttttctgttcgaattttcgaattttcgaccgttggttttaattgcttttgatactttccagttagttgtactgtaccattaccattgatggtgtaatacaattccctttttccct

SEQ ID NO: 100395 - protein, 603 aa, Arabidopsis thaliana
  peptide (1)..(603): Ceres Seq. ID no. 13605033
MDTKIGAIDTCKPTTGDIGSPPSNAVATIQDSAPITTTSESTLGRHLSRRLVQAGVTDVFSVPGDFNLTLLDHLIAEPELNNIGCCNELNAGYAADGYARSRGVGACVVTFTVGGLSVLNAIAGAYSENLPVICIVGGPNSNDFGTNRILHHTIGLPDFSQELRCFQTVTCYQAVVNNLEDAHEQIDKAIATALKESKPVYISISCNLAATPHPTFARDPVPFDLTPRMSNTMGLEAAVEATLEFLNKAVKPVMVGGPKLRVAKASEAFLELADASGYPLAVMPSTKGLVPENHPHFIGTYWGAVSTPFCSEIVESADAYIFAGPIFNDYSSVGYSLLLKKEKAIIVHPDRVVVANGPTFGCVLMSDFFRELAKRVKRNETAYENYERIFVPEGKPLKCKPGEPLRVNAMFQHIQKMLSSETAVIAETGDSWFNCQKLKLPKGCGYEFQMQYGSIGWSVGATLGYAQATPEKRVLSFIGDGSFQVTAQDISTMIRNGQKAIIFLINNGGYTIEVEIHDGPYNVIKNWNYTGLVDAIHNGEGKCWTTKVRYEEELVEAIKTATTEKKDSLCFIEVIVHKDDTSKELLEWGSRVSAANGRPPNPQ

SEQ ID NO: 100396 - protein, 375 aa, Arabidopsis thaliana
  peptide (1)..(375): Ceres Seq. ID no. 13605034
MSNTMGLEAAVEATLEFLNKAVKPVMVGGPKLRVAKASEAFLELADASGYPLAVMPSTKGLVPENHPHFIGTYWGAVSTPFCSEIVESADAYIFAGPIFNDYSSVGYSLLLKKEKAIIVHPDRVVVANGPTFGCVLMSDFFRELAKRVKRNETAYENYERIFVPEGKPLKCKPGEPLRVNAMFQHIQKMLSSETAVIAETGDSWFNCQKLKLPKGCGYEFQMQYGSIGWSVGATLGYAQATPEKRVLSFIGDGSFQVTAQDISTMIRNGQKAIIFLINNGGYTIEVEIHDGPYNVIKNWNYTGLVDAIHNGEGKCWTTKVRYEEELVEAIKTATTEKKDSLCFIEVIVHKDDTSKELLEWGSRVSAANGRPPNPQ

SEQ ID NO: 100397 - protein, 371 aa, Arabidopsis thaliana
  peptide (1)..(371): Ceres Seq. ID no. 13605035
MGLEAAVEATLEFLNKAVKPVMVGGPKLRVAKASEAFLELADASGYPLAVMPSTKGLVPENHPHFIGTYWGAVSTPFCSEIVESADAYIFAGPIFNDYSSVGYSLLLKKEKAIIVHPDRVVVANGPTFGCVLMSDFFRELAKRVKRNETAYENYERIFVPEGKPLKCKPGEPLRVNAMFQHIQKMLSSETAVIAETGDSWFNCQKLKLPKGCGYEFQMQYGSIGWSVGATLGYAQATPEKRVLSFIGDGSFQVTAQDISTMIRNGQKAIIFLINNGGYTIEVEIHDGPYNVIKNWNYTGLVDAIHNGEGKCWTTKVRYEEELVEAIKTATTEKKDSLCFIEVIVHKDDTSKELLEWGSRVSAANGRPPNPQ

SEQ ID NO: 100398 - DNA, 1416 bp, Arabidopsis thaliana
  misc_feature (1)..(1416): Ceres Seq. ID no. 13605036
  misc_feature (1)..(1416): Ortholog of  Ceres SEQ ID NO 13581701 as cited in SEQ ID NO 51151
  misc_feature (1)..(1416): Ortholog of  Ceres SEQ ID NO 14315491 as cited in SEQ ID NO 57026
atcatcatcaccctcatcgtcttcttctcttttaccctaatttatcttcttatccccagcgaagttttctcgattttgatctgattggtatagatctccggtgaagtaatacactggagggagatgaagtcatcgagaatgaagtttgcaaagaagttgaaatcaattagagccggagaatatctgaatcaggatcgaattctccaggttctttctgctgcagatgagtttcttccaaagatatctaaccacattcctcagattacatccgccgcttctatctggagaacccctcaaaagtctgaaaatcaaattgcaaatgtaacggaacttttggaaaacgtgagacaaggagaagaagaagcttctggaaattttgtcggcgacgaggagaacgtacggcctccggtgaatcagattccgagagttccgtgtgatcggaaagagagtaaactggcagtttcatgcggatctgatacaggaatcggaagaaagagtttcggatctggatttagaagacctgatttgaattcgaccacacttttcgatccgaaactgttagaagcatttgaattagctgcgttatgctttaggaagattaaggatttttccagagaagccagagtcaatgatgaagacgacatcgtctttcccgaggaagaggaaatcagaaaagacgggaatagcattcctccggtgattagcgtcgtagagtatagacggaaagacgaaaatgtcgtcgttcttcacaaagatgatggaaatgcccttcagattgtaaatgcgatcagggaagaagtcatcggagaagaagacattggaaaagacggaaatacccttatggatccgttgttggaattcgaggaacggtgtcctccgggaggagaggaatccgttgttttctacacaacgactcttcgaggaatcagaaaaacgttcgacgattgcaacatgatccgatttctgctggatagttttaaggttaagtactacgagagagatgtgtcgatgcatagagagtatagagaagagctccgacgaatctcagcggcggaaacagaggtgttgcctccggttctgttcgtaaaaggaaggtgtatcggtggagctcagagagtgttgggactgcacgagcaagggaagtttaagattctctttgagggcattccaatcaccggagatgaacgttgccggcggtgcgatggttttaggtttttgatgtgtgatggatgcagaggtagtcgccggattatctctggtgatggatcaagaattcagtgtttgatatgtaatgagaatgggttaattgtgtgcgttggttgctcctaataccattttttttgtttggtctatatatatcaaattacattattcgtttattatttttcttagtattgtaacgatttttttatacag

SEQ ID NO: 100399 - protein, 401 aa, Arabidopsis thaliana
  peptide (1)..(401): Ceres Seq. ID no. 13605037
MKSSRMKFAKKLKSIRAGEYLNQDRILQVLSAADEFLPKISNHIPQITSAASIWRTPQKSENQIANVTELLENVRQGEEEASGNFVGDEENVRPPVNQIPRVPCDRKESKLAVSCGSDTGIGRKSFGSGFRRPDLNSTTLFDPKLLEAFELAALCFRKIKDFSREARVNDEDDIVFPEEEEIRKDGNSIPPVISVVEYRRKDENVVVLHKDDGNALQIVNAIREEVIGEEDIGKDGNTLMDPLLEFEERCPPGGEESVVFYTTTLRGIRKTFDDCNMIRFLLDSFKVKYYERDVSMHREYREELRRISAAETEVLPPVLFVKGRCIGGAQRVLGLHEQGKFKILFEGIPITGDERCRRCDGFRFLMCDGCRGSRRIISGDGSRIQCLICNENGLIVCVGCS

SEQ ID NO: 100400 - protein, 396 aa, Arabidopsis thaliana
  peptide (1)..(396): Ceres Seq. ID no. 13605038
MKFAKKLKSIRAGEYLNQDRILQVLSAADEFLPKISNHIPQITSAASIWRTPQKSENQIANVTELLENVRQGEEEASGNFVGDEENVRPPVNQIPRVPCDRKESKLAVSCGSDTGIGRKSFGSGFRRPDLNSTTLFDPKLLEAFELAALCFRKIKDFSREARVNDEDDIVFPEEEEIRKDGNSIPPVISVVEYRRKDENVVVLHKDDGNALQIVNAIREEVIGEEDIGKDGNTLMDPLLEFEERCPPGGEESVVFYTTTLRGIRKTFDDCNMIRFLLDSFKVKYYERDVSMHREYREELRRISAAETEVLPPVLFVKGRCIGGAQRVLGLHEQGKFKILFEGIPITGDERCRRCDGFRFLMCDGCRGSRRIISGDGSRIQCLICNENGLIVCVGCS

SEQ ID NO: 100401 - DNA, 3508 bp, Arabidopsis thaliana
  misc_feature (1)..(3508): Ceres Seq. ID no. 13605039
  misc_feature (1)..(3508): Ortholog of  Ceres SEQ ID NO 13595166 as cited in SEQ ID NO 56250
  misc_feature (1)..(3508): Ortholog of  Ceres SEQ ID NO 13599417 as cited in SEQ ID NO 0
atggcagaaactcgttcgcagatgttttatcgggaggtttcagctattcacgaaactatgtatccgtcattgaaagtggtttgtggtcacaaatctgatgtgcgttccggcaaagcggcgacgacgaatcagcaatttggtgttcaatcctcaccgtgcatcggagaatcaatgttggatacgagagcttacaacattggaagatcctcacagctgatatctacagctccgatcgtcactcctgacaccagcaaagagagagtcggtatgtcgaacaaatattttccattggaagagagatctgattttgcgagacttgagcatctcagatttaatggtgatagaattacagaatggttgttccagattgaacaatttttcttaattgatcgtactccggaggaattgaaagttggcttcgcttcactccatttcgatgacactgctgcgactttgcaccaatcaattgtacaatcgatgtggtggaagcatgttaggcatgattggtggagttacaaactgttgttgcaagtgagatatgatgagcatgttaatgactcgattgcaaaactgacacagttgcaggagactgaaggaatagaggagtatcatgctcgatttgagttgattagcactagattgaacttcgctgaagattacttggttagtgtttacttggcaggtttgagaactgatactcaactgaatgttaggatgtttggacctcagacaattcaacaatgtttaatgttgggaagattatatgagatggctcacccaaagagtgtgcttatcagaaaaaagagtgatgattatcagaaagaagctcaacatgtttcaagtaatgctgcaggaacttctatgattaatgatggtaattgcatgataggtaatgatggagatcgattccttagtggttcagacttggtagagaatgcggttgcgacggtgaagaaatatttggttgaaattgatgatgctatgtctagtgatgatgatcaaaattcggatgctggggacgtctttggattcaacatagaagagtgtgaaacagattcatggattgaacataagccgttgattcaagatcaagccgcgtttcactccatagacatagaaggtgtctcacaacttcagaaggttcgttcaaaccttaaggattttgataaagttgatgcaacaatgaatcaaatgctgtcatcaattggatttgttgttgatgaattacactctagttgtggaagtgctaccgtccatgtccagaagaagcctagtaagtctctcaaatcctggaagttcaaatttaaaaccagctcacaagaccaaggggatcatgaatcacttccaatagggttacatatcagattcaagtcctggaaatttaagttcgtgaatagaaatttacaaatgatgagagaacatggatatacaacacactttcagctaatgtctgataagagagaacatcaagagatgttcattgtggccaggattgttgatgtgagatgtttgcttagcatgatacttgggataacagagagtgatgcaggtcatggagaacaatttgtgtatgaccggattacaatggtaaagaggctgctgttgcaaaccagtttagtcattcaagaagtgatgagaaacaaaaagatcaagtttaccaaacggtggtggttcaagtataaatttggggaagagggtttcacgagactgaattctttcaatttgcgtatgacttatcattttgcggtttggcattgttggaagagcaagaccatggtgcatgttgaaatgagtggtgatcactggtcttggatggtcttagtcatgaaatctacaacatctagctttttgtcacttctctatgatcgaagaatgggagatccaagcagacatgaaacgggtcgggagattgtgtcacttcagggtcaaattcacactggttctcctatgattcagtgcataaagatgagcttcagcattctccttcttcagggtctgtttcagagtttgacaatgaagatgctcacatatatgcacttgtttggtagcaaaagttgtgtttcaactttgggaagacttctagatttccctcatcgttttaccggagctctcgtcgagtctcttgtaggtgagaagttgatatcgcgtctctttacgaacgttgtatcaaatggtgagagaagcagagttgcatgctcagaaagacaaagaaaagaattgatcgacaccaagaacacagctgacacaacaatttacagcatagagaagagtcttggtgaatacagagagaagatcccaagtgaaatcgccaaggagattgaagatgctgtggcagatctaaggagcgcttcctctggggatgatctcaacgagatcaaggccaagattgaggcggcaaacaaagctgtttctaagattggggagcacatgtctggtggttctggtggaggctctgcaccaggaggaggatctgagggaggcagtgatcaagctccagaggcagagtacgaggaagtgaaaaaggctgatttaatcgagatcccatttcttttgttggcttacttctctcgaatttacgcaggaagatcattagcagagaattctcatctgattcagtccatggctgccacggctcttttccgatcgattcgtcgacgcgacgtcgtctccgcgcctctttccgtttacaaatcccttgctggtaatgctcaaccttcctggggtagttcatacattggtcagaactatgcaagtttctccagagctttcgggtcaaaacctgttgtgaatgacattcttggtactggtttgggcactaacaatgccattagagaggagagagagaagtcaaaatctactgaagctgcaattgttggtgctcaattgactcgatctttccgtgctcttgatgtgggaacatcgaaacgattgttttctacaatctcaggggatataaagacaacacaggaggaaccaaaaatcaaaagctttcgccctttatctcctcacctttctgtttaccagcctcagatgaactccatgctatcgattttcaacagaatctcaggggtttacttgaccggtgtcactttcgctggctaccttctctacctgaagatgggtatgatctgcctcacctacccgagtttctaccaagtcctttaccatacacaacagcaacttccagtcatcacctcggttactgcattagccgctatttatcatactatcaagagtactcactcactcttgacccattaaaaacctttaccaaagctctttcgatgaagccgccaaagtctccagtaagagtttctttgagatgattaataaggagacaagaaaacatttgttaaactctgtcttgaaaaggtaaagatttagcacctgtttctttggattcgaggcttttttgggggtatgtttgttgcttttctttgttctcagaccttttttgaatgatgtaataaatgtttaccaaagttctgttgctacgttactctttttg

SEQ ID NO: 100402 - protein, 1086 aa, Arabidopsis thaliana
  peptide (1)..(1086): Ceres Seq. ID no. 13605040
MAETRSQMFYREVSAIHETMYPSLKVVCGHKSDVRSGKAATTNQQFGVQSSPCIGESMLDTRAYNIGRSSQLISTAPIVTPDTSKERVGMSNKYFPLEERSDFARLEHLRFNGDRITEWLFQIEQFFLIDRTPEELKVGFASLHFDDTAATLHQSIVQSMWWKHVRHDWWSYKLLLQVRYDEHVNDSIAKLTQLQETEGIEEYHARFELISTRLNFAEDYLVSVYLAGLRTDTQLNVRMFGPQTIQQCLMLGRLYEMAHPKSVLIRKKSDDYQKEAQHVSSNAAGTSMINDGNCMIGNDGDRFLSGSDLVENAVATVKKYLVEIDDAMSSDDDQNSDAGDVFGFNIEECETDSWIEHKPLIQDQAAFHSIDIEGVSQLQKVRSNLKDFDKVDATMNQMLSSIGFVVDELHSSCGSATVHVQKKPSKSLKSWKFKFKTSSQDQGDHESLPIGLHIRFKSWKFKFVNRNLQMMREHGYTTHFQLMSDKREHQEMFIVARIVDVRCLLSMILGITESDAGHGEQFVYDRITMVKRLLLQTSLVIQEVMRNKKIKFTKRWWFKYKFGEEGFTRLNSFNLRMTYHFAVWHCWKSKTMVHVEMSGDHWSWMVLVMKSTTSSFLSLLYDRRMGDPSRHETGREIVSLQGQIHTGSPMIQCIKMSFSILLLQGLFQSLTMKMLTYMHLFGSKSCVSTLGRLLDFPHRFTGALVESLVGEKLISRLFTNVVSNGERSRVACSERQRKELIDTKNTADTTIYSIEKSLGEYREKIPSEIAKEIEDAVADLRSASSGDDLNEIKAKIEAANKAVSKIGEHMSGGSGGGSAPGGGSEGGSDQAPEAEYEEVKKADLIEIPFLLLAYFSRIYAGRSLAENSHLIQSMAATALFRSIRRRDVVSAPLSVYKSLAGNAQPSWGSSYIGQNYASFSRAFGSKPVVNDILGTGLGTNNAIREEREKSKSTEAAIVGAQLTRSFRALDVGTSKRLFSTISGDIKTTQEEPKIKSFRPLSPHLSVYQPQMNSMLSIFNRISGVYLTGVTFAGYLLYLKMGMICLTYPSFYQVLYHTQQQLPVITSVTALAAIYHTIKSTHSLLTH

SEQ ID NO: 100403 - protein, 1079 aa, Arabidopsis thaliana
  peptide (1)..(1079): Ceres Seq. ID no. 13605041
MFYREVSAIHETMYPSLKVVCGHKSDVRSGKAATTNQQFGVQSSPCIGESMLDTRAYNIGRSSQLISTAPIVTPDTSKERVGMSNKYFPLEERSDFARLEHLRFNGDRITEWLFQIEQFFLIDRTPEELKVGFASLHFDDTAATLHQSIVQSMWWKHVRHDWWSYKLLLQVRYDEHVNDSIAKLTQLQETEGIEEYHARFELISTRLNFAEDYLVSVYLAGLRTDTQLNVRMFGPQTIQQCLMLGRLYEMAHPKSVLIRKKSDDYQKEAQHVSSNAAGTSMINDGNCMIGNDGDRFLSGSDLVENAVATVKKYLVEIDDAMSSDDDQNSDAGDVFGFNIEECETDSWIEHKPLIQDQAAFHSIDIEGVSQLQKVRSNLKDFDKVDATMNQMLSSIGFVVDELHSSCGSATVHVQKKPSKSLKSWKFKFKTSSQDQGDHESLPIGLHIRFKSWKFKFVNRNLQMMREHGYTTHFQLMSDKREHQEMFIVARIVDVRCLLSMILGITESDAGHGEQFVYDRITMVKRLLLQTSLVIQEVMRNKKIKFTKRWWFKYKFGEEGFTRLNSFNLRMTYHFAVWHCWKSKTMVHVEMSGDHWSWMVLVMKSTTSSFLSLLYDRRMGDPSRHETGREIVSLQGQIHTGSPMIQCIKMSFSILLLQGLFQSLTMKMLTYMHLFGSKSCVSTLGRLLDFPHRFTGALVESLVGEKLISRLFTNVVSNGERSRVACSERQRKELIDTKNTADTTIYSIEKSLGEYREKIPSEIAKEIEDAVADLRSASSGDDLNEIKAKIEAANKAVSKIGEHMSGGSGGGSAPGGGSEGGSDQAPEAEYEEVKKADLIEIPFLLLAYFSRIYAGRSLAENSHLIQSMAATALFRSIRRRDVVSAPLSVYKSLAGNAQPSWGSSYIGQNYASFSRAFGSKPVVNDILGTGLGTNNAIREEREKSKSTEAAIVGAQLTRSFRALDVGTSKRLFSTISGDIKTTQEEPKIKSFRPLSPHLSVYQPQMNSMLSIFNRISGVYLTGVTFAGYLLYLKMGMICLTYPSFYQVLYHTQQQLPVITSVTALAAIYHTIKSTHSLLTH

SEQ ID NO: 100404 - protein, 1067 aa, Arabidopsis thaliana
  peptide (1)..(1067): Ceres Seq. ID no. 13605042
MYPSLKVVCGHKSDVRSGKAATTNQQFGVQSSPCIGESMLDTRAYNIGRSSQLISTAPIVTPDTSKERVGMSNKYFPLEERSDFARLEHLRFNGDRITEWLFQIEQFFLIDRTPEELKVGFASLHFDDTAATLHQSIVQSMWWKHVRHDWWSYKLLLQVRYDEHVNDSIAKLTQLQETEGIEEYHARFELISTRLNFAEDYLVSVYLAGLRTDTQLNVRMFGPQTIQQCLMLGRLYEMAHPKSVLIRKKSDDYQKEAQHVSSNAAGTSMINDGNCMIGNDGDRFLSGSDLVENAVATVKKYLVEIDDAMSSDDDQNSDAGDVFGFNIEECETDSWIEHKPLIQDQAAFHSIDIEGVSQLQKVRSNLKDFDKVDATMNQMLSSIGFVVDELHSSCGSATVHVQKKPSKSLKSWKFKFKTSSQDQGDHESLPIGLHIRFKSWKFKFVNRNLQMMREHGYTTHFQLMSDKREHQEMFIVARIVDVRCLLSMILGITESDAGHGEQFVYDRITMVKRLLLQTSLVIQEVMRNKKIKFTKRWWFKYKFGEEGFTRLNSFNLRMTYHFAVWHCWKSKTMVHVEMSGDHWSWMVLVMKSTTSSFLSLLYDRRMGDPSRHETGREIVSLQGQIHTGSPMIQCIKMSFSILLLQGLFQSLTMKMLTYMHLFGSKSCVSTLGRLLDFPHRFTGALVESLVGEKLISRLFTNVVSNGERSRVACSERQRKELIDTKNTADTTIYSIEKSLGEYREKIPSEIAKEIEDAVADLRSASSGDDLNEIKAKIEAANKAVSKIGEHMSGGSGGGSAPGGGSEGGSDQAPEAEYEEVKKADLIEIPFLLLAYFSRIYAGRSLAENSHLIQSMAATALFRSIRRRDVVSAPLSVYKSLAGNAQPSWGSSYIGQNYASFSRAFGSKPVVNDILGTGLGTNNAIREEREKSKSTEAAIVGAQLTRSFRALDVGTSKRLFSTISGDIKTTQEEPKIKSFRPLSPHLSVYQPQMNSMLSIFNRISGVYLTGVTFAGYLLYLKMGMICLTYPSFYQVLYHTQQQLPVITSVTALAAIYHTIKSTHSLLTH

SEQ ID NO: 100405 - DNA, 1861 bp, Arabidopsis thaliana
  misc_feature (1)..(1861): Ceres Seq. ID no. 13605051
  misc_feature (1)..(1861): Ortholog of  Ceres SEQ ID NO 14306420 as cited in SEQ ID NO 53854
atgttgaatttgtggctacgagaacatttagtatacgtttgccaccagcagaacctagtggctaagtttaggagtcagaaagcaatgaaattgttaagatttgctggtcttgttttcatttttatcacaaccttccagtttgtgaacatacgttattatggtggtgatatattctctttatcttctcaagataagtttccagtatcaattgatgtaagcacagaacccgtaagcacgttgtccggtcctgaaagattgaattctagtagttcaagatccgttgaggtagatgaagaggaaagcaccggtttaaaagaagaccatgtgattggctttgataagaatgacacagttcaaggccatgatagtttcgtagaggatgtcaaagataaggaaactcttgatttgcttccaggaaccaagagcagctcaaacgagagttacgagaaaatagtagaagatgctgatattgcttttgaaaatattaggaaaatggagattctggagagtaagtctgatccttctgttgataatctttcctcagaggtgaaaaagtttatgaatgtttcaaattctggggtggtttctatcactgagatgatgaatttactgcatcaaagccgcacttctcatgtctcactgaaagtaaaacggtcttccacaattgatcatgagctgttatatgcaagaactcaaattgagaacccaccgctgatagagaacgaccctttactgcatactcctctgtattggaatctctccatgttcaaaaggagctatgagctaatggagaaaaagctcaaggtatatgtctacagggaaggcaaaagacctgtactgcataagccggtgctgaaaggaatatatgcttctgaaggatggtttatgaaacaactcaagtccagcagaacatttgtcacaaaagaccctcgtaaagctcacctattttatcttcctttcagctccaaaatgttggaagaaactctgtatgtcccaggttctcacagcgataagaatctcattcagtttttgaagaactacctggacatgatttcttccaaatatagtttctggaataaaactggaggatcagatcattttctggttgcttgccacgactgggctccttccgagacgaggcagtacatggccaagtgcatcagagcattatgcaattctgatgtttcagaaggttttgtgttcggtaaagatgtagctcttcctgagacgactattcttgttcctaggagaccgcttagggctctcggaggcaaacctgtttcacaaaggcaaatacttgccttctttgcaggcggaatgcacggttaccttagacctctcctattgcaaaactggggaggaaacagagatccagacatgaaaatattcagtgagatacccaaatctaaagggaaaaagagttacatggagtacatgaagagcagcaagtattgcatctgcccaaaagggcacgaagtcaatagccctcgggtcgtggaggcattgttctatgagtgtgtcccggttatcatatccgataactttgtacctcccttcttcgaagttctgaattgggagtcttttgcggtatttgtcttggagaaagatattcctgatttgaagaacatattagtgtccataactgaggaaaggtatagagagatgcagatgagagtcaagatggtgcagaagcatttcctttggcattctaaacctgagagattcgatatatttcatatgatacttcactccatttggtacaatagagtttttcaaatttaaaaccacagagtaggtttgtgactgtagaacaagtaactaacagagattcattcgttaatatagcaaaaaagcaggttac

SEQ ID NO: 100406 - protein, 593 aa, Arabidopsis thaliana
  peptide (1)..(593): Ceres Seq. ID no. 13605052
MLNLWLREHLVYVCHQQNLVAKFRSQKAMKLLRFAGLVFIFITTFQFVNIRYYGGDIFSLSSQDKFPVSIDVSTEPVSTLSGPERLNSSSSRSVEVDEEESTGLKEDHVIGFDKNDTVQGHDSFVEDVKDKETLDLLPGTKSSSNESYEKIVEDADIAFENIRKMEILESKSDPSVDNLSSEVKKFMNVSNSGVVSITEMMNLLHQSRTSHVSLKVKRSSTIDHELLYARTQIENPPLIENDPLLHTPLYWNLSMFKRSYELMEKKLKVYVYREGKRPVLHKPVLKGIYASEGWFMKQLKSSRTFVTKDPRKAHLFYLPFSSKMLEETLYVPGSHSDKNLIQFLKNYLDMISSKYSFWNKTGGSDHFLVACHDWAPSETRQYMAKCIRALCNSDVSEGFVFGKDVALPETTILVPRRPLRALGGKPVSQRQILAFFAGGMHGYLRPLLLQNWGGNRDPDMKIFSEIPKSKGKKSYMEYMKSSKYCICPKGHEVNSPRVVEALFYECVPVIISDNFVPPFFEVLNWESFAVFVLEKDIPDLKNILVSITEERYREMQMRVKMVQKHFLWHSKPERFDIFHMILHSIWYNRVFQI

SEQ ID NO: 100407 - protein, 565 aa, Arabidopsis thaliana
  peptide (1)..(565): Ceres Seq. ID no. 13605053
MKLLRFAGLVFIFITTFQFVNIRYYGGDIFSLSSQDKFPVSIDVSTEPVSTLSGPERLNSSSSRSVEVDEEESTGLKEDHVIGFDKNDTVQGHDSFVEDVKDKETLDLLPGTKSSSNESYEKIVEDADIAFENIRKMEILESKSDPSVDNLSSEVKKFMNVSNSGVVSITEMMNLLHQSRTSHVSLKVKRSSTIDHELLYARTQIENPPLIENDPLLHTPLYWNLSMFKRSYELMEKKLKVYVYREGKRPVLHKPVLKGIYASEGWFMKQLKSSRTFVTKDPRKAHLFYLPFSSKMLEETLYVPGSHSDKNLIQFLKNYLDMISSKYSFWNKTGGSDHFLVACHDWAPSETRQYMAKCIRALCNSDVSEGFVFGKDVALPETTILVPRRPLRALGGKPVSQRQILAFFAGGMHGYLRPLLLQNWGGNRDPDMKIFSEIPKSKGKKSYMEYMKSSKYCICPKGHEVNSPRVVEALFYECVPVIISDNFVPPFFEVLNWESFAVFVLEKDIPDLKNILVSITEERYREMQMRVKMVQKHFLWHSKPERFDIFHMILHSIWYNRVFQI

SEQ ID NO: 100408 - protein, 429 aa, Arabidopsis thaliana
  peptide (1)..(429): Ceres Seq. ID no. 13605054
MEILESKSDPSVDNLSSEVKKFMNVSNSGVVSITEMMNLLHQSRTSHVSLKVKRSSTIDHELLYARTQIENPPLIENDPLLHTPLYWNLSMFKRSYELMEKKLKVYVYREGKRPVLHKPVLKGIYASEGWFMKQLKSSRTFVTKDPRKAHLFYLPFSSKMLEETLYVPGSHSDKNLIQFLKNYLDMISSKYSFWNKTGGSDHFLVACHDWAPSETRQYMAKCIRALCNSDVSEGFVFGKDVALPETTILVPRRPLRALGGKPVSQRQILAFFAGGMHGYLRPLLLQNWGGNRDPDMKIFSEIPKSKGKKSYMEYMKSSKYCICPKGHEVNSPRVVEALFYECVPVIISDNFVPPFFEVLNWESFAVFVLEKDIPDLKNILVSITEERYREMQMRVKMVQKHFLWHSKPERFDIFHMILHSIWYNRVFQI

SEQ ID NO: 100409 - DNA, 1324 bp, Arabidopsis thaliana
  misc_feature (1)..(1324): Ceres Seq. ID no. 13605059
  misc_feature (1)..(1324): Ortholog of  Ceres SEQ ID NO 14304475 as cited in SEQ ID NO 53438
  misc_feature (1)..(1324): Ortholog of  Ceres SEQ ID NO 15170555 as cited in SEQ ID NO 55313
  misc_feature (1)..(1324): Ortholog of  Ceres SEQ ID NO 15224695 as cited in SEQ ID NO 65418
atgtttaacgttacactcattaagatcgtaccttagggaaaaaaaactcaagagacaaaaaaaaaaggaaggcgcgtcagtgatggagaagattattgacgtagcttatggcgcatcagtgaaggtgggtttgacgttgttggagatgaatctgttgccggatattgtcattaggcggctcacacgtctgcttctggccggtcgtctccgttccggttacaaacccacggcggagatgcaactctccgatctcctccgttttgttgactctataaagaagatgcctatagctatccataccgagaagccaaagactcaacactatgaattaccgacagctttcttcgaacttgtccttggaagaaacatgaagtacagctcttgttacttctcaaacgattcaagtagcttagaagatgcagaggaagcaattttggctctttattgtgaaagagctaaagtggaagatggtcaaagtgttcttgatatcggatgtggctggggatccttgtctttgtacattgcacgcaagtacagcaaatgcaagttaaccggtatctgcaactccaaaacgcagaaagcatttatcgatgagaaatgccggaaactcgggcttcagaatatcgaaatcattgtcgcggatattagcacttttgagcatgaagggacatacgatcggatattctccatcgagatgtttgagcatatgaaaaactatggagagctactaaagaagataggaaagtggatgaaggaagatagtcttctgtttgttcactatttctgccataagacatttgcttaccactttgaggatgtgaatgacgatgactggatcacaagacacttcttcagcggaggaacaatgccatcagcagatcttctgctatattttcaagaaaatgtttcgattgtggatcattggctcgtaagcgggacgcattatgcaaaaacaagtgaagagtggctaaaaagaatggataaggagatagttgcagtaaaaaaaatcatggaagtgacttatgggaaagaagaagcagtgaagtggatggtttactggagaaccttcttcatcgcggttgctgagcttttcggatacaacaatggagaagagtggatggttgcacacttcctcttcaagaagaaatgatgatgatttctttatttttcttccaatttttcaataaagaatacaacaatcccattctactttgtattctatgatgttatggtttcataccaaaggagtttgttcaatctttttaaagtgacaatgttatctcgaaaaacatggggatcaagtatcatgaactggattcttttg

SEQ ID NO: 100410 - protein, 382 aa, Arabidopsis thaliana; identical to SEQ ID NO: 26916
  peptide (1)..(382): Ceres Seq. ID no. 13605060

SEQ ID NO: 100411 - protein, 355 aa, Arabidopsis thaliana; identical to SEQ ID NO: 26917
  peptide (1)..(355): Ceres Seq. ID no. 13605061

SEQ ID NO: 100412 - protein, 334 aa, Arabidopsis thaliana; identical to SEQ ID NO: 26918
  peptide (1)..(334): Ceres Seq. ID no. 13605062

SEQ ID NO: 100413 - DNA, 914 bp, Arabidopsis thaliana
  misc_feature (1)..(914): Ceres Seq. ID no. 13605071
  misc_feature (1)..(914): Ortholog of  Ceres SEQ ID NO 14310398 as cited in SEQ ID NO 54260
cgtctctctgcaaatccaaaaatggagtcatcagtgaaacccaatcctttcctctccttctcttctttcattcaccaccagtgtacccgcttcagctccgacctctccgcccgaatcgaagacacgaaacgattcgccgaaaccctagctactcgacgtttctctcttcctactccgccgcctttcgcctccgtctcacaatccaagtctggaaccccgacgacgacgttgagtccatctcttgtcgctaaagctctcgctgggacgtcggtgtttacagtcagtaacaccaataacgaattcgttcttatctcggatcctaccggaggcaagtctatcggtttgctctgttttcgacaagaggatgctgaagcttttcttgctcaggcgcgacttcggagaagagaattgaaaaccaatgcgaaggttgttcccattactctggaccaggtgtacttgctaaaagttgaagggatttcctttcgcttcttgccagatccaatccaaataaagaatgcgttagagctcaaatcctcaggaaataagaatgggtttgatggagttccggtttttcagtctgagcttcttgttgtgaggaaaaaaaatagacgttactgccctgtatatttcagtaaggaagatatagagagggaactttctaaatatacgagagcatcaagaggagatcaacaaattatggttgggagtctggaagatgtgttgaggaaaatggagatgagcgagaagaattcaggttgggaagatgtaatattcattccaccgggaagaagttatgcacaacacatgcaggatttgatcaaagagtaaaaccataatagacacaatgtgtgtatttttacttgataaaaaaaaaacagcctcttttgagattttgcaatattatcaattgcccg

SEQ ID NO: 100414 - protein, 275 aa, Arabidopsis thaliana
  peptide (1)..(275): Ceres Seq. ID no. 13605072
RLSANPKMESSVKPNPFLSFSSFIHHQCTRFSSDLSARIEDTKRFAETLATRRFSLPTPPPFASVSQSKSGTPTTTLSPSLVAKALAGTSVFTVSNTNNEFVLISDPTGGKSIGLLCFRQEDAEAFLAQARLRRRELKTNAKVVPITLDQVYLLKVEGISFRFLPDPIQIKNALELKSSGNKNGFDGVPVFQSELLVVRKKNRRYCPVYFSKEDIERELSKYTRASRGDQQIMVGSLEDVLRKMEMSEKNSGWEDVIFIPPGRSYAQHMQDLIKE

SEQ ID NO: 100415 - protein, 268 aa, Arabidopsis thaliana
  peptide (1)..(268): Ceres Seq. ID no. 13605073
MESSVKPNPFLSFSSFIHHQCTRFSSDLSARIEDTKRFAETLATRRFSLPTPPPFASVSQSKSGTPTTTLSPSLVAKALAGTSVFTVSNTNNEFVLISDPTGGKSIGLLCFRQEDAEAFLAQARLRRRELKTNAKVVPITLDQVYLLKVEGISFRFLPDPIQIKNALELKSSGNKNGFDGVPVFQSELLVVRKKNRRYCPVYFSKEDIERELSKYTRASRGDQQIMVGSLEDVLRKMEMSEKNSGWEDVIFIPPGRSYAQHMQDLIKE

SEQ ID NO: 100416 - DNA, 1734 bp, Arabidopsis thaliana
  misc_feature (1)..(1734): Ceres Seq. ID no. 13605074
  misc_feature (1)..(1734): Ortholog of  Ceres SEQ ID NO 14311870 as cited in SEQ ID NO 51574
  misc_feature (1)..(1734): Ortholog of  Ceres SEQ ID NO 15174583 as cited in SEQ ID NO 53693
  misc_feature (1)..(1734): Ortholog of  Ceres SEQ ID NO 13581563 as cited in SEQ ID NO 58942
  misc_feature (1)..(1734): Ortholog of  Ceres SEQ ID NO 13658707 as cited in SEQ ID NO 66286
  misc_feature (1)..(1734): Ortholog of  Ceres SEQ ID NO 13654528 as cited in SEQ ID NO 68080
actttttagcattcttctgtttgtaattttatctcagagcttgcttcatgggcttttgagttttctctctgtttccaaaaaacaatggaaccggagaagaatccgaccacagtattgagtgccattacaagaccttcgtgggcgtttcttctccttgttttcaccgtcttagcgattctctctctccaaatctcttccaattcttttctccctctctggatcccgacttctcaatatgacgaccctgttacctgctccgggtttttcaatcacgacccgttccctaaccggatcgttatgtcgattaccgatttcggcggtgttggagacggaaagacgtcgaacacggccgctttccgccgcgccgtaaggcaccttgaaggttttgcggcggagggtggggcccagctcaatgtcccggagggcacgtggctttctggaagcttcaacctcaccagcaatttcacgctctttctcgaacgcggcgctctcattttgggatccaaggacctagacgaatggccgataatagagccattgccttcttatggaagagggagagagagacctggtggtagacacatcagcctcattcatggagacaatctcactaatgttgtcattacaggagaaaatgggacaattgatggacaggggaaaatgtggtgggagttatggtggaacagaacattggtgcatacgagaggccatcttattgaactcaagaactctcataatatcctcatctctaacctcactttgctcaattctcctttctggacaatccatcctgtttattgcagtaatgttgttattagaaatatgaccatccttgctccgatgaatgctcctaacaccgacggtatagatccagactcaagcaccaatgtctgcattgaggattgttacatcgaaagtggtgatgatcttgtagctgtaaagagcgggtgggatcaatatggaatggctgtggcacgtccgagttcaaacatcgtaatccgaagaatctctggtactactcgcacttgttcaggagttgggataggcagtgagatgtctggtgggattttcaacataaccgttgaagatattcacgtctgggattctgcggctgggctccgcataaaaacagataaagggagaggtgggtacatttcgaatatcacctttaataatgtgttattggagaaagtgaaagttccgattagattcagcagtggctcaaatgatcactcagacgataaatgggatccgaaagctcttccgagagtaaaagggatttacattagcaatgttgtgagtctgaattcgagaaaggcccctatgttgctcggtgttgaaggcacatcgtttcaagacgtatgcttgaggaatgttacgcttcttgggttaccgaagaccgagaaatggaaatgcaaggatgtttctggttacgcgagtgacgtttttcctctgtcatgtccacagttgttgcagaagaaaggttcaatagctcagtgttcatatagatgaggtttgagaaagttttttttttgggtaaagatagagagaggagaccatgagttcgatcaagtttttttgagtgaagattcatggtcacttacgaaaaatgttaaatcttggatttcctttttcacatttttttgttcgtgttttgaatcttgattctttttatacatacattgtgtaacgaaatatactttgaattattccataaaagattttttcttattc

SEQ ID NO: 100417 - protein, 475 aa, Arabidopsis thaliana
  peptide (1)..(475): Ceres Seq. ID no. 13605075
MEPEKNPTTVLSAITRPSWAFLLLVFTVLAILSLQISSNSFLPLWIPTSQYDDPVTCSGFFNHDPFPNRIVMSITDFGGVGDGKTSNTAAFRRAVRHLEGFAAEGGAQLNVPEGTWLSGSFNLTSNFTLFLERGALILGSKDLDEWPIIEPLPSYGRGRERPGGRHISLIHGDNLTNVVITGENGTIDGQGKMWWELWWNRTLVHTRGHLIELKNSHNILISNLTLLNSPFWTIHPVYCSNVVIRNMTILAPMNAPNTDGIDPDSSTNVCIEDCYIESGDDLVAVKSGWDQYGMAVARPSSNIVIRRISGTTRTCSGVGIGSEMSGGIFNITVEDIHVWDSAAGLRIKTDKGRGGYISNITFNNVLLEKVKVPIRFSSGSNDHSDDKWDPKALPRVKGIYISNVVSLNSRKAPMLLGVEGTSFQDVCLRNVTLLGLPKTEKWKCKDVSGYASDVFPLSCPQLLQKKGSIAQCSYR

SEQ ID NO: 100418 - protein, 404 aa, Arabidopsis thaliana; identical to SEQ ID NO: 48503
  peptide (1)..(404): Ceres Seq. ID no. 13605076

SEQ ID NO: 100419 - protein, 283 aa, Arabidopsis thaliana; identical to SEQ ID NO: 48504
  peptide (1)..(283): Ceres Seq. ID no. 13605077

SEQ ID NO: 100420 - DNA, 1729 bp, Arabidopsis thaliana
  misc_feature (1)..(1729): Ceres Seq. ID no. 13605084
  misc_feature (1)..(1729): Ortholog of  Ceres SEQ ID NO 14313288 as cited in SEQ ID NO 67419
tgaaaggaagatgaacagcatcaagaatggcttcttcctctgcatgatttttcttctctggtgccatgtggattcaggggtttccatcgatcctttctcccatagccactctctcaacacagagtgtgtgatgaagcctccacgaagcagtgaaacgaaaggattattacaatttagccgctctctcgaagatgactctgatgaagaatggaaaattgatggaaatggattcattagagaaatggcacagagaattcagcttcaccaaggaaatatttacagcttctctgcttgggtgaaattgagagaaggaaacgacaagaaagtaggagttgtgttcaggacagaaaatggaagacttgttcatggaggtgaagttagggcaaatcaagaatgttggactttgcttaaaggtggcattgtaccagatttttcaggccctgtagatatattcttcgagagtgaaaacagaggagcaaagatctctgcacacaatgtgttgctaaaacagtttagcaaagaagaatggaaactgaaacaggaccaacttattgaaaagataaggaagagcaaagtgagatttgaagtaacttatgagaacaaaaccgcagtaaaaggcgtagtgatatcactaaaacaaaccaaatcatcttttctcttaggctgtggaatgaatttccggatcctacaaagccaagggtacagaaaatggtttgcgtcgcggttcaaaatcacttcattcactaatgaaatgaaatggtatgcaacggagaaagcacgaggtcaagagaactacacggtagccgattcaatgctgaaatttgcggaagataatgggatattggttagaggtcatacagtgttatgggacaacccaaaaatgcagcctagttgggtgaaaaatataaaagatccgaacgatgtgatgaacgtgacattgaacaggatcaactcggttatgaagagatacaaagggaagttaaccgggtgggatgtggttaacgagaatctgcattgggattactttgagaaaatgcttggtgcaaacgcttcgacaagtttctacaatctggcttttaagattgatcctgatgtgagattgtttgttaacgagtacaatacgatagaaaacactaaagagtttactgcgacgccgataaaggtgaagaagatgatggaggaaattctcgcctatccaggaaacaagaacatgaaaggagcaattggagctcagggtcactttggtccaactcagcctaacttagcttacataagatctgcattggatactttaggctcactaggtttgcctatttggcttacagaggttgatatgcctaaatgccctaatcaggcgcaatacgtggaagacattctcagggaagcttactcgcatcctgcggtgaaaggtatcataatatttggtggacctgaggtgtctggttttgacaagctgacacttgcagacaaagacttcaacaacacacaaacgggagatgtaattgataagttgctcaaggagtggcaacaaaaatcttcagagattcaaacgaatttcacagcagattctgataatgaagaggaagaggtctcattgttgcatggacattataatgtgaatgtaagccatccatggatagcaaacctatccaccagtttcagcttggaggtaactaaggagatggatcaagaccaggtgattagagtcgtaattagtgcttgaaattgc

SEQ ID NO: 100421 - protein, 573 aa, Arabidopsis thaliana
  peptide (1)..(573): Ceres Seq. ID no. 13605085
ERKMNSIKNGFFLCMIFLLWCHVDSGVSIDPFSHSHSLNTECVMKPPRSSETKGLLQFSRSLEDDSDEEWKIDGNGFIREMAQRIQLHQGNIYSFSAWVKLREGNDKKVGVVFRTENGRLVHGGEVRANQECWTLLKGGIVPDFSGPVDIFFESENRGAKISAHNVLLKQFSKEEWKLKQDQLIEKIRKSKVRFEVTYENKTAVKGVVISLKQTKSSFLLGCGMNFRILQSQGYRKWFASRFKITSFTNEMKWYATEKARGQENYTVADSMLKFAEDNGILVRGHTVLWDNPKMQPSWVKNIKDPNDVMNVTLNRINSVMKRYKGKLTGWDVVNENLHWDYFEKMLGANASTSFYNLAFKIDPDVRLFVNEYNTIENTKEFTATPIKVKKMMEEILAYPGNKNMKGAIGAQGHFGPTQPNLAYIRSALDTLGSLGLPIWLTEVDMPKCPNQAQYVEDILREAYSHPAVKGIIIFGGPEVSGFDKLTLADKDFNNTQTGDVIDKLLKEWQQKSSEIQTNFTADSDNEEEEVSLLHGHYNVNVSHPWIANLSTSFSLEVTKEMDQDQVIRVVISA

SEQ ID NO: 100422 - protein, 570 aa, Arabidopsis thaliana
  peptide (1)..(570): Ceres Seq. ID no. 13605086
MNSIKNGFFLCMIFLLWCHVDSGVSIDPFSHSHSLNTECVMKPPRSSETKGLLQFSRSLEDDSDEEWKIDGNGFIREMAQRIQLHQGNIYSFSAWVKLREGNDKKVGVVFRTENGRLVHGGEVRANQECWTLLKGGIVPDFSGPVDIFFESENRGAKISAHNVLLKQFSKEEWKLKQDQLIEKIRKSKVRFEVTYENKTAVKGVVISLKQTKSSFLLGCGMNFRILQSQGYRKWFASRFKITSFTNEMKWYATEKARGQENYTVADSMLKFAEDNGILVRGHTVLWDNPKMQPSWVKNIKDPNDVMNVTLNRINSVMKRYKGKLTGWDVVNENLHWDYFEKMLGANASTSFYNLAFKIDPDVRLFVNEYNTIENTKEFTATPIKVKKMMEEILAYPGNKNMKGAIGAQGHFGPTQPNLAYIRSALDTLGSLGLPIWLTEVDMPKCPNQAQYVEDILREAYSHPAVKGIIIFGGPEVSGFDKLTLADKDFNNTQTGDVIDKLLKEWQQKSSEIQTNFTADSDNEEEEVSLLHGHYNVNVSHPWIANLSTSFSLEVTKEMDQDQVIRVVISA

SEQ ID NO: 100423 - protein, 559 aa, Arabidopsis thaliana
  peptide (1)..(559): Ceres Seq. ID no. 13605087
MIFLLWCHVDSGVSIDPFSHSHSLNTECVMKPPRSSETKGLLQFSRSLEDDSDEEWKIDGNGFIREMAQRIQLHQGNIYSFSAWVKLREGNDKKVGVVFRTENGRLVHGGEVRANQECWTLLKGGIVPDFSGPVDIFFESENRGAKISAHNVLLKQFSKEEWKLKQDQLIEKIRKSKVRFEVTYENKTAVKGVVISLKQTKSSFLLGCGMNFRILQSQGYRKWFASRFKITSFTNEMKWYATEKARGQENYTVADSMLKFAEDNGILVRGHTVLWDNPKMQPSWVKNIKDPNDVMNVTLNRINSVMKRYKGKLTGWDVVNENLHWDYFEKMLGANASTSFYNLAFKIDPDVRLFVNEYNTIENTKEFTATPIKVKKMMEEILAYPGNKNMKGAIGAQGHFGPTQPNLAYIRSALDTLGSLGLPIWLTEVDMPKCPNQAQYVEDILREAYSHPAVKGIIIFGGPEVSGFDKLTLADKDFNNTQTGDVIDKLLKEWQQKSSEIQTNFTADSDNEEEEVSLLHGHYNVNVSHPWIANLSTSFSLEVTKEMDQDQVIRVVISA

SEQ ID NO: 100424 - DNA, 1405 bp, Arabidopsis thaliana
  misc_feature (1)..(1405): Ceres Seq. ID no. 13605096
  misc_feature (1)..(1405): Ortholog of  Ceres SEQ ID NO 15178909 as cited in SEQ ID NO 0
atgggttcatattttggaatttctacaattttcgtgatatgtttgctgggattttcagccaatgctcatgaggtgcttagacttacgtcttctccaggttctgatattacgcaggcgcttctgagagcattcacaacggcatgccaatctccgacaccgaggaaggtggtgatcccaaaaggacagttcaagcttggtgagatcatgatgtcgggtccatgcaaatctccagtcgagatcaccttgctaggcactgtcctcgctgacggaaactcgatccatggaaaagaaaaatgggtcgtgttccaaagaatggatgggttcaggttgaacggaggtggaactttcgacggtgaaggtaacgcagcttggagggtcaataactgtcacaagactttcgagtgcaagaaacttcccatcagtataaggtttgatttcgtgacgaacgctgagatcagagacatatcctcaatcgatgccaagaactttcacatcaacgtgattggcgccaagaacatgacctttgacaacgtcaagatcatggctccagcagagagccccaacactgacgggatccacttgggaagaagtgtcggggtctccattatcaactctaggatctccaccggagatgactgtgtctctgtcggggacgggatggtgaatcttctagttaagaacgtcgtgtgtggtcctggacacgggatcagtgttggaagccttggaaggtacggacatgaacaggacgtcagcggcattagggtcatcaattgcaccctccaggagactgacaatggcctcaggatcaagacttggccctctgcagcttgctccaccactgcctccaatattcattttgagaatatcatccttagaaacgttagtaacccaatcctcatcgaccaagagtactgtccttggaaccagtgcaacaagcagaaatcatcatccattaagctggcaaacataagcttcaggaggattagagggacatcagggaacaaagacgcagtgaagctattgtgcagcaagggatatccgtgtgagaacgttcaggttggagacattaatattcagtacactggagccgatggtccagccaccttcatgtgctcaaacgtaaggcctaagctagttggaactcagttcccaaaggcttgtaacacaccacccgtgctgacccaacctaagtaaaatgtagaaagttctcataacatttaggaatttctcatccattttttcttcaatcttagtttttcccaatgtcacacaagggagatttcttttatttaaaaactgtaaaagaattttgtttcactttttatttgtttgatgccaacacaaatacatagatgtgtgtgcgcatatatgaatgcaataaaactaaaaagatgcaggttatttt

SEQ ID NO: 100425 - protein, 397 aa, Arabidopsis thaliana
  peptide (1)..(397): Ceres Seq. ID no. 13605097
MGSYFGISTIFVICLLGFSANAHEVLRLTSSPGSDITQALLRAFTTACQSPTPRKVVIPKGQFKLGEIMMSGPCKSPVEITLLGTVLADGNSIHGKEKWVVFQRMDGFRLNGGGTFDGEGNAAWRVNNCHKTFECKKLPISIRFDFVTNAEIRDISSIDAKNFHINVIGAKNMTFDNVKIMAPAESPNTDGIHLGRSVGVSIINSRISTGDDCVSVGDGMVNLLVKNVVCGPGHGISVGSLGRYGHEQDVSGIRVINCTLQETDNGLRIKTWPSAACSTTASNIHFENIILRNVSNPILIDQEYCPWNQCNKQKSSSIKLANISFRRIRGTSGNKDAVKLLCSKGYPCENVQVGDINIQYTGADGPATFMCSNVRPKLVGTQFPKACNTPPVLTQPK

SEQ ID NO: 100426 - protein, 329 aa, Arabidopsis thaliana
  peptide (1)..(329): Ceres Seq. ID no. 13605098
MMSGPCKSPVEITLLGTVLADGNSIHGKEKWVVFQRMDGFRLNGGGTFDGEGNAAWRVNNCHKTFECKKLPISIRFDFVTNAEIRDISSIDAKNFHINVIGAKNMTFDNVKIMAPAESPNTDGIHLGRSVGVSIINSRISTGDDCVSVGDGMVNLLVKNVVCGPGHGISVGSLGRYGHEQDVSGIRVINCTLQETDNGLRIKTWPSAACSTTASNIHFENIILRNVSNPILIDQEYCPWNQCNKQKSSSIKLANISFRRIRGTSGNKDAVKLLCSKGYPCENVQVGDINIQYTGADGPATFMCSNVRPKLVGTQFPKACNTPPVLTQPK

SEQ ID NO: 100427 - protein, 328 aa, Arabidopsis thaliana
  peptide (1)..(328): Ceres Seq. ID no. 13605099
MSGPCKSPVEITLLGTVLADGNSIHGKEKWVVFQRMDGFRLNGGGTFDGEGNAAWRVNNCHKTFECKKLPISIRFDFVTNAEIRDISSIDAKNFHINVIGAKNMTFDNVKIMAPAESPNTDGIHLGRSVGVSIINSRISTGDDCVSVGDGMVNLLVKNVVCGPGHGISVGSLGRYGHEQDVSGIRVINCTLQETDNGLRIKTWPSAACSTTASNIHFENIILRNVSNPILIDQEYCPWNQCNKQKSSSIKLANISFRRIRGTSGNKDAVKLLCSKGYPCENVQVGDINIQYTGADGPATFMCSNVRPKLVGTQFPKACNTPPVLTQPK

SEQ ID NO: 100428 - DNA, 1353 bp, Arabidopsis thaliana
  misc_feature (1)..(1353): Ceres Seq. ID no. 13605104
  misc_feature (1)..(1353): Ortholog of  Ceres SEQ ID NO 14312320 as cited in SEQ ID NO 59385
aaagatcaggtttcgatttcaccaaaaaccaaacactgtgtcttccatcctaaagattgtaaagggaaaccgttttcgattttcagagaagatcacacatctttcgtcccttcactgccatacgtgtcgataaagatggcggctatggcggcgaagcttcagttatcggcgaaatctgatcaaagcagtgtgcgattaccgagagtgatcaacctctcccgcgatccaacgactagagtctcgtttccgcgaaatggatcagtttgttccctccacaccaatttctcttctccacatctcgcgaaaccttgcgccggaggtggtggtggtggaagcaccggtaataacggcggcggaagcggaagcggaggaggaggtggtggttttggaggttcagggggtgaagcaagtgaagaatcatctccatggggaccaatagggttattcatccaaggatggagatcaagagttgcagctgatcctcagttcccttttaaggtactaatggaagagatcgtaggacttagcgcttgtgttctcggtgacatggcttcacgacctaatttcggattaaacgagctagatttcgtcttctccacgctcgttgtaggttcgattctcaatttcgtactcatgtacatgttagctcctactgcagcaactcttggctcctctcagactttgcctggaatctttagaaactgtccatcaagccatatgtttgaacagggtagcttcaccgttatgaaccgtttcgggactcttgtgtacaaaggaatggtttttgctagtgtaggattagctgcaggtcttgtaggtactgccatttctaatgggttgattatgctgaggaagaagatggacccgagcttcgaaacgccaaacaaaccgccaccgactgtgcttaattctttaacttgggcaactcatatgggagtgagtgcgaatgcaaggtaccaaacgttgaatgggattgagttcttgctggcaaaggtgttgcccccattggtgtttaagacaagtgtgatagttttgaggtgtgcaaacaatgttgctggaggaatgtcgtttgttttgttggcaaggatgacgggatcacagtcggtggaggagaagacagagatttcagagaaagagaaggatgattgaatctcatcctagtctttcaaggtttttgttcctgtgtgtttttcgccagttcataggcttcttgagttgaaaccatttgtgttggaataaataagatgaatcccttcttaggtccatcctattggatgtcattgttaggccaagtttgttgttttctttttcagttaccatgaatataataactcaataaaaaggttataaatt

SEQ ID NO: 100429 - protein, 382 aa, Arabidopsis thaliana
  peptide (1)..(382): Ceres Seq. ID no. 13605105
KDQVSISPKTKHCVFHPKDCKGKPFSIFREDHTSFVPSLPYVSIKMAAMAAKLQLSAKSDQSSVRLPRVINLSRDPTTRVSFPRNGSVCSLHTNFSSPHLAKPCAGGGGGGSTGNNGGGSGSGGGGGGFGGSGGEASEESSPWGPIGLFIQGWRSRVAADPQFPFKVLMEEIVGLSACVLGDMASRPNFGLNELDFVFSTLVVGSILNFVLMYMLAPTAATLGSSQTLPGIFRNCPSSHMFEQGSFTVMNRFGTLVYKGMVFASVGLAAGLVGTAISNGLIMLRKKMDPSFETPNKPPPTVLNSLTWATHMGVSANARYQTLNGIEFLLAKVLPPLVFKTSVIVLRCANNVAGGMSFVLLARMTGSQSVEEKTEISEKEKDD

SEQ ID NO: 100430 - protein, 337 aa, Arabidopsis thaliana
  peptide (1)..(337): Ceres Seq. ID no. 13605106
MAAMAAKLQLSAKSDQSSVRLPRVINLSRDPTTRVSFPRNGSVCSLHTNFSSPHLAKPCAGGGGGGSTGNNGGGSGSGGGGGGFGGSGGEASEESSPWGPIGLFIQGWRSRVAADPQFPFKVLMEEIVGLSACVLGDMASRPNFGLNELDFVFSTLVVGSILNFVLMYMLAPTAATLGSSQTLPGIFRNCPSSHMFEQGSFTVMNRFGTLVYKGMVFASVGLAAGLVGTAISNGLIMLRKKMDPSFETPNKPPPTVLNSLTWATHMGVSANARYQTLNGIEFLLAKVLPPLVFKTSVIVLRCANNVAGGMSFVLLARMTGSQSVEEKTEISEKEKDD

SEQ ID NO: 100431 - protein, 334 aa, Arabidopsis thaliana
  peptide (1)..(334): Ceres Seq. ID no. 13605107
MAAKLQLSAKSDQSSVRLPRVINLSRDPTTRVSFPRNGSVCSLHTNFSSPHLAKPCAGGGGGGSTGNNGGGSGSGGGGGGFGGSGGEASEESSPWGPIGLFIQGWRSRVAADPQFPFKVLMEEIVGLSACVLGDMASRPNFGLNELDFVFSTLVVGSILNFVLMYMLAPTAATLGSSQTLPGIFRNCPSSHMFEQGSFTVMNRFGTLVYKGMVFASVGLAAGLVGTAISNGLIMLRKKMDPSFETPNKPPPTVLNSLTWATHMGVSANARYQTLNGIEFLLAKVLPPLVFKTSVIVLRCANNVAGGMSFVLLARMTGSQSVEEKTEISEKEKDD

SEQ ID NO: 100432 - DNA, 1682 bp, Arabidopsis thaliana
  misc_feature (1)..(1682): Ceres Seq. ID no. 13605108
  misc_feature (1)..(1682): Ortholog of  Ceres SEQ ID NO 15179007 as cited in SEQ ID NO 1038
  misc_feature (1)..(1682): Ortholog of  Ceres SEQ ID NO 15226449 as cited in SEQ ID NO 58879
  misc_feature (1)..(1682): Ortholog of  Ceres SEQ ID NO 13597146 as cited in SEQ ID NO 63311
aataccactatctcttctctctctcaatctctcaaaagatctccggtaacgttttaacgtcggtgaaaaaatgcggaagttaacggcggttaattcactactgaaacggaacaattatcttcttccgcgccatggctcctcacaaacagcagctcagagaacatcctccgtccgcgagaccgagaccgaaacaaaacttccgaaaatgcccccgttcaattattctccgccgccttacgacggtccatctacggcagagatcatcgcaaagcggcgagagttcctcagccccgctctttttcacttctacaacacacccttaaacattgtggaggcaaagatgcagtatgtgttcgacgagaatggacgtcgatatttagatgcctttggaggaatagcgacggtttcgtgcggccattgccacccggaagtagttaactccgtcgtcaaacagttgaaacttattaaccactccaccatcctttaccttaaccacaccatctccgatttcgctgaagcccttgtctccactcttccgggagatctcaaggtggtgtttttcacgaattcgggtacggaggcgaatgaacttgcgatgatgatggctagactgtatacaggatgtaacgacatcgtttcgcttaggaactcttatcatggaaacgcagctgctactatgggtgccactgctcagtccaactggaaattcaacgtcgttcagagtggagttcatcacgccataaatccagatccttacagaggaatatttggatccgacggtgaaaagtacgcgagtgatgtacacgatcttatccaattcggaacgtccggtcaagtcgccggtttcattggcgaatcaatccagggtgttggaggaatcgtagagcttgctcccggatacttaccggcggcttacgacatcgtgaggaaagccggaggagtttgcatcgccgatgaagtccaatccggttttgctcgtaccggaacccatttctgggggtttcaatcccatggtgttatccctgacatcgtcaccatggccaaggggatcggtaacggtataccacttggagcggttgtgacgacaccggagattgccggcgttttaagccgtcggagttactttaatactttcggcggaaatccaatgtgcacggccgcaggacacgcagtacttagagtccttcacgaagagaagctccaagagaatgctaacctcgttggctcacatcttaaacgtagacttacgctactcaaaaacaaatacgaactcattggagacgtgagagggagaggattgatgctaggagttgagtttgtcaaagaccgcgacttaaaaactcctgcaaaagcagagacccttcatttaatggatcaaatgaaagaaatgggagtgttggtggggaaaggtggattctatgggaatgtcttcagaatcactcctcctctctgcttcaccctctccgacgctgatttcctcgtggatgtgatggatcacgccatgtccaagatgtgatttactatctttatccgttctctaatgatcactcacccttgtatgtgtatataaataacacaatacatcataaagtagaattacaattggtgtttaccgaaatatatcacagatgcaagtatatgtaactaaatgtacagtactgtatacacttgatagaatctac

SEQ ID NO: 100433 - protein, 481 aa, Arabidopsis thaliana
  peptide (1)..(481): Ceres Seq. ID no. 13605109
MRKLTAVNSLLKRNNYLLPRHGSSQTAAQRTSSVRETETETKLPKMPPFNYSPPPYDGPSTAEIIAKRREFLSPALFHFYNTPLNIVEAKMQYVFDENGRRYLDAFGGIATVSCGHCHPEVVNSVVKQLKLINHSTILYLNHTISDFAEALVSTLPGDLKVVFFTNSGTEANELAMMMARLYTGCNDIVSLRNSYHGNAAATMGATAQSNWKFNVVQSGVHHAINPDPYRGIFGSDGEKYASDVHDLIQFGTSGQVAGFIGESIQGVGGIVELAPGYLPAAYDIVRKAGGVCIADEVQSGFARTGTHFWGFQSHGVIPDIVTMAKGIGNGIPLGAVVTTPEIAGVLSRRSYFNTFGGNPMCTAAGHAVLRVLHEEKLQENANLVGSHLKRRLTLLKNKYELIGDVRGRGLMLGVEFVKDRDLKTPAKAETLHLMDQMKEMGVLVGKGGFYGNVFRITPPLCFTLSDADFLVDVMDHAMSKM

SEQ ID NO: 100434 - protein, 436 aa, Arabidopsis thaliana
  peptide (1)..(436): Ceres Seq. ID no. 13605110
MPPFNYSPPPYDGPSTAEIIAKRREFLSPALFHFYNTPLNIVEAKMQYVFDENGRRYLDAFGGIATVSCGHCHPEVVNSVVKQLKLINHSTILYLNHTISDFAEALVSTLPGDLKVVFFTNSGTEANELAMMMARLYTGCNDIVSLRNSYHGNAAATMGATAQSNWKFNVVQSGVHHAINPDPYRGIFGSDGEKYASDVHDLIQFGTSGQVAGFIGESIQGVGGIVELAPGYLPAAYDIVRKAGGVCIADEVQSGFARTGTHFWGFQSHGVIPDIVTMAKGIGNGIPLGAVVTTPEIAGVLSRRSYFNTFGGNPMCTAAGHAVLRVLHEEKLQENANLVGSHLKRRLTLLKNKYELIGDVRGRGLMLGVEFVKDRDLKTPAKAETLHLMDQMKEMGVLVGKGGFYGNVFRITPPLCFTLSDADFLVDVMDHAMSKM

SEQ ID NO: 100435 - protein, 391 aa, Arabidopsis thaliana
  peptide (1)..(391): Ceres Seq. ID no. 13605111
MQYVFDENGRRYLDAFGGIATVSCGHCHPEVVNSVVKQLKLINHSTILYLNHTISDFAEALVSTLPGDLKVVFFTNSGTEANELAMMMARLYTGCNDIVSLRNSYHGNAAATMGATAQSNWKFNVVQSGVHHAINPDPYRGIFGSDGEKYASDVHDLIQFGTSGQVAGFIGESIQGVGGIVELAPGYLPAAYDIVRKAGGVCIADEVQSGFARTGTHFWGFQSHGVIPDIVTMAKGIGNGIPLGAVVTTPEIAGVLSRRSYFNTFGGNPMCTAAGHAVLRVLHEEKLQENANLVGSHLKRRLTLLKNKYELIGDVRGRGLMLGVEFVKDRDLKTPAKAETLHLMDQMKEMGVLVGKGGFYGNVFRITPPLCFTLSDADFLVDVMDHAMSKM

SEQ ID NO: 100436 - DNA, 741 bp, Arabidopsis thaliana
  misc_feature (1)..(741): Ceres Seq. ID no. 13605128
  misc_feature (1)..(741): Ortholog of  Ceres SEQ ID NO 15175666 as cited in SEQ ID NO 54985
  misc_feature (1)..(741): Ortholog of  Ceres SEQ ID NO 14310460 as cited in SEQ ID NO 55105
  misc_feature (1)..(741): Ortholog of  Ceres SEQ ID NO 15179888 as cited in SEQ ID NO 66879
  misc_feature (1)..(741): Ortholog of  Ceres SEQ ID NO 13596056 as cited in SEQ ID NO 68307
  misc_feature (1)..(741): Ortholog of  Ceres SEQ ID NO 12388689 as cited in SEQ ID NO 0
atggtgaagaagagttacccggaagtgaaagaagagtacaagaaagctgttcagagatgcaagaggaagctccgtggtcttattgccgagaagcactgtgctcccatcgtcctccgtcttgcatggcactcggctgggacatttgatgtgaagacgaagacaggaggaccgtttgggacgataaggcatccccaagagctagcccatgatgccaacaatggtcttgatattgccgttaggcttcttgaccctatcaaggagctgttccctattctgtcatatgctgacttctaccagctagctggagtagttgctgttgagatcactggaggaccagagattccatttcatcctggtagactggacaaagttgagccacctcctgaaggtcgtctgcctcaggccaccaaaggtgtggatcatctaagagatgtgtttggtcggatgggactcaatgacaaagatatcgttgcattgtctggtggacacaccttgggtcggtgccacaaggagcgttcaggattcgagggtgcatggacaccaaacccgctcatttttgacaactcctatttcaaagagatactaagcggagagaaagaaggacttcttcaactaccaaccgacaaggctcttcttgatgatcctctctttctcccatttgttgaaaaatatgctgcagatgaggatgccttcttcgaagactatacggaagctcatctaaagttgtcagaactcgggtaa

SEQ ID NO: 100437 - protein, 246 aa, Arabidopsis thaliana
  peptide (1)..(246): Ceres Seq. ID no. 13605129
MVKKSYPEVKEEYKKAVQRCKRKLRGLIAEKHCAPIVLRLAWHSAGTFDVKTKTGGPFGTIRHPQELAHDANNGLDIAVRLLDPIKELFPILSYADFYQLAGVVAVEITGGPEIPFHPGRLDKVEPPPEGRLPQATKGVDHLRDVFGRMGLNDKDIVALSGGHTLGRCHKERSGFEGAWTPNPLIFDNSYFKEILSGEKEGLLQLPTDKALLDDPLFLPFVEKYAADEDAFFEDYTEAHLKLSELG

SEQ ID NO: 100438 - DNA, 1162 bp, Arabidopsis thaliana
  misc_feature (1)..(1162): Ceres Seq. ID no. 13605137
  misc_feature (1)..(1162): Ortholog of  Ceres SEQ ID NO 15169153 as cited in SEQ ID NO 56962
gtttaacttgttgactttttttttaatccacaagtttttttttttttgttgcgtcagattttttgtttgttttccagtgacgtctttgatctccctcccgccgacgacacaagcacgccgtctggtttacctataagtgtttttgtgtggtgtctgtgtctcactgtgtcgatagattaaaataatttctcttcggccatgtcgtggtcgaaagcttgtagaggaactcgaatttcttcatatttagagaaccttcatcgaacatctcagtatccaaggactattttatgctctcgttattacactcatggagcttgtaaaagcaatgagcattatctccgaagcaagagagtattttggggaagctcttcttcatggagcttgaattctcactctgctactgctaaatcgatgttagatagtgcccatcgccagtattctactcactctccatcggaaaccaaatcacagaaaatgctctattacctcaccgctgttgtctttggtatggtggggttaacttacgctgctgtgccattgtatagaacattctgccaagctactggatatggaggtactgttcaacgcaaagagactgttgaggagaagattgctaggcattcagaatctggtaccgtcactgaaagggagattgtggtgcagttcaatgctgatgttgcagatgggatgcagtggaagttcactccaacacaaagagaggttagagtaaagccaggagaaagtgcactcgcattttacactgctgaaaacaaaagttcagctccaataaccggagtctcgacatacaatgtcactcccatgaaggcaggagtttatttcaacaagatacaatgtttttgctttgaggagcagcgactccttcctggagagcagattgacatgccggtcttcttctacattgatcctgagtttgagactgatccaagaatggacggaatcaacaacttgatattgtcttacactttcttcaaagtgtcagaggaaaatactacagagacggtcaacaataacaactctgttccagttcaagaaaccaattaaaaaaagtgtccatgttttttaagagctacaaaatatcttgtgacacaaccttatgcaagaacagtctctcttagatttaataaccaatttccaaattcgg

SEQ ID NO: 100439 - protein, 287 aa, Arabidopsis thaliana
  peptide (1)..(287): Ceres Seq. ID no. 13605138
MSWSKACRGTRISSYLENLHRTSQYPRTILCSRYYTHGACKSNEHYLRSKRVFWGSSSSWSLNSHSATAKSMLDSAHRQYSTHSPSETKSQKMLYYLTAVVFGMVGLTYAAVPLYRTFCQATGYGGTVQRKETVEEKIARHSESGTVTEREIVVQFNADVADGMQWKFTPTQREVRVKPGESALAFYTAENKSSAPITGVSTYNVTPMKAGVYFNKIQCFCFEEQRLLPGEQIDMPVFFYIDPEFETDPRMDGINNLILSYTFFKVSEENTTETVNNNNSVPVQETN

SEQ ID NO: 100440 - protein, 216 aa, Arabidopsis thaliana
  peptide (1)..(216): Ceres Seq. ID no. 13605139
MLDSAHRQYSTHSPSETKSQKMLYYLTAVVFGMVGLTYAAVPLYRTFCQATGYGGTVQRKETVEEKIARHSESGTVTEREIVVQFNADVADGMQWKFTPTQREVRVKPGESALAFYTAENKSSAPITGVSTYNVTPMKAGVYFNKIQCFCFEEQRLLPGEQIDMPVFFYIDPEFETDPRMDGINNLILSYTFFKVSEENTTETVNNNNSVPVQETN

SEQ ID NO: 100441 - protein, 195 aa, Arabidopsis thaliana
  peptide (1)..(195): Ceres Seq. ID no. 13605140
MLYYLTAVVFGMVGLTYAAVPLYRTFCQATGYGGTVQRKETVEEKIARHSESGTVTEREIVVQFNADVADGMQWKFTPTQREVRVKPGESALAFYTAENKSSAPITGVSTYNVTPMKAGVYFNKIQCFCFEEQRLLPGEQIDMPVFFYIDPEFETDPRMDGINNLILSYTFFKVSEENTTETVNNNNSVPVQETN

SEQ ID NO: 100442 - DNA, 929 bp, Arabidopsis thaliana
  misc_feature (1)..(929): Ceres Seq. ID no. 13605144
  misc_feature (1)..(929): Ortholog of  Ceres SEQ ID NO 14306627 as cited in SEQ ID NO 53023
  misc_feature (1)..(929): Ortholog of  Ceres SEQ ID NO 15174917 as cited in SEQ ID NO 53650
  misc_feature (1)..(929): Ortholog of  Ceres SEQ ID NO 14304034 as cited in SEQ ID NO 53878
  misc_feature (1)..(929): Ortholog of  Ceres SEQ ID NO 14307559 as cited in SEQ ID NO 54006
  misc_feature (1)..(929): Ortholog of  Ceres SEQ ID NO 14307797 as cited in SEQ ID NO 54802
  misc_feature (1)..(929): Ortholog of  Ceres SEQ ID NO 15168374 as cited in SEQ ID NO 55652
  misc_feature (1)..(929): Ortholog of  Ceres SEQ ID NO 13663874 as cited in SEQ ID NO 67003
atcttttgggagaggagaaagaaaaagaaaatgggaagagggagagtagaattgaagaggatagagaacaagatcaataggcaagtgacgtttgcaaagagaaggaatggtcttttgaagaaagcatacgagctttcagttctatgtgatgcagaagttgctctcatcatcttctcaaatagaggaaagctgtacgagttttgcagtagttcgagcatgcttcggacactggagaggtaccaaaagtgtaactatggagcaccagaacccaatgtgccttcaagagaggccttagcagaacttagtagccagcaggagtatctcaagcttaaggagcgttatgacgccttacagagaacccaaaggaatctgttgggagaagatcttggacctctaagtacaaaggagcttgagtcacttgagagacagcttgattcttccttgaagcagatcagagctctcaggacacagtttatgcttgaccagctcaacgatcttcagagtaaggaacgcatgctgactgagacaaataaaactctaagactaaggttagctgatgggtatcagatgccactccagctgaaccctaaccaagaagaggttgatcactacggtcgtcatcatcatcaacaacaacaacactcccaagctttcttccagcctttggaatgtgaacccattcttcagatcgggtatcaggggcaacaagatggaatgggagcaggaccaagtgtgaataattacatgttgggttggttaccttatgacaccaactctatttgaatctttctcacttaatcaatccctctcttttttttttgacatttttaagatgatgtttctattttattacctctctcatgttttctgtcttgtgtgcatgtgtgtgtgtaatgtttatgcccttctattattcaataattttttcg

SEQ ID NO: 100443 - protein, 260 aa, Arabidopsis thaliana
  peptide (1)..(260): Ceres Seq. ID no. 13605145
IFWERRKKKKMGRGRVELKRIENKINRQVTFAKRRNGLLKKAYELSVLCDAEVALIIFSNRGKLYEFCSSSSMLRTLERYQKCNYGAPEPNVPSREALAELSSQQEYLKLKERYDALQRTQRNLLGEDLGPLSTKELESLERQLDSSLKQIRALRTQFMLDQLNDLQSKERMLTETNKTLRLRLADGYQMPLQLNPNQEEVDHYGRHHHQQQQHSQAFFQPLECEPILQIGYQGQQDGMGAGPSVNNYMLGWLPYDTNSI

SEQ ID NO: 100444 - protein, 250 aa, Arabidopsis thaliana
  peptide (1)..(250): Ceres Seq. ID no. 13605146
MGRGRVELKRIENKINRQVTFAKRRNGLLKKAYELSVLCDAEVALIIFSNRGKLYEFCSSSSMLRTLERYQKCNYGAPEPNVPSREALAELSSQQEYLKLKERYDALQRTQRNLLGEDLGPLSTKELESLERQLDSSLKQIRALRTQFMLDQLNDLQSKERMLTETNKTLRLRLADGYQMPLQLNPNQEEVDHYGRHHHQQQQHSQAFFQPLECEPILQIGYQGQQDGMGAGPSVNNYMLGWLPYDTNSI

SEQ ID NO: 100445 - protein, 188 aa, Arabidopsis thaliana
  peptide (1)..(188): Ceres Seq. ID no. 13605147
MLRTLERYQKCNYGAPEPNVPSREALAELSSQQEYLKLKERYDALQRTQRNLLGEDLGPLSTKELESLERQLDSSLKQIRALRTQFMLDQLNDLQSKERMLTETNKTLRLRLADGYQMPLQLNPNQEEVDHYGRHHHQQQQHSQAFFQPLECEPILQIGYQGQQDGMGAGPSVNNYMLGWLPYDTNSI

SEQ ID NO: 100446 - DNA, 1605 bp, Arabidopsis thaliana
  misc_feature (1)..(1605): Ceres Seq. ID no. 13605148
  misc_feature (1)..(1605): Ortholog of  Ceres SEQ ID NO 13597647 as cited in SEQ ID NO 65258
gagtaacacaacactgtcccttcgacaaaacaattttgagtctctctattctctattctctctcctctccgcctctctttctctctctctctatctccgtcgtcgcaagagtgcatcatctttaacgccggcaccttcccgctgctctcttctaccaattctctcttagatcttctcatgcgtcttcttcttatatcttaatccttcgtcgtacaagctcgccggattgagttttcgtcttccatggctattcctctcgggaagctcaccatcctcatcggtgcaggtcttgttgggtcagtacttgctaaagaagggagtttaccagatgtctcgagttttgtctccggtgctcttaagatggtatttaggcagctgaagcaagaagaacctgccaaatcagccagcaagccccgcaatgatacactaatggcccaggttaacagtcttaggcatgaattgagcttgctttcttcaaacagacctatcactattgttaccacagcaggatcaggtggtaaaaagtatggttacatcattataattggggtgataggctacggatatgtatggtggaagggctggaaacttccggatcttatgtttgcaacaaggcgcagcttatcagatgcatgtaatagtgttggcagccagatcgatggtttttacacatcactctcgggtaccaaaaaagagttaagttcaaaaattgacgggatgggtcgtagtttggatgctaatacagaaattattcaagatacaggacgagaggtgatggaactacaaagaggtacggaaaatattaaggatgacgttaagtttgttttcgatgctgttgaaaatctggcaagcaaagtctatcgtattgagggaaatcaggatattacacttaaaggagtcggggcgctgcatgctcaggttcgggagaacaaaagaattcaagagtccaataaggctttaccatcaacttcagcagtgccagcccttgaggcagctcctatgacaccatcgtcaaggactttgtctttgcctcctgcttctccccgtgaatctcagtcgccttcaacttctaatggagctcaacagtcacgtggtccacttcagcacactcaatctatgtctggtttgaaggagataagcgaaaatggaacacattctggagaaactacgggaaacacgagttctggcctgtttagtattttctcaataccaagaatagggaggactcgaagtgtggtcaacacagtgcctactaactccattggaccccaatagtcgtctgtcaatactgaagagagagtttgatcattcaaatgatcagcaagccagagatggttaagtgctagtagaggatttgaatagatcatgctgcgtctatgcttgatcccttgcttagtgtagacaatgtgataaatggtgcataatttttgtagggatgcagcttatatttaattggattatatgtcacaattaatcagtatgttgctctgccctttcgtaattcagtttatacagagaggtcgacgatggttttgtatggccgtctctacttttccttcttttttttgtattgaataaaaggctggtccatttggctatgacatt

SEQ ID NO: 100447 - protein, 343 aa, Arabidopsis thaliana
  peptide (1)..(343): Ceres Seq. ID no. 13605149
MAIPLGKLTILIGAGLVGSVLAKEGSLPDVSSFVSGALKMVFRQLKQEEPAKSASKPRNDTLMAQVNSLRHELSLLSSNRPITIVTTAGSGGKKYGYIIIIGVIGYGYVWWKGWKLPDLMFATRRSLSDACNSVGSQIDGFYTSLSGTKKELSSKIDGMGRSLDANTEIIQDTGREVMELQRGTENIKDDVKFVFDAVENLASKVYRIEGNQDITLKGVGALHAQVRENKRIQESNKALPSTSAVPALEAAPMTPSSRTLSLPPASPRESQSPSTSNGAQQSRGPLQHTQSMSGLKEISENGTHSGETTGNTSSGLFSIFSIPRIGRTRSVVNTVPTNSIGPQ

SEQ ID NO: 100448 - protein, 304 aa, Arabidopsis thaliana
  peptide (1)..(304): Ceres Seq. ID no. 13605150
MVFRQLKQEEPAKSASKPRNDTLMAQVNSLRHELSLLSSNRPITIVTTAGSGGKKYGYIIIIGVIGYGYVWWKGWKLPDLMFATRRSLSDACNSVGSQIDGFYTSLSGTKKELSSKIDGMGRSLDANTEIIQDTGREVMELQRGTENIKDDVKFVFDAVENLASKVYRIEGNQDITLKGVGALHAQVRENKRIQESNKALPSTSAVPALEAAPMTPSSRTLSLPPASPRESQSPSTSNGAQQSRGPLQHTQSMSGLKEISENGTHSGETTGNTSSGLFSIFSIPRIGRTRSVVNTVPTNSIGPQ

SEQ ID NO: 100449 - protein, 281 aa, Arabidopsis thaliana
  peptide (1)..(281): Ceres Seq. ID no. 13605151
MAQVNSLRHELSLLSSNRPITIVTTAGSGGKKYGYIIIIGVIGYGYVWWKGWKLPDLMFATRRSLSDACNSVGSQIDGFYTSLSGTKKELSSKIDGMGRSLDANTEIIQDTGREVMELQRGTENIKDDVKFVFDAVENLASKVYRIEGNQDITLKGVGALHAQVRENKRIQESNKALPSTSAVPALEAAPMTPSSRTLSLPPASPRESQSPSTSNGAQQSRGPLQHTQSMSGLKEISENGTHSGETTGNTSSGLFSIFSIPRIGRTRSVVNTVPTNSIGPQ

SEQ ID NO: 100450 - DNA, 863 bp, Arabidopsis thaliana
  misc_feature (1)..(863): Ceres Seq. ID no. 13605152
  misc_feature (1)..(863): Ortholog of  Ceres SEQ ID NO 15173284 as cited in SEQ ID NO 61828
  misc_feature (1)..(863): Ortholog of  Ceres SEQ ID NO 15178906 as cited in SEQ ID NO 0
aattggtcaaagaaaaaaaaagaaagacaaagaggattgaacggtagacgtagacgccattggagtttgaaagggaattagtcgacgttttatggatcattgtcgtttcggtgtcattttcttcttcttctttcgctagcacgatttaaagcctgactagatccatcatcggccatggaggattctacagccacggctacgtcttcgtcttccactcattatttctccattttcacgaattatcctctcatttccgccgtcacctctttcactatcgctcaattcatcaaactcttcacctcctggtatagggaacggagatgggatctcaaacagcttattgggtctggaggaatgccttcttcgcattcagcgaccgttacagctctcgctgtagctattggtttacaagaaggctttggtggatcacattttgccattgctttgattttggcatctgttgtgatgtatgatgctaccggtgttagattacatgctggtcgtcaagctgaggttctcaatcagattgtatatgaacttcctgcagaacatccgctggctgaaagcagacctttgcgggaacttcttggtcatacccctccccaggtcgttgctggtggaatgcttggaagtgctacagcagtcaccggatacttatttttcaggatagctacaagctaacgtcaagaacatgcatagacacaactcttctgcttcattgcctattgaagccactggagagtaccaaaacagatttacaaccgaatccgagttaaaaatatatttattcttgtttaacattaccattaccatatgtaaagaaatcgtgaaacaccattacaaaaataacgtgattttatttg

SEQ ID NO: 100451 - protein, 168 aa, Arabidopsis thaliana
  peptide (1)..(168): Ceres Seq. ID no. 13605153
MEDSTATATSSSSTHYFSIFTNYPLISAVTSFTIAQFIKLFTSWYRERRWDLKQLIGSGGMPSSHSATVTALAVAIGLQEGFGGSHFAIALILASVVMYDATGVRLHAGRQAEVLNQIVYELPAEHPLAESRPLRELLGHTPPQVVAGGMLGSATAVTGYLFFRIATS

SEQ ID NO: 100452 - protein, 108 aa, Arabidopsis thaliana; identical to SEQ ID NO: 20850
  peptide (1)..(108): Ceres Seq. ID no. 13605154

SEQ ID NO: 100453 - DNA, 1103 bp, Arabidopsis thaliana
  misc_feature (1)..(1103): Ceres Seq. ID no. 13605159
  misc_feature (1)..(1103): Ortholog of  Ceres SEQ ID NO 13594740 as cited in SEQ ID NO 51721
  misc_feature (1)..(1103): Ortholog of  Ceres SEQ ID NO 14316497 as cited in SEQ ID NO 58285
  misc_feature (1)..(1103): Ortholog of  Ceres SEQ ID NO 13595944 as cited in SEQ ID NO 68153
gttgtgcaaaagaacagaatgagttctaagtttgatatcggctccttaagcatagtaatgactctgcttatttgcttcttattattatctttggctccaaaacttgaggctgagctcgcaacggtccaacatgctccaaaccccgatggctctatcagttttctggtgattggagattggggtaggcatggactctacaaccaatcccaagttgccctccagatggggagaatcggggaggagatggatatcaattttgtggtatcgacgggtgataacatctacgataacgggatgaaaagtatcgatgatcccgcctttcaactctcctttagtaatatctacacttctcctagcctgcaaaagccttggtaccttgtattggggaatcacgactatagaggagatgttgaggcacaattgagtcctatcctcagatctatggatagccgttggatttgcatgagatccttcatcgttgacgctgagatcgcagagctcttctttgtcgacacaactccttttgtagatgcttatttcctcagtccacaagaccaaacttacgactggagcggcgtatcaccgcgaaaatcctaccttcagaccatcttaacggagttggagatgggtctaagagaatcaagtgcaaaatggaaaattgtggtgggtcaccatgctataaagagtgcttccattcatgggaataccaaagagcttgaatctctcctcttacccatccttgaggcgaataaagttgatctctatatgaacggtcatgatcattgcttgcaacatataagcacatcacaaagcccaattcagtttctaacgagtggtggtgggtcaaaggcatggagaggctattacaattggacaacaccagaggatatgaaatttttctacgatggacaaggtttcatgtcagttaagatcactagatcagaattgagtgtcgttttttatgatgtctccggcaatagtttgcataagtgggacacatcgaaaatgttagactcggatttttatttcccattgtaattcacatgaaaatcagttaaagcacataaattctacatataaataaatatgattactatgagtgg

SEQ ID NO: 100454 - protein, 345 aa, Arabidopsis thaliana; identical to SEQ ID NO: 21345
  peptide (1)..(345): Ceres Seq. ID no. 13605160

SEQ ID NO: 100455 - protein, 339 aa, Arabidopsis thaliana; identical to SEQ ID NO: 21346
  peptide (1)..(339): Ceres Seq. ID no. 13605161

SEQ ID NO: 100456 - protein, 326 aa, Arabidopsis thaliana; identical to SEQ ID NO: 21347
  peptide (1)..(326): Ceres Seq. ID no. 13605162

SEQ ID NO: 100457 - DNA, 1467 bp, Arabidopsis thaliana
  misc_feature (1)..(1467): Ceres Seq. ID no. 13605167
  misc_feature (1)..(1467): Ortholog of  Ceres SEQ ID NO 14316165 as cited in SEQ ID NO 52560
  misc_feature (1)..(1467): Ortholog of  Ceres SEQ ID NO 13597076 as cited in SEQ ID NO 63571
atacgcaaacaaagtctcttcctttacccgtctacacgttcgaattttttctccgggtcgggtcaatgtcaagaacgacgagaattgtatataatcgtcgattcacgtggccgggtttatcatttactgctggatctcgttttcaattttgagtcagattccccccaattgagagattctagggttttaagatgattgaacatgggaactctacctttgattaccggagtattagagaagtcgctgcaaacgccggcgccggagccaccgcaggggctatcgcggcgacttttgtttgtccattagatgtgatcaaaacaaggttacaggttcttggtctccctgaagctccagcctctggtcaaagaggtggtgtaatcattacaagtctgaagaatataattaaggaagaaggttataggggaatgtatcgagggctttcaccaaccatcatagctctccttccaaattgggctgtctacttctcagtttatgggaagctaaaggatgtgctgcagtcaagtgatggcaagcttagtattgggtcaaacatgatagctgcagctggtgctggagctgccacatctattgcaactaatccgctttgggttgtcaagacaagattaatgacgcaaggaattaggcctggtgtggtaccttacaaaagtgtaatgtctgcatttagtaggatttgtcatgaagaaggagtgcgagggttgtacagtggcatattgccttctttggcgggagtaagccatgtcgcgatccagtttccagcttatgaaaaaattaagcaatacatggcaaagatggataatacatccgtggagaatctgagtcctgggaatgttgctattgcctcctccatcgcgaaagtgatcgcctctattttgacttacccacacgaggtaattagggcgaagcttcaagaacaagggcagattagaaatgctgagactaagtattcaggagtcattgattgcatcacaaaggtgttcagaagcgaagggattcctgggttgtaccgtggatgtgccactaatctactgaggacaactccatcagcagttattacatttacaacctatgagatgatgcttaggtttttccgacaagttgtgccaccagagactaataggtcggatgatcgcagaagagaagaagaaagaaagaatttagttagccgacgaggagaagaagaagataaagatttgggtttgagagaatcacaaactcaatctaataagatcagcactccccatatccctcttggaagcaaataaaactttttcagactcaagccatgcttcataggttttctttttttcgatgccatgttccaactacgtaatttttccccatgcggtgattgagttgtaaccttttctcgtggttctaacaaatgtgtaaactatcaataaactactttttggcccttttgatgatcagtgagtatttgaagatcgt

SEQ ID NO: 100458 - protein, 363 aa, Arabidopsis thaliana; identical to SEQ ID NO: 22211
  peptide (1)..(363): Ceres Seq. ID no. 13605168

SEQ ID NO: 100459 - protein, 285 aa, Arabidopsis thaliana; identical to SEQ ID NO: 22212
  peptide (1)..(285): Ceres Seq. ID no. 13605169

SEQ ID NO: 100460 - protein, 243 aa, Arabidopsis thaliana; identical to SEQ ID NO: 22213
  peptide (1)..(243): Ceres Seq. ID no. 13605170

SEQ ID NO: 100461 - DNA, 1305 bp, Arabidopsis thaliana
  misc_feature (1)..(1305): Ceres Seq. ID no. 13605175
  misc_feature (1)..(1305): Ortholog of  Ceres SEQ ID NO 14304871 as cited in SEQ ID NO 54194
  misc_feature (1)..(1305): Ortholog of  Ceres SEQ ID NO 13597751 as cited in SEQ ID NO 60721
atcttcttcgttttcctttttcctcaatcgacgacgatcaatctccaacctccaccgcattgattcctctgcttccggttcaatgtcgctgctaaaccaactcttcaaccgtgggatctttggcgccaaatgcaagacaagcttgaacttggcgatagctcgaatgaaattgctgcaaaacaagagagatatgcagcttaaacatatgaagaaggagatagctcacttcttgcaagctggacaagaacccattgctcgaattcgggtggagcatgtgatcagagaaatgaatttatgggcagcttatgagatattggagctattctgcgagtttatacttgctcgtgttccaattcttgaaagtgaaaaggaatgcccgagagagttgagagaggctattgctagcattatctttgctgctccaaggtgctctgaagtacctgatcttcttcaaataaagaatctgtttggtacaaaatatggaaaagaatttatcatggttgcttctgagcttcgtccggattctggtgtcaatcgtactatcattgagaagctttctcctaccagtccatctggagcggcaaggctcaagatgttaaaggaaattgcgcaggagtacagtttgaattgggattcttctgccacggaagcagagttcatgaagagccatgaagacctactgggtggagctaagcaaatacatcgtcaagatggtatctctgaatctcgaccgtcccaacaaggctacggtcagtcttcggtttctagggaagttgaaagtctgcctgcagaggccacacagagattccaaaagcttcaagctcaaaacccagtgagcaaaagcatgccatcatctaagctgacttcagcctttcaagctcctcctgatactagacggaatcagactgatgtaatggagatagctcgagctgccctagctagcgctgatcgtgcaacagcagctgctcgtgctgctgcgcaactagtgaatgtctcttatggggctactacacccacagtagcagcagaagggaagcccttaaacttaatgtagttgccacgtcgtcatttgtgaataaaagcaactgtatttgcttcatacacagaaagaaggataacgatgttttctttggtacttcataggtttggaaaaatgagtatgctaaagagtattggtagattatgctcgagtgttgtgaccttaggttgattcaaaagacagtgatgtttaaatgtgacatacagatataactctgaagtttgttggttttacaaaatctatgcagaaaaaacaacattatcatg

SEQ ID NO: 100462 - protein, 350 aa, Arabidopsis thaliana; identical to SEQ ID NO: 27959
  peptide (1)..(350): Ceres Seq. ID no. 13605176

SEQ ID NO: 100463 - protein, 323 aa, Arabidopsis thaliana; identical to SEQ ID NO: 27960
  peptide (1)..(323): Ceres Seq. ID no. 13605177

SEQ ID NO: 100464 - protein, 296 aa, Arabidopsis thaliana; identical to SEQ ID NO: 27961
  peptide (1)..(296): Ceres Seq. ID no. 13605178

SEQ ID NO: 100465 - DNA, 1925 bp, Arabidopsis thaliana
  misc_feature (1)..(1925): Ceres Seq. ID no. 13605191
  misc_feature (1)..(1925): Ortholog of  Ceres SEQ ID NO 15226540 as cited in SEQ ID NO 58479
  misc_feature (1)..(1925): Ortholog of  Ceres SEQ ID NO 13596689 as cited in SEQ ID NO 62728
  misc_feature (1)..(1925): Ortholog of  Ceres SEQ ID NO 14302142 as cited in SEQ ID NO 0
cttcttaaactcgtttttaactctccatctctaaaaagaccatcaacgctcttctctttattgcagcagaaacagaacccagttcaataaagctttttggtaagaaaatttgaaaggaaaagatatttgaaaactcgtagagagaaagtggcacagaatctgaaattctgacactttttaccacgaataatgattctcttttgaaaaacatgactcaatgttttctttatctttttctctgaattaaggtttgtttgtacttaaagtatgctcctttatctaccgttgactgattctactcttttattctcaacttttctctgatttgctcgtgtgtttacttcaattcctcagttcttgtgtagaaagttgagtttcatgtgatcaaaattggggctttactacttttaagagaatgagtgacaaagacgagtttgccgcaaagaagaaggatttggtcaatacgccagtggatttgtatcctccggagaatccaatgttgggtccttctccgatgatggattcattcagagaaactctttggcatgatggtggtttcaatgtccacacagatgcagacacttcctttagaggtaataataatattgatatacctcttgaaatgggttggaatatggctcagttccctgcagattcaggattcattgagcgtgctgcaaagttttctttttttggatgtggtgaaatgatgatgaaccaacaacaatcatctcttggagttccagattcaactggcttgtttcttcaagatacacagattcctagtggatccaaactagataatggtcctcttactgatgcatctaagttagtgaaagagagatcgattaataatgtatcagaggattctcaatctagtggaggtaatggtcatgatgatgctaagtgtgggcaaacatcttccaaggggtttagtagtaagaagaggaaaagaattgggaaggattgtgaagaagaagaagataaaaagcaaaaggatgagcaaagtccaacttcaaatgcgaacaagacaaacagtgagaagcaaccttctgattctttaaaggatgggtatattcacatgagggcacgaagaggccaggctactaatagtcacagtcttgctgaaagagtaagaagagaaaaaatcagtgaaaggatgaagttcttgcaagatcttgtgccaggttgcgacaaggtgactggtaaggcagttatgctcgatgaaatcattaactatgtgcaatcacttcaatgccaaatcgagtttttatcgatgaaactttcggctgtgaatcctgtgctcgattttaacctcgaaagcctccttgcaaaagatgctcttcaatcatctgcaccgacatttccccacaacatgtcgatgctttatcctcctgtatcgtatctctctcaaacaggattcatgcaaccgaacatttcctcaatgtcgctattgagtggaggattaaaacggcaggaaacacatggatatgaaagtgatcaccacaatcttgtccacatgaaccatgaaaccggcactgcacctgatcatgaagatacaacagctgacatgaaggtggagccgtagatgtttcttcttcactttgtactcagctttagctgctgatatagtgcgccgcggtcgagaattttattaacttcgaacagaagagtgaaaacgaaacagaggaggaagcagattttgtctttgaaatattgacagctcccggagaaagagtcgagagtaagaatcaacaatgttgtgtaatgaatagctactgtctgcttcttttgtagctattgtctgcttcttttttgtacatataaatccatgcaagggaagaggaatgttaattcaacacatgtgcacaacatgatcatcacatatgtacttcaacttgatcaatcggaattagctctacttg

SEQ ID NO: 100466 - protein, 390 aa, Arabidopsis thaliana; identical to SEQ ID NO: 40832
  peptide (1)..(390): Ceres Seq. ID no. 13605192

SEQ ID NO: 100467 - protein, 363 aa, Arabidopsis thaliana; identical to SEQ ID NO: 40833
  peptide (1)..(363): Ceres Seq. ID no. 13605193

SEQ ID NO: 100468 - protein, 357 aa, Arabidopsis thaliana; identical to SEQ ID NO: 40834
  peptide (1)..(357): Ceres Seq. ID no. 13605194

SEQ ID NO: 100469 - DNA, 1707 bp, Arabidopsis thaliana
  misc_feature (1)..(1707): Ceres Seq. ID no. 13605199
  misc_feature (1)..(1707): Ortholog of  Ceres SEQ ID NO 15226950 as cited in SEQ ID NO 68649
  misc_feature (1)..(1707): Ortholog of  Ceres SEQ ID NO 13502947 as cited in SEQ ID NO 69257
caaattccatcatcgtcgccgcaacaatatcttttgctttctctctcattcttcaccagtaacaagcccatctctcgattcttcactctcaaggaaggagacgttttgaaaatcagaaatggtgaagatatgctgcataggagctggttatgtgggtggtccaaccatggcggtgatggctcttaagtgtcctgagattgaagtagtcgttgtggatatctctgaaccaaggatcaatgcttggaacagtgataggcttcctatttacgagccgggattggaagatgtggtgaaacaatgcagagggaaaaacctcttctttagcacagacgtggagaaacatgtatttgagagtgatattgtatttgtctcagttaacactccaaccaaaacacaaggtcttggtgctggcaaagctgctgatcttacttactgggagagtgctgctcggatgatcgctgatgtctccaaatctagcaaaatcgttgttgagaaatccacggttcctgtgaggacagcagaggctattgaaaagatactgacacataacagcaaaggcatagagtttcagattctctctaaccctgaatttcttgctgagggtactgcaattaaggatctttataacccagaccgtgtgttgattggtggtagggatactgcagcagggcaaaaggctattaaagctttaagagatgtttatgctcattgggttccagtggaacaaatcatttgcacgaacctgtggtccgctgagctctctaagcttgcagcaaatgcattcttagctcagaggatatcatctgtcaatgccatgtcagctctatgtgaggcaactggcgctgatgttacacaagttgcgcatgccgtgggtacagatactagaattggtccaaagttcttgaatgctagtgttggttttggtggatcatgtttccaaaaggacatcctaaatcttatctatatttgtgaatgcaacggcttgcccgaagcagctaattactggaaacaagtcgtaaaggtgaacgactatcagaaaatacggtttgcaaaccgggttgtttcttcaatgtttaacacagtctcgggcaagaaaatcgcgatcctcggttttgccttcaagaaggacacaggtgacacgagagagactccagcgattgatgtttgtaacagattagttgcagacaaggccaagctgagcatatacgacccacaagttcttgaagaacagatcagaagagatctttccatggctaggtttgactgggaccaccctgttcctcttcagcagattaaagctgaaggtatctcagagcaagtgaatgtcgtctcagatgcttacgaggcaactaaagatgcgcacggcctatgtgtcttaaccgaatgggatgagtttaaatccttggacttcaagaaaatctttgacaatatgcagaaaccagcttttgtgttcgatggtaggaatgttgttgatgcagtgaagctgcgtgagatcggtttcatcgtctactccattggtaaaccgcttgattcatggctcaaggatatgcctgctgtggcatgaaggtgccaacttcaaccaaactatatgtcttttctaaaatatagtatcttaagattccttataaattctgttgtaaccaagctgaaacaatgatatgtatttgctgaatctgccttagctggaatagtatatgaatttctttg

SEQ ID NO: 100470 - protein, 481 aa, Arabidopsis thaliana; identical to SEQ ID NO: 39599
  peptide (1)..(481): Ceres Seq. ID no. 13605200

SEQ ID NO: 100471 - protein, 465 aa, Arabidopsis thaliana; identical to SEQ ID NO: 39600
  peptide (1)..(465): Ceres Seq. ID no. 13605201

SEQ ID NO: 100472 - protein, 462 aa, Arabidopsis thaliana; identical to SEQ ID NO: 39601
  peptide (1)..(462): Ceres Seq. ID no. 13605202

SEQ ID NO: 100473 - DNA, 1022 bp, Arabidopsis thaliana
  misc_feature (1)..(1022): Ceres Seq. ID no. 13605207
  misc_feature (1)..(1022): Ortholog of  Ceres SEQ ID NO 13596163 as cited in SEQ ID NO 60864
  misc_feature (1)..(1022): Ortholog of  Ceres SEQ ID NO 15226347 as cited in SEQ ID NO 61639
aaaacgcaccgctttgtttgattgttcctccttgtccccgagcagagaaatacaaaggaagaagaagaagagttgtttgattatctttaagcaaagaggaaactgttttgcttctagatccgatccaatccaatcaaacaaaggatccgattgatcagaaaaaatccaccaaatttctcaagatcgaaacatataattgaagatgagcgacgtatttgaagggtacgagcgtcaatactgcgagctctcaaccaatctctctagaaaatgtcactctgcatcggttctctccaacggagaggagaagaaggggaagattgctgagatcaagtctggaatagacgaagctgatgtcttgatccggaaaatggatcttgaggcaagaagtttgcagccgagtgctaaagctgtgtgtctttctaaactaagagagtataaatctgatctgaaccaattgaagaaggaattcaaacgagtctcttccgcagatgctaagccgtcttcccgtgaagagttgatggaatccggaatggcggatctgcatgcagtatctgctgatcaaagaggaagattggcaatgtccgtggagaggcttgaccaatcaagtgacagaatcagggagagtagaagactaatgctggagacagaagaggttggcatctcaattgtccaagatttgagtcagcaacgccaaaccctccttcatgcgcacaacaagcttcatggtgtggatgacgccattgacaagagcaagaaggtgttgacggctatgtcaaggagaatgactaggaacaaatggatcattacatcggtaatcgtggctctcgttctcgccatcatcttgatcatctcatacaagctttctcattaatatactcaaaaaacattattcatcgtgattgtgtatatatatatgatggttgatttactttgtaatggcccaagtggttacttgtatttttaagtacgatgtttgtattgaagtggcaacacttttaacattcataaggtttcccaagtct

SEQ ID NO: 100474 - protein, 222 aa, Arabidopsis thaliana
  peptide (1)..(222): Ceres Seq. ID no. 13605208
MSDVFEGYERQYCELSTNLSRKCHSASVLSNGEEKKGKIAEIKSGIDEADVLIRKMDLEARSLQPSAKAVCLSKLREYKSDLNQLKKEFKRVSSADAKPSSREELMESGMADLHAVSADQRGRLAMSVERLDQSSDRIRESRRLMLETEEVGISIVQDLSQQRQTLLHAHNKLHGVDDAIDKSKKVLTAMSRRMTRNKWIITSVIVALVLAIILIISYKLSH

SEQ ID NO: 100475 - protein, 167 aa, Arabidopsis thaliana; identical to SEQ ID NO: 30816
  peptide (1)..(167): Ceres Seq. ID no. 13605209

SEQ ID NO: 100476 - protein, 117 aa, Arabidopsis thaliana; identical to SEQ ID NO: 30817
  peptide (1)..(117): Ceres Seq. ID no. 13605210

SEQ ID NO: 100477 - DNA, 868 bp, Arabidopsis thaliana
  misc_feature (1)..(868): Ceres Seq. ID no. 13605211
  misc_feature (1)..(868): Ortholog of  Ceres SEQ ID NO 12473977 as cited in SEQ ID NO 133
  misc_feature (1)..(868): Ortholog of  Ceres SEQ ID NO 15225932 as cited in SEQ ID NO 60016
  misc_feature (1)..(868): Ortholog of  Ceres SEQ ID NO 12585294 as cited in SEQ ID NO 63023
cttcgtcttccatctctctaccaactccacgatcaacgaaaccaaagatctctcttcaaagcttccaccatgtttctccgatcactcaatctctgtacaatactactcttcctagcgatttcatcacaagtttctcaatctctccacttcgaattgcaatctggtcgaacaaaatgtatatcggaagacataaaaagcaattcaatgaccgtcgggaagtacaccgtcgttaaccctaacgaagctcatccttctcctcaatctcacaagatctccatcagagtgacatcgagttacgggaacacgtatcatcacgcggaagatgtagaatcgggacaattcgcgttcacggcggtggagtctggagattacatggcttgttacacagctgttgatcataaacctgaggttacattgagtattgatttcgattggagaactggtgttcaatctaaaagctggagtagtgttgctaagaagagccaagtcgaagttatggagtttgatgtaaaaagacttattgaaaccgtcaattcgattcatgaagagatgttttatctcagagaaagggaagaagagatgcagaatctgaaccgggctactaactcgaaaatggcgtggttgagtttcctctctcttttcgtatgcttaggagtcgcgggaatgcagtttgtgcatttgaagacgtttttcgagaagaagaaagtcatctaagatggttagatgaaacaaatcccactcttttcttttcccaactcaaaggagtcttctattcctccatgagttttgtacatttagatctttacttttgagtatgtactctcggaactggaaattaaatgaatatgaaagtattgcccctttttgc

SEQ ID NO: 100478 - protein, 237 aa, Arabidopsis thaliana
  peptide (1)..(237): Ceres Seq. ID no. 13605212
LRLPSLYQLHDQRNQRSLFKASTMFLRSLNLCTILLFLAISSQVSQSLHFELQSGRTKCISEDIKSNSMTVGKYTVVNPNEAHPSPQSHKISIRVTSSYGNTYHHAEDVESGQFAFTAVESGDYMACYTAVDHKPEVTLSIDFDWRTGVQSKSWSSVAKKSQVEVMEFDVKRLIETVNSIHEEMFYLREREEEMQNLNRATNSKMAWLSFLSLFVCLGVAGMQFVHLKTFFEKKKVI

SEQ ID NO: 100479 - protein, 214 aa, Arabidopsis thaliana
  peptide (1)..(214): Ceres Seq. ID no. 13605213
MFLRSLNLCTILLFLAISSQVSQSLHFELQSGRTKCISEDIKSNSMTVGKYTVVNPNEAHPSPQSHKISIRVTSSYGNTYHHAEDVESGQFAFTAVESGDYMACYTAVDHKPEVTLSIDFDWRTGVQSKSWSSVAKKSQVEVMEFDVKRLIETVNSIHEEMFYLREREEEMQNLNRATNSKMAWLSFLSLFVCLGVAGMQFVHLKTFFEKKKVI

SEQ ID NO: 100480 - protein, 169 aa, Arabidopsis thaliana
  peptide (1)..(169): Ceres Seq. ID no. 13605214
MTVGKYTVVNPNEAHPSPQSHKISIRVTSSYGNTYHHAEDVESGQFAFTAVESGDYMACYTAVDHKPEVTLSIDFDWRTGVQSKSWSSVAKKSQVEVMEFDVKRLIETVNSIHEEMFYLREREEEMQNLNRATNSKMAWLSFLSLFVCLGVAGMQFVHLKTFFEKKKVI

SEQ ID NO: 100481 - DNA, 899 bp, Arabidopsis thaliana
  misc_feature (1)..(899): Ceres Seq. ID no. 13605225
  misc_feature (1)..(899): Ortholog of  Ceres SEQ ID NO 14315253 as cited in SEQ ID NO 52508
  misc_feature (1)..(899): Ortholog of  Ceres SEQ ID NO 12627566 as cited in SEQ ID NO 62753
ctcgatccctcactctctctcgcgtcagtcgttactgctgcaacaaatctgtatttgatttctccattaacaacgaatctaaatggccgctgcttttgcttccagattaacccgaggaggacgttcattgcttggaggtcttaacaatggtggttcgatgaattcttctaatggaatgatgaatgaaagtatcctctctcagcagcagcagagaaggacatttattcagatggggactgttctcaaagtcgtggacaattcaggtgcgaagaaagtgatgtgtattcaagctctaaaggggaaaaaaggagctagacttggagatactatagttgcttcagtgaaagaagcgatgccaaacggtaaagtgaagaaaggagcggttgtgtatggtgtggttgttcgtgctgcgatgcagagaggtcgtgttgatggaagtgaagttaggtttgatgataacgcggttgttcttgttgatagtaaagataagaatactaaaactgatcgccagccgattggtactagagtgtttggtcctgttcctcatgagcttcgcaagaagaaacatctcaagattcttgctttggctcaacacgttgcgtgagatgcaacaaaaccgtaaacctcgtactgtctttttttatgtaaactctagttacccgcatgttttttttttgtgtgttcttaacggaatttagaggcttcaaactttaaaaagtccccacacttttaaagtctctctctattactctcttccctacatttctatctcctttattatacaagtggtatacagactcagatgaagaaccacaaaagagggaggagtgaggcggcacattaaagtccccaatttcgaagacgatctcttctcgagagcctgtctcggagtattaccc

SEQ ID NO: 100482 - protein, 173 aa, Arabidopsis thaliana; identical to SEQ ID NO: 89637
  peptide (1)..(173): Ceres Seq. ID no. 13605226

SEQ ID NO: 100483 - protein, 148 aa, Arabidopsis thaliana; identical to SEQ ID NO: 89638
  peptide (1)..(148): Ceres Seq. ID no. 13605227

SEQ ID NO: 100484 - protein, 142 aa, Arabidopsis thaliana; identical to SEQ ID NO: 89639
  peptide (1)..(142): Ceres Seq. ID no. 13605228

SEQ ID NO: 100485 - DNA, 578 bp, Arabidopsis thaliana
  misc_feature (1)..(578): Ceres Seq. ID no. 13605237
  misc_feature (1)..(578): Ortholog of  Ceres SEQ ID NO 15178359 as cited in SEQ ID NO 0
aggaactcatcgccatgggaggatcaaacaagaacctcatattcgtgtacggaacgttaaaaagaaaccatcgaaaccatttcctcctagaagatctgatctcaacaaacgacgccgtttacataggacaacgcacgacccggttacaatacccgctcgttacaggtctctatgggatcccttacttaatcaacaaatccgggtcgggtcaaaagatccgaggcgagctttattcggtttcaaaacgtgggcttgtacgtcttgatgaattggaaggtatcaaagttaatcactacgagagattaccaatagaagttattgaggaagatgatgaagaagaagaatcaaacggtgtcgtcttggctgaggcttattttgctcactttggatttggtgagagattgtgggagaagaaaggtaaatgtgggatgtgtgaatttggtgaaaacgatggcgttttgtatgttcgtcctaaagataggccaatgtttagctctgttcttgatgaaattgaaacttttgtgtcttctagtaatgattgattaccaatttaattcaatgggtatgttcaaaattcc

SEQ ID NO: 100486 - protein, 179 aa, Arabidopsis thaliana
  peptide (1)..(179): Ceres Seq. ID no. 13605238
ELIAMGGSNKNLIFVYGTLKRNHRNHFLLEDLISTNDAVYIGQRTTRLQYPLVTGLYGIPYLINKSGSGQKIRGELYSVSKRGLVRLDELEGIKVNHYERLPIEVIEEDDEEEESNGVVLAEAYFAHFGFGERLWEKKGKCGMCEFGENDGVLYVRPKDRPMFSSVLDEIETFVSSSND

SEQ ID NO: 100487 - protein, 175 aa, Arabidopsis thaliana
  peptide (1)..(175): Ceres Seq. ID no. 13605239
MGGSNKNLIFVYGTLKRNHRNHFLLEDLISTNDAVYIGQRTTRLQYPLVTGLYGIPYLINKSGSGQKIRGELYSVSKRGLVRLDELEGIKVNHYERLPIEVIEEDDEEEESNGVVLAEAYFAHFGFGERLWEKKGKCGMCEFGENDGVLYVRPKDRPMFSSVLDEIETFVSSSND

SEQ ID NO: 100488 - DNA, 618 bp, Arabidopsis thaliana
  misc_feature (1)..(618): Ceres Seq. ID no. 13605240
  misc_feature (1)..(618): Ortholog of  Ceres SEQ ID NO 13598157 as cited in SEQ ID NO 61570
acaacacatcaaaagcttgataaagagagagtttttagggttttcttgtacctattataagaaatactctaactgaaactttacttcttcatcaatggcttattctaaggttgcccttctcctcgtcttcaatgtcatcttcttcactttcgtcagctcgacttcggtcccttgtccaccaccaccgcccaagagctaccacaagaagcccgcaacgccatctcttaaacccacttgtaaagacgctcttaaacttaaggtatgtgctaacgtgttggatgtggttaaggtttctctaccaccaacgtccaactgttgcgctcttatcaaaggtctagttgatcttgaagccgcggtctgtctttgcactgccctaaaggctaatgttcttggtatcaaccttaatgttcccatttctttgaacgttgtcctaaaccattgtggtaagaaggttccatctggtttcaaatgtgcctagagattacacattttaaattgaggttctatataccatatttcattcttgtttttcaaattccgcgtttgatgatatctttatctattgttgtaatttgttatatgtttcatatatcaatgaaataaagtgtttcctttttc

SEQ ID NO: 100489 - protein, 127 aa, Arabidopsis thaliana; identical to SEQ ID NO: 43131
  peptide (1)..(127): Ceres Seq. ID no. 13605241

SEQ ID NO: 100490 - protein, 68 aa, Arabidopsis thaliana; identical to SEQ ID NO: 43132
  peptide (1)..(68): Ceres Seq. ID no. 13605242

SEQ ID NO: 100491 - DNA, 1119 bp, Arabidopsis thaliana
  misc_feature (1)..(1119): Ceres Seq. ID no. 13605246
  misc_feature (1)..(1119): Ortholog of  Ceres SEQ ID NO 14311579 as cited in SEQ ID NO 51717
attaaaaaaagaaaaagaaaaaaactataaacataaacgccaatcgcaactttcttgtctttcaatgggagagaaaggtttgaagcggtctggtgttgcggtggtggttgcattactagccatggttcatgtctctgtttcagttccgttcataatgcttcatgggatctcagctcaatgttctaatgctagggatgctaacttcacacagcttctcactaacctctctggctctcctggcttttgcttagaaattggaaatggagttgccgattcatggttaatgccgcttacacgacaagcggaaatagcgtgtgagaaggtgaagcaaatgaaagagttgagtcaaggatacaacattgttggaagatctcaggggaacctagtggctcgaggcttgatcgagttctgtgacggtggccctccggtttacaactatatatccttggccggtcctcatgctggcatctcctctgttcctatgtgtggttctggtttattctgtaagttagcagatgagctaatcaagggagatatctatagcgacttcattcaagatcatcttgctcctagtggttatctcaaaattcctactgatatgacaaagtacttgggaagctctaagtatttacctaagcttaacaatgagataccagaccaaagaaaccaaacttacaaagaccgtttcaccagtttacataacttggttcttatcaagtttcagggcgacaaggttatagttccaaaagattcatcttggttcgggttttatccggatggtgaattcgaacctcttctctctgctcaacagacaaagctctatacagaggattggatcggtctgaaaacattggatgatgcgggaaaagtgaagtttgtgagtgtagccggtgaacatatcagaatggtagatgaagatgtcgtcaaacacgttgtaccttatctccaggaccaaccgtcttcggtgcaaagcttcaaccgcaagacgaagcagcccttgcatgcttaaaaatagcaaataccacaatagttatacttattcatgcaatatatgtcgaaaaagcttagtgatgattttgtagaatccttattcttatagaaatatatacatacttatct

SEQ ID NO: 100492 - protein, 335 aa, Arabidopsis thaliana
  peptide (1)..(335): Ceres Seq. ID no. 13605247
LKKEKEKNYKHKRQSQLSCLSMGEKGLKRSGVAVVVALLAMVHVSVSVPFIMLHGISAQCSNARDANFTQLLTNLSGSPGFCLEIGNGVADSWLMPLTRQAEIACEKVKQMKELSQGYNIVGRSQGNLVARGLIEFCDGGPPVYNYISLAGPHAGISSVPMCGSGLFCKLADELIKGDIYSDFIQDHLAPSGYLKIPTDMTKYLGSSKYLPKLNNEIPDQRNQTYKDRFTSLHNLVLIKFQGDKVIVPKDSSWFGFYPDGEFEPLLSAQQTKLYTEDWIGLKTLDDAGKVKFVSVAGEHIRMVDEDVVKHVVPYLQDQPSSVQSFNRKTKQPLHA

SEQ ID NO: 100493 - protein, 314 aa, Arabidopsis thaliana
  peptide (1)..(314): Ceres Seq. ID no. 13605248
MGEKGLKRSGVAVVVALLAMVHVSVSVPFIMLHGISAQCSNARDANFTQLLTNLSGSPGFCLEIGNGVADSWLMPLTRQAEIACEKVKQMKELSQGYNIVGRSQGNLVARGLIEFCDGGPPVYNYISLAGPHAGISSVPMCGSGLFCKLADELIKGDIYSDFIQDHLAPSGYLKIPTDMTKYLGSSKYLPKLNNEIPDQRNQTYKDRFTSLHNLVLIKFQGDKVIVPKDSSWFGFYPDGEFEPLLSAQQTKLYTEDWIGLKTLDDAGKVKFVSVAGEHIRMVDEDVVKHVVPYLQDQPSSVQSFNRKTKQPLHA

SEQ ID NO: 100494 - protein, 295 aa, Arabidopsis thaliana
  peptide (1)..(295): Ceres Seq. ID no. 13605249
MVHVSVSVPFIMLHGISAQCSNARDANFTQLLTNLSGSPGFCLEIGNGVADSWLMPLTRQAEIACEKVKQMKELSQGYNIVGRSQGNLVARGLIEFCDGGPPVYNYISLAGPHAGISSVPMCGSGLFCKLADELIKGDIYSDFIQDHLAPSGYLKIPTDMTKYLGSSKYLPKLNNEIPDQRNQTYKDRFTSLHNLVLIKFQGDKVIVPKDSSWFGFYPDGEFEPLLSAQQTKLYTEDWIGLKTLDDAGKVKFVSVAGEHIRMVDEDVVKHVVPYLQDQPSSVQSFNRKTKQPLHA

SEQ ID NO: 100495 - DNA, 1337 bp, Arabidopsis thaliana
  misc_feature (1)..(1337): Ceres Seq. ID no. 13605250
  misc_feature (1)..(1337): Ortholog of  Ceres SEQ ID NO 15168366 as cited in SEQ ID NO 60199
atggaacttctcgccggcgactgtcggaaacgagtcggcgacgactttgaggaagatattaacccattcgatggttcggacggtggttgcgggtggatgtacggtacccgtcaaatgggttctaacggaaacgacgacgctttggctacgctcgcagacttggcttcgcctcctcagaaattgaaacctataaggtgtggcgttaagcttccgtcgtcgtcggaggatcgacatcctcttgatattctcgccggaaccctagataggctgccggagatgggttttggctgcttcgaagctcctttgggatcgaagattgctgacgtggaggaaagtggtcaattgactcgtgggttttcaaaggaagaggatgattctcttcctcctcttcaaatggagtttcaagctcgaaatcgcatctcttgggatggtctctctctcagctcctctgttgatagcagcgatagtgactcatctccagacgttcgcaagaccgtcacgggtaaaagaaagcgggaaacaagggtaaagctggagcatttcttggagaagcttgtggggagtatgatgaagcggcaggagaagatgcataatcagttgattaatgtgatggagaagatggaagtggagagaatacgccgtgaggaagcttggaggcaacaggaaaccgagaggatgacacagaatgaagaagcacggaagcaagagatggcacgcaacttgtctctcatctctttcatcagaagtgttactggtgacgagatcgagatccctaaacagtgtgaattcccgcaaccactccagcagattcttccggaacaatgtaaagacgagaaatgtgaatccgctcagagagaaagagagataaagtttaggtactcaagcggcagtggcagcagtggtagaaggtggccgcaagaggaagtgcaggcattgataagttcgagaagcgatgtggaagagaagacggggatcaacaagggagcgatttgggatgagatatcagcaagaatgaaagaaagagggtacgaaagatctgcgaaaaagtgtaaggagaagtgggagaacatgaacaagtactataggagagtgacggaaggtgggcagaaacagcctgagcacagcaagactcgctcatactttgagaaacttggaaatttttacaagaccatttcctcgggagagagggaaaaatgagtgaaagattttaaatttaggtgtttttggcacgcaaaacgggagaacttgtagatgattacctcgagtttaatttttatatctttggtgtagtttataatttaaaactctacggctctgtatttgtagaaggttcgaat

SEQ ID NO: 100496 - protein, 398 aa, Arabidopsis thaliana
  peptide (1)..(398): Ceres Seq. ID no. 13605251
MELLAGDCRKRVGDDFEEDINPFDGSDGGCGWMYGTRQMGSNGNDDALATLADLASPPQKLKPIRCGVKLPSSSEDRHPLDILAGTLDRLPEMGFGCFEAPLGSKIADVEESGQLTRGFSKEEDDSLPPLQMEFQARNRISWDGLSLSSSVDSSDSDSSPDVRKTVTGKRKRETRVKLEHFLEKLVGSMMKRQEKMHNQLINVMEKMEVERIRREEAWRQQETERMTQNEEARKQEMARNLSLISFIRSVTGDEIEIPKQCEFPQPLQQILPEQCKDEKCESAQREREIKFRYSSGSGSSGRRWPQEEVQALISSRSDVEEKTGINKGAIWDEISARMKERGYERSAKKCKEKWENMNKYYRRVTEGGQKQPEHSKTRSYFEKLGNFYKTISSGEREK

SEQ ID NO: 100497 - protein, 366 aa, Arabidopsis thaliana
  peptide (1)..(366): Ceres Seq. ID no. 13605252
MYGTRQMGSNGNDDALATLADLASPPQKLKPIRCGVKLPSSSEDRHPLDILAGTLDRLPEMGFGCFEAPLGSKIADVEESGQLTRGFSKEEDDSLPPLQMEFQARNRISWDGLSLSSSVDSSDSDSSPDVRKTVTGKRKRETRVKLEHFLEKLVGSMMKRQEKMHNQLINVMEKMEVERIRREEAWRQQETERMTQNEEARKQEMARNLSLISFIRSVTGDEIEIPKQCEFPQPLQQILPEQCKDEKCESAQREREIKFRYSSGSGSSGRRWPQEEVQALISSRSDVEEKTGINKGAIWDEISARMKERGYERSAKKCKEKWENMNKYYRRVTEGGQKQPEHSKTRSYFEKLGNFYKTISSGEREK

SEQ ID NO: 100498 - protein, 360 aa, Arabidopsis thaliana
  peptide (1)..(360): Ceres Seq. ID no. 13605253
MGSNGNDDALATLADLASPPQKLKPIRCGVKLPSSSEDRHPLDILAGTLDRLPEMGFGCFEAPLGSKIADVEESGQLTRGFSKEEDDSLPPLQMEFQARNRISWDGLSLSSSVDSSDSDSSPDVRKTVTGKRKRETRVKLEHFLEKLVGSMMKRQEKMHNQLINVMEKMEVERIRREEAWRQQETERMTQNEEARKQEMARNLSLISFIRSVTGDEIEIPKQCEFPQPLQQILPEQCKDEKCESAQREREIKFRYSSGSGSSGRRWPQEEVQALISSRSDVEEKTGINKGAIWDEISARMKERGYERSAKKCKEKWENMNKYYRRVTEGGQKQPEHSKTRSYFEKLGNFYKTISSGEREK

SEQ ID NO: 100499 - DNA, 916 bp, Arabidopsis thaliana
  misc_feature (1)..(916): Ceres Seq. ID no. 13605258
  misc_feature (1)..(916): Ortholog of  Ceres SEQ ID NO 14309426 as cited in SEQ ID NO 0
atgctaattaagcaacatccaaaacataagtaaaacactattatagaagctcttacaaagaaaaaatatgaagaaagctacggcattgatgaaacatatcgttgcattgttgagttccatggcgaaggcaaaatctatagccataaagaacaaaacgagtgctttcaagacacgagtactcatgttgtctctagtgaaacacaagaaactcgggttccgttccatttccaacaagattcaccacctcttgggccatgcggatcaagacgacgataacgaccaggaccaagacaagaacaaggctatagtcctctacaacagcaaggcatccacaatggctcatcatgaggaatatgacgttcacgaggaggaaagcgacaagtatcctgatctgaggcacacgttgttcgaaggagaggaggacttcggggacttggaggaggaaggtcaaggtagttctgtgatagatatggtgaggacctcgaaggaagaagaaggagagaatttcaagctagaagatgagatcgaccatgtcgcggatctctttatttctaggtttcataagcagatgaagcttcagaaactcttgtccttcaagaggtatcaagaaatgctagcccgaggcacctaaacccatatccatatatatatataaacatgttggcaatagatatgaataatagattcatattatgatctttgctaacgtacgttcttattttgtgttgtctatgataaatccttcgagttctcttattttctaggatcgaaatattacggtctcttagatctgttttcatttaatatgttgaagttgaaggaaggatctgctttgcggaatatgttttcttcctccttgagaccgtactgtgtaagatcttttaagtgttacaatatagagcattattttttggct

SEQ ID NO: 100500 - protein, 187 aa, Arabidopsis thaliana
  peptide (1)..(187): Ceres Seq. ID no. 13605259
MKKATALMKHIVALLSSMAKAKSIAIKNKTSAFKTRVLMLSLVKHKKLGFRSISNKIHHLLGHADQDDDNDQDQDKNKAIVLYNSKASTMAHHEEYDVHEEESDKYPDLRHTLFEGEEDFGDLEEEGQGSSVIDMVRTSKEEEGENFKLEDEIDHVADLFISRFHKQMKLQKLLSFKRYQEMLARGT

SEQ ID NO: 100501 - protein, 180 aa, Arabidopsis thaliana
  peptide (1)..(180): Ceres Seq. ID no. 13605260
MKHIVALLSSMAKAKSIAIKNKTSAFKTRVLMLSLVKHKKLGFRSISNKIHHLLGHADQDDDNDQDQDKNKAIVLYNSKASTMAHHEEYDVHEEESDKYPDLRHTLFEGEEDFGDLEEEGQGSSVIDMVRTSKEEEGENFKLEDEIDHVADLFISRFHKQMKLQKLLSFKRYQEMLARGT

SEQ ID NO: 100502 - protein, 170 aa, Arabidopsis thaliana
  peptide (1)..(170): Ceres Seq. ID no. 13605261
MAKAKSIAIKNKTSAFKTRVLMLSLVKHKKLGFRSISNKIHHLLGHADQDDDNDQDQDKNKAIVLYNSKASTMAHHEEYDVHEEESDKYPDLRHTLFEGEEDFGDLEEEGQGSSVIDMVRTSKEEEGENFKLEDEIDHVADLFISRFHKQMKLQKLLSFKRYQEMLARGT

SEQ ID NO: 100503 - DNA, 2547 bp, Arabidopsis thaliana
  misc_feature (1)..(2547): Ceres Seq. ID no. 13605266
  misc_feature (1)..(2547): Ortholog of  Ceres SEQ ID NO 14310620 as cited in SEQ ID NO 53662
atttaaccgattcttgaaaacatgggacgtctccggagacggcaagagataatagatcatgaagaagaggaatcaaacgacgacgtttcatcaagaagaggaaaactcagtttagccgagacgtttcggtggcttgattcatcagagcatcggagaattgaaaccgatggtcataatgattataaatacatcattcatcccaaaaacaggtggtacaaggcatgggaaatgtttatattggtgtgggcaatatactcctcattgttcactcccatggagtttggtttcttccgcggtctgcctgagagactctttgtacttgacattgttggtcagatcgcgttcttggtcgatattgttcttcagttctttgttgcctatcgcgatactcagacctaccggactgtctacaaaccaacacgtattgctttccggtacttgaagtcgcattttctcatggatttcatcggttgcttcccttgggatcttatttataaggcatcagggaaacatgagttggtgaggtacttgttgtggataaggctatttcgggttcgcaaagtggttgagtttttccaaaggcttgagaaagacacaagaatcaactatctattcactagaatcttaaagctcttgttcgttgaagtttattgtactcacactgctgcttgtatcttctattacttggccaccactcttcctccagaaaacgaaggttacacttggatcggtagcttgaagctaggagactatagctacgagaatttccgagaaatcgatctctggaaacgttatactaccgctctatacttcgccattgtcactatggcaactgtcggttatggagacattcacgcggtgaatctgagggaaatgatattcgtgatgatatatgtttcgtttgatatggttctcggtgcttaccttattggtaacatcactgccttgattgtgaaaggttcaaacacagagaggttcagagataaaatgaatgatctcataagtttcatgaaccgcaaaaaactcgggagagaccttcgtagccagataactggtcatgttagattgcagtacgacagtcactacaccgacactgtcatgcttcaggacatcccagcatcaatccgcgccaagattgcgcaattattgtatctgccttacatcaaaaaagttcctctcttcaaaggctgctccacagagtttattaatcaaatagttataaggctccatgaagagtattttcttccaggagaagtaataacagagcaaggaaacgtcgtggatcatttgtatttcgtctgtgaaggcttactggctcttgttacaaaaacagatggatcagaagagagtgtgacgttacttgggcctcacacttcttttggagacatctccatcatttgcaacatttctcaacctttcactgttagggtttgtgagctatgccatcttttacgactcgataaacagtctttctcaaacatcctcgagatttattttcacgacggacgcacaatcttgaacaatattatggaggagaaggaatcaaatgataggataaagaagctagaatctgacatagtgattcacattgggaaacaagaagcagaacttgcattgaaagtaaacagtgcagctttccaaggagatttttaccagcttaagagcttaatccgatctggagccgatcctaacaaaaccgattacgatggaagatcaccgcttcatcttgcagcatgtagaggctatgaagacattacattattccttattcaggaaggtgttgatgtcaatctaaaagataagttcggacacacaccattgtttgaggctgtgaaagcaggacaagaaggagtgattggtttgcttgtcaaagaaggagcctcctttaatttagaagattcaggaaacttcctttgcacgacagttgctaaaggcgactctgattttctcaagagattgctttcaagcggtatgaacccaaacagtgaagattatgatcacagaacgccgcttcatgtcgcggcttctgaagggttattcttgatggctaaaatgttggttgaagctggagcaagcgttatttctaaagaccgatgggggaattctccgcttgatgaagcccgattgtgcggaaacaagaaactgattaagttactcgaagatgtgaaaaatgctcagtcgtctatctacccgtcaagcttgcgtgaattacaagaggagagaattgagagacggaaatgcacggtgtttccattccacccgcaagaggcgaaagaagagcgtagtagaaagcacggagttgtggtttggatcccaagcaatctcgagaaactcatagtaaccgctgcgaaagagctagggctatcggatggagcctcatttgtactattatcagaagaccaaggtcgtatcacagacattgatatgattagtgatggacacaaattgtatatgatcagtgatactactgatcaaacataatgatggactcttcgatttttccgatgattcattttgaggtttttatattctagagcattttgacgc

SEQ ID NO: 100504 - protein, 819 aa, Arabidopsis thaliana
  peptide (1)..(819): Ceres Seq. ID no. 13605267
MGRLRRRQEIIDHEEEESNDDVSSRRGKLSLAETFRWLDSSEHRRIETDGHNDYKYIIHPKNRWYKAWEMFILVWAIYSSLFTPMEFGFFRGLPERLFVLDIVGQIAFLVDIVLQFFVAYRDTQTYRTVYKPTRIAFRYLKSHFLMDFIGCFPWDLIYKASGKHELVRYLLWIRLFRVRKVVEFFQRLEKDTRINYLFTRILKLLFVEVYCTHTAACIFYYLATTLPPENEGYTWIGSLKLGDYSYENFREIDLWKRYTTALYFAIVTMATVGYGDIHAVNLREMIFVMIYVSFDMVLGAYLIGNITALIVKGSNTERFRDKMNDLISFMNRKKLGRDLRSQITGHVRLQYDSHYTDTVMLQDIPASIRAKIAQLLYLPYIKKVPLFKGCSTEFINQIVIRLHEEYFLPGEVITEQGNVVDHLYFVCEGLLALVTKTDGSEESVTLLGPHTSFGDISIICNISQPFTVRVCELCHLLRLDKQSFSNILEIYFHDGRTILNNIMEEKESNDRIKKLESDIVIHIGKQEAELALKVNSAAFQGDFYQLKSLIRSGADPNKTDYDGRSPLHLAACRGYEDITLFLIQEGVDVNLKDKFGHTPLFEAVKAGQEGVIGLLVKEGASFNLEDSGNFLCTTVAKGDSDFLKRLLSSGMNPNSEDYDHRTPLHVAASEGLFLMAKMLVEAGASVISKDRWGNSPLDEARLCGNKKLIKLLEDVKNAQSSIYPSSLRELQEERIERRKCTVFPFHPQEAKEERSRKHGVVVWIPSNLEKLIVTAAKELGLSDGASFVLLSEDQGRITDIDMISDGHKLYMISDTTDQT

SEQ ID NO: 100505 - protein, 750 aa, Arabidopsis thaliana
  peptide (1)..(750): Ceres Seq. ID no. 13605268
MFILVWAIYSSLFTPMEFGFFRGLPERLFVLDIVGQIAFLVDIVLQFFVAYRDTQTYRTVYKPTRIAFRYLKSHFLMDFIGCFPWDLIYKASGKHELVRYLLWIRLFRVRKVVEFFQRLEKDTRINYLFTRILKLLFVEVYCTHTAACIFYYLATTLPPENEGYTWIGSLKLGDYSYENFREIDLWKRYTTALYFAIVTMATVGYGDIHAVNLREMIFVMIYVSFDMVLGAYLIGNITALIVKGSNTERFRDKMNDLISFMNRKKLGRDLRSQITGHVRLQYDSHYTDTVMLQDIPASIRAKIAQLLYLPYIKKVPLFKGCSTEFINQIVIRLHEEYFLPGEVITEQGNVVDHLYFVCEGLLALVTKTDGSEESVTLLGPHTSFGDISIICNISQPFTVRVCELCHLLRLDKQSFSNILEIYFHDGRTILNNIMEEKESNDRIKKLESDIVIHIGKQEAELALKVNSAAFQGDFYQLKSLIRSGADPNKTDYDGRSPLHLAACRGYEDITLFLIQEGVDVNLKDKFGHTPLFEAVKAGQEGVIGLLVKEGASFNLEDSGNFLCTTVAKGDSDFLKRLLSSGMNPNSEDYDHRTPLHVAASEGLFLMAKMLVEAGASVISKDRWGNSPLDEARLCGNKKLIKLLEDVKNAQSSIYPSSLRELQEERIERRKCTVFPFHPQEAKEERSRKHGVVVWIPSNLEKLIVTAAKELGLSDGASFVLLSEDQGRITDIDMISDGHKLYMISDTTDQT

SEQ ID NO: 100506 - protein, 735 aa, Arabidopsis thaliana
  peptide (1)..(735): Ceres Seq. ID no. 13605269
MEFGFFRGLPERLFVLDIVGQIAFLVDIVLQFFVAYRDTQTYRTVYKPTRIAFRYLKSHFLMDFIGCFPWDLIYKASGKHELVRYLLWIRLFRVRKVVEFFQRLEKDTRINYLFTRILKLLFVEVYCTHTAACIFYYLATTLPPENEGYTWIGSLKLGDYSYENFREIDLWKRYTTALYFAIVTMATVGYGDIHAVNLREMIFVMIYVSFDMVLGAYLIGNITALIVKGSNTERFRDKMNDLISFMNRKKLGRDLRSQITGHVRLQYDSHYTDTVMLQDIPASIRAKIAQLLYLPYIKKVPLFKGCSTEFINQIVIRLHEEYFLPGEVITEQGNVVDHLYFVCEGLLALVTKTDGSEESVTLLGPHTSFGDISIICNISQPFTVRVCELCHLLRLDKQSFSNILEIYFHDGRTILNNIMEEKESNDRIKKLESDIVIHIGKQEAELALKVNSAAFQGDFYQLKSLIRSGADPNKTDYDGRSPLHLAACRGYEDITLFLIQEGVDVNLKDKFGHTPLFEAVKAGQEGVIGLLVKEGASFNLEDSGNFLCTTVAKGDSDFLKRLLSSGMNPNSEDYDHRTPLHVAASEGLFLMAKMLVEAGASVISKDRWGNSPLDEARLCGNKKLIKLLEDVKNAQSSIYPSSLRELQEERIERRKCTVFPFHPQEAKEERSRKHGVVVWIPSNLEKLIVTAAKELGLSDGASFVLLSEDQGRITDIDMISDGHKLYMISDTTDQT

SEQ ID NO: 100507 - DNA, 2124 bp, Arabidopsis thaliana
  misc_feature (1)..(2124): Ceres Seq. ID no. 13605272
  misc_feature (1)..(2124): Ortholog of  Ceres SEQ ID NO 14305409 as cited in SEQ ID NO 55679
attgactctttttctctatctctctagatcgaaagggaaaaggagatagagattgaagatgcgtgacgcaatcatcgccgatcctcttctggccatcgaccatgaaacagtcgcagagaagaagaaacagagcaaaaatctaaagatttctcttttactgcttctgattctcttagcaacttcaggttattatagctttagtgacaacattacaacagttttcttatcaagacaagctattgatgatgatcatagtcttagccttggaaccatcagtgacgtggttgaatctgagaatggtgttgtggctgctgacgacgctcgatgttccgagatcggtgcctctgttcttagaagtggcggtcatgcggtggacgccgccgtggctattactttatgtgttggtgttgttaatccaatgtctagtggaatcggtggtggttctttcttgattgttagctcgcagaaagattccaaagctgaggcttttgacatgagagaaactgctccattagctgcttctaaggatatgtataagaacgatgctagtgcgaaatcgttgggcgcattgtctatgggagttccgggagagatagctggactttacgaggcttggaaacggtatggccgtcttccgtggaaaccgcttttcgagccggctattaagctggctcgggacggtttcgtggtgtatccgtatctcggaaaggccatatcgaccaaagttgcgatgatacttaaagatccgggtatgcggagtgtcttctcaagaaacggacaggttttgaaaaccggtgagacttgctataacccggagctagctcagagtcttgagactatttctgagcaaggcccgggagcgttctacaacgggacagtaggcgagaagcttgttaaagatgtgaagaaggcgggagggatcataacgatggatgatctaagaagttataaggtccgagttaccgatgcaatgtctgtggatgttatgggttatacggttcatggaatgccgcctccttcgggcggtacagtcggtttttcgatggttatgaatatcttggatagttactcgaatctttacactgcttcgggaagagagctcgggctgcaccgtttgatagaagcaatgaaacatatgtttgcagctcgtatggatcttggagaccctgagttcgttaatgtaacaaactctatgaaccaaatgctctcgaaggctcacgcggaagaaatccaaaagaggattttcgacaacacgacattcccacctgagtactatatgaaccggtggagccaactcagggaccaaggaacgagtcatttctgcgttgtggatgcggatcgcaacagtgtgtcgatgacctcaaccgtgaattaccgttttggtgccggggtgttatcaccttcaactggaattgtacttaacaacgagatggatgatttctcaacacccacggaaatcactcccgacatgcttcctccagcgcctacaaatttcattgaaccaaacaaaagaccattatcttccatgacacctctcgtgatcaccaaggatggtgagttcgtggcagcgcttggaggagctggtggaatgcatataattccagcggtgcttcaagtgtttcttaattgctttgtgttgaatatgaaacctaaagaagcagtagagagtgccagaatataccatagattgataccaaatgttgtttcctatgagaacttcaccacgatcaatggcgatcacataggggtttcagaagataccaagatgtttctagcagagagaggacatgagctaaaggagctatcaggtggagctatagttcaacttattgttcagagtttcaaggaagagaaagaagaagaaatgattattgaaattggaaggaaaatcggaaagaaatcgaaaccattaaagggcttacttactgcagttagtgatcctcgaaaagatggaaagccagctgcagtttgatttcgttattaagctaattacaaatttcctcattcaagtcccattctctatcatgtaaatttgaataaagttacatgagcctcaaagactcagcgtgggatatatacagaagcaaagttgtagttggaaccaagagttgttacattattccc

SEQ ID NO: 100508 - protein, 637 aa, Arabidopsis thaliana
  peptide (1)..(637): Ceres Seq. ID no. 13605273
MRDAIIADPLLAIDHETVAEKKKQSKNLKISLLLLLILLATSGYYSFSDNITTVFLSRQAIDDDHSLSLGTISDVVESENGVVAADDARCSEIGASVLRSGGHAVDAAVAITLCVGVVNPMSSGIGGGSFLIVSSQKDSKAEAFDMRETAPLAASKDMYKNDASAKSLGALSMGVPGEIAGLYEAWKRYGRLPWKPLFEPAIKLARDGFVVYPYLGKAISTKVAMILKDPGMRSVFSRNGQVLKTGETCYNPELAQSLETISEQGPGAFYNGTVGEKLVKDVKKAGGIITMDDLRSYKVRVTDAMSVDVMGYTVHGMPPPSGGTVGFSMVMNILDSYSNLYTASGRELGLHRLIEAMKHMFAARMDLGDPEFVNVTNSMNQMLSKAHAEEIQKRIFDNTTFPPEYYMNRWSQLRDQGTSHFCVVDADRNSVSMTSTVNYRFGAGVLSPSTGIVLNNEMDDFSTPTEITPDMLPPAPTNFIEPNKRPLSSMTPLVITKDGEFVAALGGAGGMHIIPAVLQVFLNCFVLNMKPKEAVESARIYHRLIPNVVSYENFTTINGDHIGVSEDTKMFLAERGHELKELSGGAIVQLIVQSFKEEKEEEMIIEIGRKIGKKSKPLKGLLTAVSDPRKDGKPAAV

SEQ ID NO: 100509 - protein, 517 aa, Arabidopsis thaliana
  peptide (1)..(517): Ceres Seq. ID no. 13605274
MSSGIGGGSFLIVSSQKDSKAEAFDMRETAPLAASKDMYKNDASAKSLGALSMGVPGEIAGLYEAWKRYGRLPWKPLFEPAIKLARDGFVVYPYLGKAISTKVAMILKDPGMRSVFSRNGQVLKTGETCYNPELAQSLETISEQGPGAFYNGTVGEKLVKDVKKAGGIITMDDLRSYKVRVTDAMSVDVMGYTVHGMPPPSGGTVGFSMVMNILDSYSNLYTASGRELGLHRLIEAMKHMFAARMDLGDPEFVNVTNSMNQMLSKAHAEEIQKRIFDNTTFPPEYYMNRWSQLRDQGTSHFCVVDADRNSVSMTSTVNYRFGAGVLSPSTGIVLNNEMDDFSTPTEITPDMLPPAPTNFIEPNKRPLSSMTPLVITKDGEFVAALGGAGGMHIIPAVLQVFLNCFVLNMKPKEAVESARIYHRLIPNVVSYENFTTINGDHIGVSEDTKMFLAERGHELKELSGGAIVQLIVQSFKEEKEEEMIIEIGRKIGKKSKPLKGLLTAVSDPRKDGKPAAV

SEQ ID NO: 100510 - protein, 492 aa, Arabidopsis thaliana
  peptide (1)..(492): Ceres Seq. ID no. 13605275
MRETAPLAASKDMYKNDASAKSLGALSMGVPGEIAGLYEAWKRYGRLPWKPLFEPAIKLARDGFVVYPYLGKAISTKVAMILKDPGMRSVFSRNGQVLKTGETCYNPELAQSLETISEQGPGAFYNGTVGEKLVKDVKKAGGIITMDDLRSYKVRVTDAMSVDVMGYTVHGMPPPSGGTVGFSMVMNILDSYSNLYTASGRELGLHRLIEAMKHMFAARMDLGDPEFVNVTNSMNQMLSKAHAEEIQKRIFDNTTFPPEYYMNRWSQLRDQGTSHFCVVDADRNSVSMTSTVNYRFGAGVLSPSTGIVLNNEMDDFSTPTEITPDMLPPAPTNFIEPNKRPLSSMTPLVITKDGEFVAALGGAGGMHIIPAVLQVFLNCFVLNMKPKEAVESARIYHRLIPNVVSYENFTTINGDHIGVSEDTKMFLAERGHELKELSGGAIVQLIVQSFKEEKEEEMIIEIGRKIGKKSKPLKGLLTAVSDPRKDGKPAAV

SEQ ID NO: 100511 - DNA, 1612 bp, Arabidopsis thaliana
  misc_feature (1)..(1612): Ceres Seq. ID no. 13605292
  misc_feature (1)..(1612): Ortholog of  Ceres SEQ ID NO 15176057 as cited in SEQ ID NO 56363
  misc_feature (1)..(1612): Ortholog of  Ceres SEQ ID NO 14316269 as cited in SEQ ID NO 60082
atgaatcggcgctacgaaaagccaccgccattgtcagtttcctccaaagggaagaagaagcattttgtcaatcacacagctcccaacactcctggaaattacgagaggactcaaaccagtccaacgttatcaacggctcgatcacacgaacccgatgataagctcaattacgagatcttctcaattctcgaaagcaaatttctctttggttacgaagacccaaggctactatggattcctcagagtccattacgacccggtgattccgaagcaggtccttctcccagatcaccgttgactccaaacggcgtcgttctcccgggaacaccgtcttcatctttcagaagtccgagaggaagaatctgcgttttgagcattgacggtggcggtatgagaggtcttttggcgggaaaatccctaatctatttagagcaaatgctgaaagagaaatccggcgatccaaacgctcgaatcgccgattacttcgacgtcgctgccggatcaggtgtcggtggagtattcgctgcgatgatatttgcgacaagagacggcaaccgcccgattttcaaggcggaggacacttggaaatttctcgtagagaacgcagaaggattctacagatcagggagcggaagtggaggaggaggagcaggagcggcgattaaacgggtcataagatctggatccggatccggatcatcttcagtaaccgccgcaacggcgaagctagaaaaagcaatgaaagcatcattcgccgatctaacgcttaaagacacactcaaaccaattctcatctcttgctacgatctctcaagcacggctccgtttctattctcacgcgccgacgcgttagaaagcgacagtttcgattttcgtctccgagatatttgccgtgccacatgggcggagccggggacgtttgatccggttcgcacgtgttccgtcgacgggaaaacgcggtgcgttgcggtggggggtggattagcgatgagtaatccgacggcggcggcgataacgcacgtgtttcataacaaacaggagttcccggcggtgaaaggagtggaggatttgttggtgttgtcgcttgggactggtcagctttttgaagtgaattatgattatgaacaggttaagaattggcgcgttaaggaatgggctcggcccatggcgagaatctctggtgatgggtctgctgagtttgttgatcaagctgttgctatgggctttgggccttaccgaagtagtaattacgttcgcattcagcaggcaaatggatcgcgattaggagcttgtggaccgaacgtggacacggatccaagagcagagaatgtgaagaaactgacggagatagctgatgagatgttgaagcaaaacaatgtggagtcggttttgttcggaagcaaaaggataggagaaatgagcaattcagagaaaatagagtggtttgcgagcgagcttgtcattgagcagcagcgacgaagtgttagagcgtctccaaccgtaacgctaaagcaagctgtgtccaaaactaaccgcaatgctataaacgcaactctcactctcatatctaaagatagatgaaaacacctgtttttggtgcttcctattggtt

SEQ ID NO: 100512 - protein, 526 aa, Arabidopsis thaliana
  peptide (1)..(526): Ceres Seq. ID no. 13605293
MNRRYEKPPPLSVSSKGKKKHFVNHTAPNTPGNYERTQTSPTLSTARSHEPDDKLNYEIFSILESKFLFGYEDPRLLWIPQSPLRPGDSEAGPSPRSPLTPNGVVLPGTPSSSFRSPRGRICVLSIDGGGMRGLLAGKSLIYLEQMLKEKSGDPNARIADYFDVAAGSGVGGVFAAMIFATRDGNRPIFKAEDTWKFLVENAEGFYRSGSGSGGGGAGAAIKRVIRSGSGSGSSSVTAATAKLEKAMKASFADLTLKDTLKPILISCYDLSSTAPFLFSRADALESDSFDFRLRDICRATWAEPGTFDPVRTCSVDGKTRCVAVGGGLAMSNPTAAAITHVFHNKQEFPAVKGVEDLLVLSLGTGQLFEVNYDYEQVKNWRVKEWARPMARISGDGSAEFVDQAVAMGFGPYRSSNYVRIQQANGSRLGACGPNVDTDPRAENVKKLTEIADEMLKQNNVESVLFGSKRIGEMSNSEKIEWFASELVIEQQRRSVRASPTVTLKQAVSKTNRNAINATLTLISKDR

SEQ ID NO: 100513 - protein, 396 aa, Arabidopsis thaliana
  peptide (1)..(396): Ceres Seq. ID no. 13605294
MRGLLAGKSLIYLEQMLKEKSGDPNARIADYFDVAAGSGVGGVFAAMIFATRDGNRPIFKAEDTWKFLVENAEGFYRSGSGSGGGGAGAAIKRVIRSGSGSGSSSVTAATAKLEKAMKASFADLTLKDTLKPILISCYDLSSTAPFLFSRADALESDSFDFRLRDICRATWAEPGTFDPVRTCSVDGKTRCVAVGGGLAMSNPTAAAITHVFHNKQEFPAVKGVEDLLVLSLGTGQLFEVNYDYEQVKNWRVKEWARPMARISGDGSAEFVDQAVAMGFGPYRSSNYVRIQQANGSRLGACGPNVDTDPRAENVKKLTEIADEMLKQNNVESVLFGSKRIGEMSNSEKIEWFASELVIEQQRRSVRASPTVTLKQAVSKTNRNAINATLTLISKDR

SEQ ID NO: 100514 - protein, 381 aa, Arabidopsis thaliana
  peptide (1)..(381): Ceres Seq. ID no. 13605295
MLKEKSGDPNARIADYFDVAAGSGVGGVFAAMIFATRDGNRPIFKAEDTWKFLVENAEGFYRSGSGSGGGGAGAAIKRVIRSGSGSGSSSVTAATAKLEKAMKASFADLTLKDTLKPILISCYDLSSTAPFLFSRADALESDSFDFRLRDICRATWAEPGTFDPVRTCSVDGKTRCVAVGGGLAMSNPTAAAITHVFHNKQEFPAVKGVEDLLVLSLGTGQLFEVNYDYEQVKNWRVKEWARPMARISGDGSAEFVDQAVAMGFGPYRSSNYVRIQQANGSRLGACGPNVDTDPRAENVKKLTEIADEMLKQNNVESVLFGSKRIGEMSNSEKIEWFASELVIEQQRRSVRASPTVTLKQAVSKTNRNAINATLTLISKDR

SEQ ID NO: 100515 - DNA, 1447 bp, Arabidopsis thaliana
  misc_feature (1)..(1447): Ceres Seq. ID no. 13605312
  misc_feature (1)..(1447): Ortholog of  Ceres SEQ ID NO 12636774 as cited in SEQ ID NO 372
  misc_feature (1)..(1447): Ortholog of  Ceres SEQ ID NO 12578315 as cited in SEQ ID NO 62451
  misc_feature (1)..(1447): Ortholog of  Ceres SEQ ID NO 12617090 as cited in SEQ ID NO 64005
  misc_feature (1)..(1447): Ortholog of  Ceres SEQ ID NO 13597439 as cited in SEQ ID NO 64081
  misc_feature (1)..(1447): Ortholog of  Ceres SEQ ID NO 13597233 as cited in SEQ ID NO 64370
  misc_feature (1)..(1447): Ortholog of  Ceres SEQ ID NO 13584577 as cited in SEQ ID NO 65298
ccacgcgtccgaagcaagatggagtcaagtgatcgttcaagtcaagcaaaagctttcgacgagacaaaaaccggcgtgaaagggcttgtggcttcgggaatcaaagagattccagccatgttccatacacctccggatactctaacaagcctgaaacaaacagcaccaccttcgcagcagctgacgatccccacggtggatctgaaaggaggaagcatggatttgatatcgcggcggagcgtggtggagaagattggagacgctgcggagagatggggattcttccaggtggtgaatcatgggatctcggtggaggtgatggagaggatgaaagaagggattcgcaggtttcacgagcaggacccggaagtgaagaaacggttctactctagggatcacactagagatgtgctttactacagcaacatcgatctccacacttgtaataaggctgcaaattggagagatacgctcgcctgttacatggcccccgatcctcccaagttacaggacttgcccgcggtttgcggggagattatgatggagtactcaaagcaactaatgactttaggtgaatttctctttgagcttctatctgaggctttgggattaaaccctaatcacctcaaggacatgggctgtgccaagtctcatatcatgtttggccaatactatccaccttgccctcagcctgaccttactttaggcataagcaagcacaccgatttctcgtttatcaccattcttcttcaggacaatatcggagggcttcaagttatccatgaccaatgctgggttgatgtttctcctgtccctggcgcccttgtcattaacatcggagatcttctccagcttataagcaatgacaaattcattagcgcggagcatagggtgatagcaaatggatcttctgaaccgcggatttcaatgccatgtttcgtcagcacgttcatgaagccgaatccacgaatatatggacccatcaaagaacttttgtcagaacaaaaccctgccaagtatagagacttaaccatcaccgagttttcaaacaccttcaggtcccaaacgatcagtcaccctgcgttacaccatttcaggatctgaagcaattatattggtggctctgctcggtcttcatctcaaagtaactttcgtgaaaccagcttcttttttctttctcaaaaggcataaggatatttgtaacattcaaataaggtacacaatgaaaactactactacttacttacttcatcttccagccgtgatgtaataaaatttgcgaggaactttcttgttttaagtcctcgtgttaccattttcatctacgaactttggggattagattccccctcttttgaaccttgttttatgttgtatcacgaaaaaagcttattggcctcatttatcatcatcatccaccgatgatatatcgtttaattatatgttc

SEQ ID NO: 100516 - protein, 367 aa, Arabidopsis thaliana
  peptide (1)..(367): Ceres Seq. ID no. 13605313
PRVRSKMESSDRSSQAKAFDETKTGVKGLVASGIKEIPAMFHTPPDTLTSLKQTAPPSQQLTIPTVDLKGGSMDLISRRSVVEKIGDAAERWGFFQVVNHGISVEVMERMKEGIRRFHEQDPEVKKRFYSRDHTRDVLYYSNIDLHTCNKAANWRDTLACYMAPDPPKLQDLPAVCGEIMMEYSKQLMTLGEFLFELLSEALGLNPNHLKDMGCAKSHIMFGQYYPPCPQPDLTLGISKHTDFSFITILLQDNIGGLQVIHDQCWVDVSPVPGALVINIGDLLQLISNDKFISAEHRVIANGSSEPRISMPCFVSTFMKPNPRIYGPIKELLSEQNPAKYRDLTITEFSNTFRSQTISHPALHHFRI

SEQ ID NO: 100517 - protein, 361 aa, Arabidopsis thaliana
  peptide (1)..(361): Ceres Seq. ID no. 13605314
MESSDRSSQAKAFDETKTGVKGLVASGIKEIPAMFHTPPDTLTSLKQTAPPSQQLTIPTVDLKGGSMDLISRRSVVEKIGDAAERWGFFQVVNHGISVEVMERMKEGIRRFHEQDPEVKKRFYSRDHTRDVLYYSNIDLHTCNKAANWRDTLACYMAPDPPKLQDLPAVCGEIMMEYSKQLMTLGEFLFELLSEALGLNPNHLKDMGCAKSHIMFGQYYPPCPQPDLTLGISKHTDFSFITILLQDNIGGLQVIHDQCWVDVSPVPGALVINIGDLLQLISNDKFISAEHRVIANGSSEPRISMPCFVSTFMKPNPRIYGPIKELLSEQNPAKYRDLTITEFSNTFRSQTISHPALHHFRI

SEQ ID NO: 100518 - protein, 328 aa, Arabidopsis thaliana
  peptide (1)..(328): Ceres Seq. ID no. 13605315
MFHTPPDTLTSLKQTAPPSQQLTIPTVDLKGGSMDLISRRSVVEKIGDAAERWGFFQVVNHGISVEVMERMKEGIRRFHEQDPEVKKRFYSRDHTRDVLYYSNIDLHTCNKAANWRDTLACYMAPDPPKLQDLPAVCGEIMMEYSKQLMTLGEFLFELLSEALGLNPNHLKDMGCAKSHIMFGQYYPPCPQPDLTLGISKHTDFSFITILLQDNIGGLQVIHDQCWVDVSPVPGALVINIGDLLQLISNDKFISAEHRVIANGSSEPRISMPCFVSTFMKPNPRIYGPIKELLSEQNPAKYRDLTITEFSNTFRSQTISHPALHHFRI

SEQ ID NO: 100519 - DNA, 793 bp, Arabidopsis thaliana
  misc_feature (1)..(793): Ceres Seq. ID no. 13605316
  misc_feature (1)..(793): Ortholog of  Ceres SEQ ID NO 12609643 as cited in SEQ ID NO 51879
atcaaaatcaaatcacaatttccttggctcactcgctctcaccggctgcgaaaccaacgagagattccacaaaatcgaatcttttgtacaatggacaaaggagttgtggtagagctgattagagggtcgaccagttgggccaaagttgtggaagatatcgtgaagctggagaagaaaacgttccctaaacacgaatctctcgctcaaactttcgatgcagagctgcgtaagaaaaacgccggtttgctatacgtggatgctgaaggagacacagtaggctatgccatgtattcttggccatcttcgctttccgcttcaatcaccaagctcgcagtgaaggagaattgcagaagacaaggtcatggagaagcattgttgagagcggctatcgacaagtgcagaagcagaaaggtgcaacgggtttcacttcatgtcgaccccacgagaacttctgcggtgaatctgtacaaaaagcttgggttccaagtagactgtctagtgaaaagctactactcggctgatagagatgcttacagaatgtacctagattttgatgactctatttagcccaaaaggattgaatcattggatttggggttatatatgtattcccatatcttggcttgggcttgatatgccttgtacacattcattgattacttctctacatcaacatattacatatgtctagcgagtttttgatattttacgatgcaagatgaaatcatcttgggaccatcaacttatcaacttcttcacaatatagaatgagatttttaatcgttttcatgtt

SEQ ID NO: 100520 - protein, 188 aa, Arabidopsis thaliana
  peptide (1)..(188): Ceres Seq. ID no. 13605317
IKIKSQFPWLTRSHRLRNQREIPQNRIFCTMDKGVVVELIRGSTSWAKVVEDIVKLEKKTFPKHESLAQTFDAELRKKNAGLLYVDAEGDTVGYAMYSWPSSLSASITKLAVKENCRRQGHGEALLRAAIDKCRSRKVQRVSLHVDPTRTSAVNLYKKLGFQVDCLVKSYYSADRDAYRMYLDFDDSI

SEQ ID NO: 100521 - protein, 158 aa, Arabidopsis thaliana
  peptide (1)..(158): Ceres Seq. ID no. 13605318
MDKGVVVELIRGSTSWAKVVEDIVKLEKKTFPKHESLAQTFDAELRKKNAGLLYVDAEGDTVGYAMYSWPSSLSASITKLAVKENCRRQGHGEALLRAAIDKCRSRKVQRVSLHVDPTRTSAVNLYKKLGFQVDCLVKSYYSADRDAYRMYLDFDDSI

SEQ ID NO: 100522 - DNA, 1975 bp, Arabidopsis thaliana
  misc_feature (1)..(1975): Ceres Seq. ID no. 13605336
  misc_feature (1)..(1975): Ortholog of  Ceres SEQ ID NO 12578315 as cited in SEQ ID NO 62451
  misc_feature (1)..(1975): Ortholog of  Ceres SEQ ID NO 12615466 as cited in SEQ ID NO 62761
  misc_feature (1)..(1975): Ortholog of  Ceres SEQ ID NO 12617090 as cited in SEQ ID NO 64005
  misc_feature (1)..(1975): Ortholog of  Ceres SEQ ID NO 13597233 as cited in SEQ ID NO 64370
  misc_feature (1)..(1975): Ortholog of  Ceres SEQ ID NO 13584577 as cited in SEQ ID NO 65298
aaaagagataaacaaaacacaaaaatggtggtgaaaaactcgatcaaattcaactctcagagtgagcgcaagtctttggaagagaccaaggttcctcctatctttggccttcctccagatgccttagacgacaagaaacctacctcggattttgcagtacctatcatcgactttgcaggcgtccacaagtcgcgtgaagccgttgtggagaagatcaaagccgctgcagagaattggggaattttccaggtgatcaaccatggtgttcctttaagtgttcttgaagagattcaaaatggagttgttaggtttcatgaggaagatccggaggttaagaaatcttacttctcgcttgacctcaccaaaacatttatctaccacaataatttcgaactttacagttcgtctgctggtaactggagagactctttcgtttgttacatggatcccgatccttcaaaccctgaagatctcccagtggcttgcagagatgctatgatcggatactcgaagcatgtgatgagtttaggtggcttgctctttgaacttctctcagaagctcttggtttgaactctgatactcttaagagtatgggttgcatgaagggtttgcatatgatctgccattattaccctccctgtccacaacctgaccaaaccttaggcacaagtaagcattccgacaacacttttatcactattcttcttcaggacaacatcggtggtcttcaaattcttcatcaagactgttgggttgatgtctcgcctcttcccggggcacttatcatcaacatcggagatttcttgcagctaatgacgaacgacaagttcataagcgttgatcatagggtgcttacaaacagagttggaccgaggatttcaatcgcatgctttttcagctcgagtatgaatccaaattccacagtttacggaccaatcaaagagcttctctctgaagaaaaccctccaaaatacagagacttcactataccagagtactcaaagggatacattgagaaaggtctcgatggaacatcgcatctgtcacattacaggatttgagatctttaaaaaaacaaaatatatcctgtttgaagcaagatattcagatatgtctatgttccgtcctttccttatccatgtaaaagctagtactctgttcttgaggctgcaactgcaataacaaaagcattgtaccaaagatgagaaacaaatggtgtgtgtgtgtgtatttgttgaaaaaaaaaaaaaaacaaaactgtgagagaaaaagaaagagagaaagagatgggagagattgggtttacagagaagcaagaagctttggtgaaggaatcgtgggagatactgaaacaagacatccccaaatacagccttcacttcttctcacagatactggagatagcaccagcagcaaaaggcttgttctctttcctaagagactcagatgaagtccctcacaacaatcctaaactcaaagctcatgctgttaaagtcttcaagatgacatgtgaaacagctatacagctgagggaggaaggaaaggtggtagtggctgacacaaccctccaatatttaggctcaattcatctcaaaagcggcgttattgaccctcacttcgaggtggtgaaagaagctttgctaaggacattgaaagaggggttgggggagaaatacaatgaagaagtggaaggtgcttggtctcaagcttatgatcacttggctttagccatcaagaccgagatgaaacaagaagagtcataaaaccctattgatcatttgggtatcgcatacatgaatctattccacatacatgatacacacatacgtgtttctgtgtgtgtactatgttgctctctgactttctacagttcactattttaattataaagaaggatcttgtgctatcattagggagatacgtgatactgtagttcttcttgaaattgttattcgtgagaaatatcatggtttg

SEQ ID NO: 100523 - protein, 353 aa, Arabidopsis thaliana
  peptide (1)..(353): Ceres Seq. ID no. 13605337
KRDKQNTKMVVKNSIKFNSQSERKSLEETKVPPIFGLPPDALDDKKPTSDFAVPIIDFAGVHKSREAVVEKIKAAAENWGIFQVINHGVPLSVLEEIQNGVVRFHEEDPEVKKSYFSLDLTKTFIYHNNFELYSSSAGNWRDSFVCYMDPDPSNPEDLPVACRDAMIGYSKHVMSLGGLLFELLSEALGLNSDTLKSMGCMKGLHMICHYYPPCPQPDQTLGTSKHSDNTFITILLQDNIGGLQILHQDCWVDVSPLPGALIINIGDFLQLMTNDKFISVDHRVLTNRVGPRISIACFFSSSMNPNSTVYGPIKELLSEENPPKYRDFTIPEYSKGYIEKGLDGTSHLSHYRI

SEQ ID NO: 100524 - protein, 345 aa, Arabidopsis thaliana
  peptide (1)..(345): Ceres Seq. ID no. 13605338
MVVKNSIKFNSQSERKSLEETKVPPIFGLPPDALDDKKPTSDFAVPIIDFAGVHKSREAVVEKIKAAAENWGIFQVINHGVPLSVLEEIQNGVVRFHEEDPEVKKSYFSLDLTKTFIYHNNFELYSSSAGNWRDSFVCYMDPDPSNPEDLPVACRDAMIGYSKHVMSLGGLLFELLSEALGLNSDTLKSMGCMKGLHMICHYYPPCPQPDQTLGTSKHSDNTFITILLQDNIGGLQILHQDCWVDVSPLPGALIINIGDFLQLMTNDKFISVDHRVLTNRVGPRISIACFFSSSMNPNSTVYGPIKELLSEENPPKYRDFTIPEYSKGYIEKGLDGTSHLSHYRI

SEQ ID NO: 100525 - protein, 206 aa, Arabidopsis thaliana
  peptide (1)..(206): Ceres Seq. ID no. 13605339
MDPDPSNPEDLPVACRDAMIGYSKHVMSLGGLLFELLSEALGLNSDTLKSMGCMKGLHMICHYYPPCPQPDQTLGTSKHSDNTFITILLQDNIGGLQILHQDCWVDVSPLPGALIINIGDFLQLMTNDKFISVDHRVLTNRVGPRISIACFFSSSMNPNSTVYGPIKELLSEENPPKYRDFTIPEYSKGYIEKGLDGTSHLSHYRI

SEQ ID NO: 100526 - DNA, 2079 bp, Arabidopsis thaliana
  misc_feature (1)..(2079): Ceres Seq. ID no. 13605340
  misc_feature (1)..(2079): Ortholog of  Ceres SEQ ID NO 13595900 as cited in SEQ ID NO 69289
gtattcaaatccgtaatcagatttccccatcaatcgataattttctctcgccgcgttttctatttttctcgctcttcccttttaattttcatcccattttcttgaaggagatttctaattattctgtgatctaaagtctgaagctttgtttggttgcatctcgatgatgatgatgatgatggttgattgtaaatgggtagtttcggtttggttgtagcagaagctaagtttgtcaagttaataagagtattttagttttttttttgttaaatcgatttgtgggttcatcatcctacgatcgaaagtttccatctttgataatttgagattctggggatttttactagaatttctagttttttttttggtttgttgatttcgtagctagaagaaatcgatctaggtgtgtatatatatatctattcaatcgaattttagtgaatcgattggcgatcttggtgagagtaatttcagagagatcaaggttactagagcaccaataaaaacacttatttggattgggagatagaaaaatggatcgtgtggttggtggtaagttcaagctcggacgaaagcttggaagtggctcatttggtgaaattttcctaggagtgaatgtacaaactggagaagaagtggctgttaagcttgaacctctccgagctaggcatcctcagcttcattacgagtcaaagctttatatgcttctccaaggaggaactggtattcctcacctcaaatggtttggtgttgagggtgaattcaactgtatggtgatcgaccttctcggtcctagtatggaagaatttttcaactattgcagtcgatccttctctcttaagacagttctaatgctcgcagatcaaatgataaatagagtggagtatatgcatgttaaaggcttccttcatcgtgatattaagccagataactttttgatgggtcttggacgcaaagcaaaccaggtgtacatcattgactatgggcttgccaagaagtatagagatcttcaaacacacaagcatattccatacagggaaaacaagaaccttactggaacagctcgatatgcaagtgttaacacccatcttggaattgagcaaagtagaagggatgatctggaatctctaggctatctgcttatgtattttcttcgaggaagccttccttggcaaggccttcgtgcaggtaccaaaaagcagaagtatgacaagatcagtgaaaagaaaagactaacaccagtggaggtcctctgtaaaaactttccacctgagttcacatcgtattttctctatgtgcgttcactacggtttgaagacaaaccagattattcatacctaaagaggcttttcagagacctatttatccgagaaggttatcagtttgactatgtatttgattggacaatattgaggtatccacagttcggctccagttccagctcgaattccaaaccaagaccaactttaagaccagctatgaatattccagtaccatctgccgacaaagcggaaaagcctccaattggacaggacagccgtgagaggttctcaggtgttttcgaggcatacaccagaagaaatggctcaggaaccggcgttcaagctgatcagtctagtagaccaagaacctcagagaatgttcttgcatccaaggacacgcaaaaccaggagagaccaaactctttatctaggaacctgagttcgtcaagaaaagcaattgctgggtcaagtgttcgagccacttcctcagctgatttcacagagaatcgattaagcagactcatcccaaacaatgatcggtcttctacaactctgaggacccagttcgctccttcgtcctcctcagtagccacaaaagctgcaccaacgagagccgctcgtgacattaccctccagagccttgagctcctcagtattgggaacagcaagaggaagtgactgtctgcattttgccgcccgccaggttcacagttggatcatcttttatccatctttgtttcagaaattattggtaagtaagaaacaaacatgatttgttaaaagatataaatatatattatacatggcttttcttcgt

SEQ ID NO: 100527 - protein, 468 aa, Arabidopsis thaliana
  peptide (1)..(468): Ceres Seq. ID no. 13605341
MDRVVGGKFKLGRKLGSGSFGEIFLGVNVQTGEEVAVKLEPLRARHPQLHYESKLYMLLQGGTGIPHLKWFGVEGEFNCMVIDLLGPSMEEFFNYCSRSFSLKTVLMLADQMINRVEYMHVKGFLHRDIKPDNFLMGLGRKANQVYIIDYGLAKKYRDLQTHKHIPYRENKNLTGTARYASVNTHLGIEQSRRDDLESLGYLLMYFLRGSLPWQGLRAGTKKQKYDKISEKKRLTPVEVLCKNFPPEFTSYFLYVRSLRFEDKPDYSYLKRLFRDLFIREGYQFDYVFDWTILRYPQFGSSSSSNSKPRPTLRPAMNIPVPSADKAEKPPIGQDSRERFSGVFEAYTRRNGSGTGVQADQSSRPRTSENVLASKDTQNQERPNSLSRNLSSSRKAIAGSSVRATSSADFTENRLSRLIPNNDRSSTTLRTQFAPSSSSVATKAAPTRAARDITLQSLELLSIGNSKRK

SEQ ID NO: 100528 - protein, 412 aa, Arabidopsis thaliana
  peptide (1)..(412): Ceres Seq. ID no. 13605342
MLLQGGTGIPHLKWFGVEGEFNCMVIDLLGPSMEEFFNYCSRSFSLKTVLMLADQMINRVEYMHVKGFLHRDIKPDNFLMGLGRKANQVYIIDYGLAKKYRDLQTHKHIPYRENKNLTGTARYASVNTHLGIEQSRRDDLESLGYLLMYFLRGSLPWQGLRAGTKKQKYDKISEKKRLTPVEVLCKNFPPEFTSYFLYVRSLRFEDKPDYSYLKRLFRDLFIREGYQFDYVFDWTILRYPQFGSSSSSNSKPRPTLRPAMNIPVPSADKAEKPPIGQDSRERFSGVFEAYTRRNGSGTGVQADQSSRPRTSENVLASKDTQNQERPNSLSRNLSSSRKAIAGSSVRATSSADFTENRLSRLIPNNDRSSTTLRTQFAPSSSSVATKAAPTRAARDITLQSLELLSIGNSKRK

SEQ ID NO: 100529 - protein, 389 aa, Arabidopsis thaliana
  peptide (1)..(389): Ceres Seq. ID no. 13605343
MVIDLLGPSMEEFFNYCSRSFSLKTVLMLADQMINRVEYMHVKGFLHRDIKPDNFLMGLGRKANQVYIIDYGLAKKYRDLQTHKHIPYRENKNLTGTARYASVNTHLGIEQSRRDDLESLGYLLMYFLRGSLPWQGLRAGTKKQKYDKISEKKRLTPVEVLCKNFPPEFTSYFLYVRSLRFEDKPDYSYLKRLFRDLFIREGYQFDYVFDWTILRYPQFGSSSSSNSKPRPTLRPAMNIPVPSADKAEKPPIGQDSRERFSGVFEAYTRRNGSGTGVQADQSSRPRTSENVLASKDTQNQERPNSLSRNLSSSRKAIAGSSVRATSSADFTENRLSRLIPNNDRSSTTLRTQFAPSSSSVATKAAPTRAARDITLQSLELLSIGNSKRK

SEQ ID NO: 100530 - DNA, 1512 bp, Arabidopsis thaliana
  misc_feature (1)..(1512): Ceres Seq. ID no. 13605356
  misc_feature (1)..(1512): Ortholog of  Ceres SEQ ID NO 15172274 as cited in SEQ ID NO 59703
aaaattttacacttatgctcttcatatcacatacaacaaactcatatatataaaaactttaaccttcgtatagcaacgatctagtagaaagcttatactaaaactttctgattctcttaatatggcggaggagtttaaagctacggcatcgatttgtggtggcggaggtggcgcgtggtggaactcgccaaggagcgttatgtctccttcggatcatttcttgtcaccatgcttcggagcggctatcacttccaatgattttagctcgcaagagaatcatctcaaatctaggatgacttgtacggacaacaacaacatcgttttcgggcagcgagaggcggattctgacagtggaggaagtaccgtgacgatggactcgacgttgcagatgatgggtctagggttttcctcaaattgttcttcagattggaaccaaaccattttacaagaagacttaaactcaagcttcataaggagctcacaagatcaagatcatggccaaggattcttatccacaactacttcaccttatatacttaatccagcttgttcttcatctccatcaacttcttcgtcctcaagcttgatacgaaccttttacgatcccgaaccaagtccatacaactttgtctccaccacaagtggttcaatcaacgatcctcaactttcttgggctaataagacaaatcctcatcatcaagtagcttatggactaattaacagcttctctaacaacgcaaactctcgacccttttggaattcttcatcaaccactaacttaaacaacacgacgccgagcaattttgtaaccactccgcagataatatctactcgtttggaggacaaaaccaagaatctgaagacaagagctcagagtgagtctttgaagagagcaaaggataatgaatctgcggcgaagaaaccgagagtcaccacgccttcaccgttgccaactttcaaggtgagaaaagagaatctaagggaccagataacttcattacaacaactagtttcacctttcggaaagacagatactgcatctgttctccaagaagctatagagtacatcaagttccttcacgaccaagtcactgttctaagcactccatacatgaaacaaggtgcctcgaaccaacaacaacagcagatatctggtaaatcgaagagtcaagatgaaaatgagaatcacgaactaagaggacatggtctatgtctcgtcccaatatcaagcacgtttccggtggctaacgaaacaacagccgatttttggacaccaacgtttgggggcaacaatttcaggtgattaaagagagagggttgtggttgtcaagacggatgggaacatatgctaaattcagcttggagactctaaagcataacaataatttttaatgtattttcttcttctttcaatattttaaggggggtttattgctgaatttagcatatatgggttgtttttatgttgaataaccttttgttcctgtcattgttcttgaatatatatatata

SEQ ID NO: 100531 - protein, 393 aa, Arabidopsis thaliana; identical to SEQ ID NO: 43463
  peptide (1)..(393): Ceres Seq. ID no. 13605357

SEQ ID NO: 100532 - protein, 367 aa, Arabidopsis thaliana; identical to SEQ ID NO: 43464
  peptide (1)..(367): Ceres Seq. ID no. 13605358

SEQ ID NO: 100533 - protein, 336 aa, Arabidopsis thaliana; identical to SEQ ID NO: 43465
  peptide (1)..(336): Ceres Seq. ID no. 13605359

SEQ ID NO: 100534 - DNA, 1583 bp, Arabidopsis thaliana
  misc_feature (1)..(1583): Ceres Seq. ID no. 13605360
  misc_feature (1)..(1583): Ortholog of  Ceres SEQ ID NO 13600220 as cited in SEQ ID NO 0
gacgacatacacgagaaagaaaaaaaaccaaaatgaaaacttttgccaactttgcaattctgtttttattacaaagcttattgtttcctctttacagttcatgccttcatcaaacttcagatgattcatctccatttccttctgatttcctctttggcacagcttcttctgctttccagtatgaaggtgccttcttaaccgatggaaaaggtctgaacaattgggatgtctttgcccatgaaaaccctgggaaaatagttgatggaagcaatggagacatagctacggaccaatatcatcgatatatggaagatatccaatcaatgaattttcttggagtcaatagttacagattatctatttcctggtctagagtcttacctaatggaagatttggagttattaattataagggaataaagtattacaacaatttgatcgacgctcttattaaaaaagggattacaccatttgtgacgttgaaccacttcgactatcctcaagaactcgagaaccggttcaagagttggttaagctccgagatgcagaaagatttcgggtacttagctgatatatgtttcaaacattttggagaccgagttaaacactggatcacgattaacgaaccaaaccaacatataagcttagcatatcgaagtggtttgtttccaccagcgcggtgctccatgccatacggaaattgtactcacgggaactcagaaactgagccttttatagccgctcataatatgatcctcgcacatgcaaaggcgattcaaatataccgaaccaaatatcaaagagaacaaaagggaatcattggcattgtggtacaaacatcatggtttgaacccataagcgattcgattgctgataaaaatgctgccgagagagctcaatcattttattcaaattggattctagatcccgttgtgtatgggaaatatccggaagaaatggtgaatctacttggatcagctttgccaaaattttcgagcaatgaaatgaacagcctaatgagctataaatcagactttttgggtattaatcactatacaagttacttcatacaagattgtttgatcactgcttgtaattctggagacggagcttctaaaagcgaaggattagccctcaaattggaccggaaaggaaatgtttccatcggagaactgaccgacgtaaattggcagcatattgatcctaacggattcagaaagatgttgaattacctaaaaaataggtaccacaacataccaatgtacatcaccgaaaatggtttcggacagttgcaaaaaccagagacaacagttgaagaacttctgcatgatacaaaaaggatacaatacttgagtggatatttggatgctttgaaagcagcaatgagggatggagcaaatgtgaagggatatttcgcatggtcactattagataattttgaatggttgtacggatacaaggttcgatttgggctattccacgttgattttacaactttgaaaaggacaccaaagcaatcagctacatggtacaagaacttcattgaacagaacgtgaatatagaagatcaaatagataaataa

SEQ ID NO: 100535 - protein, 526 aa, Arabidopsis thaliana
  peptide (1)..(526): Ceres Seq. ID no. 13605361
RHTRERKKTKMKTFANFAILFLLQSLLFPLYSSCLHQTSDDSSPFPSDFLFGTASSAFQYEGAFLTDGKGLNNWDVFAHENPGKIVDGSNGDIATDQYHRYMEDIQSMNFLGVNSYRLSISWSRVLPNGRFGVINYKGIKYYNNLIDALIKKGITPFVTLNHFDYPQELENRFKSWLSSEMQKDFGYLADICFKHFGDRVKHWITINEPNQHISLAYRSGLFPPARCSMPYGNCTHGNSETEPFIAAHNMILAHAKAIQIYRTKYQREQKGIIGIVVQTSWFEPISDSIADKNAAERAQSFYSNWILDPVVYGKYPEEMVNLLGSALPKFSSNEMNSLMSYKSDFLGINHYTSYFIQDCLITACNSGDGASKSEGLALKLDRKGNVSIGELTDVNWQHIDPNGFRKMLNYLKNRYHNIPMYITENGFGQLQKPETTVEELLHDTKRIQYLSGYLDALKAAMRDGANVKGYFAWSLLDNFEWLYGYKVRFGLFHVDFTTLKRTPKQSATWYKNFIEQNVNIEDQIDK

SEQ ID NO: 100536 - protein, 516 aa, Arabidopsis thaliana
  peptide (1)..(516): Ceres Seq. ID no. 13605362
MKTFANFAILFLLQSLLFPLYSSCLHQTSDDSSPFPSDFLFGTASSAFQYEGAFLTDGKGLNNWDVFAHENPGKIVDGSNGDIATDQYHRYMEDIQSMNFLGVNSYRLSISWSRVLPNGRFGVINYKGIKYYNNLIDALIKKGITPFVTLNHFDYPQELENRFKSWLSSEMQKDFGYLADICFKHFGDRVKHWITINEPNQHISLAYRSGLFPPARCSMPYGNCTHGNSETEPFIAAHNMILAHAKAIQIYRTKYQREQKGIIGIVVQTSWFEPISDSIADKNAAERAQSFYSNWILDPVVYGKYPEEMVNLLGSALPKFSSNEMNSLMSYKSDFLGINHYTSYFIQDCLITACNSGDGASKSEGLALKLDRKGNVSIGELTDVNWQHIDPNGFRKMLNYLKNRYHNIPMYITENGFGQLQKPETTVEELLHDTKRIQYLSGYLDALKAAMRDGANVKGYFAWSLLDNFEWLYGYKVRFGLFHVDFTTLKRTPKQSATWYKNFIEQNVNIEDQIDK

SEQ ID NO: 100537 - protein, 425 aa, Arabidopsis thaliana
  peptide (1)..(425): Ceres Seq. ID no. 13605363
MEDIQSMNFLGVNSYRLSISWSRVLPNGRFGVINYKGIKYYNNLIDALIKKGITPFVTLNHFDYPQELENRFKSWLSSEMQKDFGYLADICFKHFGDRVKHWITINEPNQHISLAYRSGLFPPARCSMPYGNCTHGNSETEPFIAAHNMILAHAKAIQIYRTKYQREQKGIIGIVVQTSWFEPISDSIADKNAAERAQSFYSNWILDPVVYGKYPEEMVNLLGSALPKFSSNEMNSLMSYKSDFLGINHYTSYFIQDCLITACNSGDGASKSEGLALKLDRKGNVSIGELTDVNWQHIDPNGFRKMLNYLKNRYHNIPMYITENGFGQLQKPETTVEELLHDTKRIQYLSGYLDALKAAMRDGANVKGYFAWSLLDNFEWLYGYKVRFGLFHVDFTTLKRTPKQSATWYKNFIEQNVNIEDQIDK

SEQ ID NO: 100538 - DNA, 890 bp, Arabidopsis thaliana
  misc_feature (1)..(890): Ceres Seq. ID no. 13605389
  misc_feature (1)..(890): Ortholog of  Ceres SEQ ID NO 13624427 as cited in SEQ ID NO 0
gcaagaaaaaaaaaaaaactcacatttttgtgtttcagagatatttaaagaaaaaaagatggaaatcactaagttgcttgtggtgattatcgttggactagtgagtgccaatgttggcgcgaggcaactccaaggacttttcgaaaacacaaaattgttggatccaaaattcgatggtgagccaatttgtgccgctgggggaggtggaggtggtggtggaggagctagtgttgaaggtggtaccgaaaaaggtatcgacgataatgcaaacgggtacggagatgggaatggaaatgggaatgcgcatggacgcgccgactgtcccggaggcatagttgttggaggtggaggtggtggtggaggcggaggtggaggcggtggcggttctggcggcagtaatggtagtttctttaatggcagtggcagcggtactggctatggtagtggtgatggtagagtcagtagcagtggtgagtattcagcaagtgcaggtgggggaggcagtggtgaaggtagtggcggtggtggtggcggtgacggtagcagcggcagcggtagtggaagcggaagtggaagtggaagtggaactggaaccgctagtggccctgatgtgtatatgcatgtagaaggtggtggaggcggtggtggaggtggtggcggcggaggcggtggtggtgttgatggtagcggaagtggcagtggtagtgggagcggtggcggaagcggcaatgtctatcattgaagttgaaatagtatctagtattatgtgtgtccttattctaagcttctatatataacattcttattcgatcttcgtcttatgtgtgatatgttcattgaatatcataatatgttggtcgcatattcacaattttatatgtttgtgtatt

SEQ ID NO: 100539 - protein, 246 aa, Arabidopsis thaliana
  peptide (1)..(246): Ceres Seq. ID no. 13605390
QEKKKNSHFCVSEIFKEKKMEITKLLVVIIVGLVSANVGARQLQGLFENTKLLDPKFDGEPICAAGGGGGGGGGASVEGGTEKGIDDNANGYGDGNGNGNAHGRADCPGGIVVGGGGGGGGGGGGGGGSGGSNGSFFNGSGSGTGYGSGDGRVSSSGEYSASAGGGGSGEGSGGGGGGDGSSGSGSGSGSGSGSGTGTASGPDVYMHVEGGGGGGGGGGGGGGGGVDGSGSGSGSGSGGGSGNVYH

SEQ ID NO: 100540 - protein, 227 aa, Arabidopsis thaliana
  peptide (1)..(227): Ceres Seq. ID no. 13605391
MEITKLLVVIIVGLVSANVGARQLQGLFENTKLLDPKFDGEPICAAGGGGGGGGGASVEGGTEKGIDDNANGYGDGNGNGNAHGRADCPGGIVVGGGGGGGGGGGGGGGSGGSNGSFFNGSGSGTGYGSGDGRVSSSGEYSASAGGGGSGEGSGGGGGGDGSSGSGSGSGSGSGSGTGTASGPDVYMHVEGGGGGGGGGGGGGGGGVDGSGSGSGSGSGGGSGNVYH

SEQ ID NO: 100541 - DNA, 1759 bp, Arabidopsis thaliana
  misc_feature (1)..(1759): Ceres Seq. ID no. 13605392
  misc_feature (1)..(1759): Ortholog of  Ceres SEQ ID NO 13599324 as cited in SEQ ID NO 0
ctggtgcttaaacactctggtcaaaatgggagtatactcgagagcggttgcgttttcggtctttgtgtcgtttctgctgtttttcactgcttattctaagagaaatgatggaacattcagagttggcctgaaaaaactgaagttggatcctaacaaccgactcgcaacacgctttggttccaagcaagaagaggccttgagatcttctttgcgttcgtacaacaacaatcttggtggtgattctggagatgctgatattgtcccgctcaagaattacttggatgctcagtactatggtgagattgctattggtactccaccgcagaagttcactgtcatttttgataccggaagctctaacctttgggtgccatcaggaaaatgttttttctcgctgtcttgttactttcatgctaagtacaagtcctcgcgatcaagcacatataagaagagtggaaaacgtgccgcaatccattacggctcaggatcaatctctggtttctttagttatgatgctgtcacggttggtgatttggttgtcaaagatcaggagtttattgagacaaccagtgagcctggtttaacattcctggtggctaagtttgatggtcttcttggtcttgggttccaagagatcgctgttggaaacgctactcctgtttggtacaatatgctcaagcaaggccttataaagaggccggtcttttcattttggcttaaccgtgatccaaagagtgaagaaggcggtgaaatcgtattcggaggtgttgatccaaagcattttagaggagaacatacatttgttcctgtgacacaaaggggttactggcagttcgacatgggtgaggttctcattgccggtgaatctactggatattgtggaagtggttgttctgcgatagcagattctggaacatcgttacttgcgggtccaacggctgtggttgccatgataaataaggctattggagcatctggagttgttagccagcagtgcaagactgttgttgaccagtatggacaaaccattttggatttacttttggctgagactcaaccaaagaagatttgctcacaaattggtctttgcgcttacgatggcacccatggggtcagtatggggattgaatcggtggtggacaaggaaaacacaagatcatctagtggtcttcgagacgcgggttgtcctgcatgtgaaatggcggttgtgtggatacagagccaattgaggcagaacatgactcaagagaggatagtgaactacattaatgagatatgcgagcgcatgcctagtccaaatggagagtctgctgttgactgctcacaactttctaaaatgcctactgtttcattcaccattggaggcaaagtctttgatcttgctcccgaagagtacgtactgaagattggggaaggaccagtggcacaatgtattagcggctttaccgcacttgatatccctccacctcgtggacctctctggatacttggagatgtgtttatgggaaaataccacactgtctttgacttcggaaacgagcaggttggcttcgcagaagccgtgtgaaaaatgtaacatcgatcttttgttgatatgtttttggtgtgagagctttgttgtgttgtgtttacatggagaggttttaagaatgaagcctcgttgttgttgttaacaatgttttgccataaacatacgttaaagctttggggatgttttctttctaactctcaccaataaataaaataaagacctcttttt

SEQ ID NO: 100542 - protein, 521 aa, Arabidopsis thaliana
  peptide (1)..(521): Ceres Seq. ID no. 13605393
WCLNTLVKMGVYSRAVAFSVFVSFLLFFTAYSKRNDGTFRVGLKKLKLDPNNRLATRFGSKQEEALRSSLRSYNNNLGGDSGDADIVPLKNYLDAQYYGEIAIGTPPQKFTVIFDTGSSNLWVPSGKCFFSLSCYFHAKYKSSRSSTYKKSGKRAAIHYGSGSISGFFSYDAVTVGDLVVKDQEFIETTSEPGLTFLVAKFDGLLGLGFQEIAVGNATPVWYNMLKQGLIKRPVFSFWLNRDPKSEEGGEIVFGGVDPKHFRGEHTFVPVTQRGYWQFDMGEVLIAGESTGYCGSGCSAIADSGTSLLAGPTAVVAMINKAIGASGVVSQQCKTVVDQYGQTILDLLLAETQPKKICSQIGLCAYDGTHGVSMGIESVVDKENTRSSSGLRDAGCPACEMAVVWIQSQLRQNMTQERIVNYINEICERMPSPNGESAVDCSQLSKMPTVSFTIGGKVFDLAPEEYVLKIGEGPVAQCISGFTALDIPPPRGPLWILGDVFMGKYHTVFDFGNEQVGFAEAV

SEQ ID NO: 100543 - protein, 513 aa, Arabidopsis thaliana
  peptide (1)..(513): Ceres Seq. ID no. 13605394
MGVYSRAVAFSVFVSFLLFFTAYSKRNDGTFRVGLKKLKLDPNNRLATRFGSKQEEALRSSLRSYNNNLGGDSGDADIVPLKNYLDAQYYGEIAIGTPPQKFTVIFDTGSSNLWVPSGKCFFSLSCYFHAKYKSSRSSTYKKSGKRAAIHYGSGSISGFFSYDAVTVGDLVVKDQEFIETTSEPGLTFLVAKFDGLLGLGFQEIAVGNATPVWYNMLKQGLIKRPVFSFWLNRDPKSEEGGEIVFGGVDPKHFRGEHTFVPVTQRGYWQFDMGEVLIAGESTGYCGSGCSAIADSGTSLLAGPTAVVAMINKAIGASGVVSQQCKTVVDQYGQTILDLLLAETQPKKICSQIGLCAYDGTHGVSMGIESVVDKENTRSSSGLRDAGCPACEMAVVWIQSQLRQNMTQERIVNYINEICERMPSPNGESAVDCSQLSKMPTVSFTIGGKVFDLAPEEYVLKIGEGPVAQCISGFTALDIPPPRGPLWILGDVFMGKYHTVFDFGNEQVGFAEAV

SEQ ID NO: 100544 - protein, 298 aa, Arabidopsis thaliana
  peptide (1)..(298): Ceres Seq. ID no. 13605395
MLKQGLIKRPVFSFWLNRDPKSEEGGEIVFGGVDPKHFRGEHTFVPVTQRGYWQFDMGEVLIAGESTGYCGSGCSAIADSGTSLLAGPTAVVAMINKAIGASGVVSQQCKTVVDQYGQTILDLLLAETQPKKICSQIGLCAYDGTHGVSMGIESVVDKENTRSSSGLRDAGCPACEMAVVWIQSQLRQNMTQERIVNYINEICERMPSPNGESAVDCSQLSKMPTVSFTIGGKVFDLAPEEYVLKIGEGPVAQCISGFTALDIPPPRGPLWILGDVFMGKYHTVFDFGNEQVGFAEAV

SEQ ID NO: 100545 - DNA, 1774 bp, Arabidopsis thaliana
  misc_feature (1)..(1774): Ceres Seq. ID no. 13605426
  misc_feature (1)..(1774): Ortholog of  Ceres SEQ ID NO 13648571 as cited in SEQ ID NO 197
tattcggttctcgagtcatcgctgtctggaacagcgatgactcgagaaaagaataatggcgaattctcaaagatcatcatctctgatcgatccaaggaacggtttctgcacatcaaactccacattttacagtaaacgcaaaccattggcacttccttcaaaagaatcactcgacatcacaacattcatctcctcccaaacgtaccgtggcaaaaccgccttcatagacgcagccacggaccaccgcataagcttctccgatttatggatggccgtggatcgtgtcgccgactgtctcctccacgacgtgggaatacggagaggtgacgtggtcctagtcctctctcccaacaccatctccatccccattgtctgcctctccgtgatgtctcttggcgctgtcttaactaccgctaatcctctcaacaccgctagtgaaatcttaagacaaatcgcggatagcaatccaaaactcgccttcacaacaccggaactggctcccaaaatcgccagttccggtatctctatcgtcctcgagcgcgtagaagacactctacgcgttccgagaggactcaaagtggttgggaatctaactgaaatgatgaagaaagaaccaagtggacaagcagtcagaaaccaagttcataaagacgacacggcgatgttgctttactcctcggggacgacgggacgaagcaaaggagtgaattcgtctcacgggaacttaatagcacacgtggcgagatacatcgcggagccattcgagcagccacaacagaccttcatttgcactgttccgttgttccacacttttggtttactaaacttcgttttggccaccttagcgttaggtacgaccgttgtcatcctcccgaggtttgacctcggagagatgatggcggctgtcgagaaatacagagcgacgactctgattctcgtgccgccagttttagtaactatgataaacaaagcggatcaaataatgaagaagtacgacgtgagcttcttgagaacggtgcggtgcggtggagcacctttgagcaaggaagttactcaagggtttatgaagaaatatccaacggttgatgtttatcaaggatacgcattgacggaatctaacggtgcaggagcttcgatagaatcagtggaggagagtcggaggtacggtgcggtggggttgttgtcatgtggtgtagaagcgaggattgtggatccgaatacgggtcaggtcatgggtttgaaccaaacgggcgaactttggcttaaagggccttctatcgccaaaggttatttcaggaatgaagaagaaattataacttcagaaggatggcttaaaacaggagatctatgctatatagacaacgatggatttctttttatcgttgatcgattgaaagagcttatcaaatacaaaggttaccaggtacctccagctgaactagaggctctcttactaaaccatccagatattctcgatgcagccgttattccgtttccagataaagaagcaggacaatttccgatggcttacgtagcacgaaagcctgagagtaatctttgtgagaaaaaggttatcgactttatttctaaacaggtggcaccatataagaaaataagaaaagtcgcatttatagactctataccaaagactccatcgggcaaaacacttcgcaaggatctaatcaaatttgccatttcaaaaatttaaaagaatcactattttgtcatttttatttgtatgaatttctgacataataaaagagaagttatatcc

SEQ ID NO: 100546 - protein, 550 aa, Arabidopsis thaliana; identical to SEQ ID NO: 71567
  peptide (1)..(550): Ceres Seq. ID no. 13605427

SEQ ID NO: 100547 - protein, 479 aa, Arabidopsis thaliana; identical to SEQ ID NO: 71568
  peptide (1)..(479): Ceres Seq. ID no. 13605428

SEQ ID NO: 100548 - protein, 440 aa, Arabidopsis thaliana; identical to SEQ ID NO: 71569
  peptide (1)..(440): Ceres Seq. ID no. 13605429

SEQ ID NO: 100549 - DNA, 2313 bp, Arabidopsis thaliana
  misc_feature (1)..(2313): Ceres Seq. ID no. 13605437
  misc_feature (1)..(2313): Ortholog of  Ceres SEQ ID NO 13595658 as cited in SEQ ID NO 59888
  misc_feature (1)..(2313): Ortholog of  Ceres SEQ ID NO 13661330 as cited in SEQ ID NO 61614
  misc_feature (1)..(2313): Ortholog of  Ceres SEQ ID NO 13596025 as cited in SEQ ID NO 62024
  misc_feature (1)..(2313): Ortholog of  Ceres SEQ ID NO 13662324 as cited in SEQ ID NO 62162
  misc_feature (1)..(2313): Ortholog of  Ceres SEQ ID NO 12625713 as cited in SEQ ID NO 64160
cttggaatcattggtcaaaagagagaggctacaactttaaaaggccttcaataacgttggaccggctctaagaggacaaagggtagtcttatatcttcagtcttctacaagccaatggttgaagggttctcattgtcattgatgttcctccttgtttcacatttctttgtctcaggagtaatgtcgagaaactttactatagagaacaaatgcgattacactgtctggccgggattcctaaccatgactactgcggtttcgctccccaccaacggcttctccctcaagaaaggggagtcacgtgtcatcaatgtgccaccgtcatggtcaggtcgtttgtggggtagatcgttctgctccaccagctcaacagggaatttctcatgtgccacgggagactgcggctccggaaaaatcgagtgctccgattccggagcaaggcctcctacgacgctaattgattttacccttgacgctaccgacggtcaagacttctacgatgtaagcgtcgtggatggttacaaccttccgttggttgtggtcccacaacgtctagggagtggccggacatgtagcaacgttggttgtgtggttaacttgaacaagacttgtccgtcggagcttaaagtgatgggaagctctaacaaggaacatcccattgcttgcatgaacgcttgtcagaaattcgggttgccggagttctgctgctacggtgagtacggtaaacctgcaaaatgtcaaccgacgctttactctacgaatttcaagaacgagtgtccactcgcttatagctatgcttatgacaatgaaaacaacaccttcagatgctcaaactcacctaactatgtcatcaccttttgccccaacgacataagttcaatgtctcaaccatccaaggaaactaatggaggaacgaaacaaaagtcatcatggaagttaaaactcatagttggagtctcagcagctttgaccctgatgatcttaattgtggtcgtaataatagtgagaacaaagaatatgagaaatagtgagtggaatgatcagaacgttgaagcagttgcaatgttgaaacgatacagttatacaagagtcaagaagatgacaaactcatttgcgcatgttctcggtaaaggaggatttggaactgtctacaaaggaaagttagccgatagcggtcgggatgtcgcagttaagatcttgaaggtgtcagagggtaatggagaagagttcattaatgaagtagcaagcatgagtagaacatctcatgtcaatattgtttctctgcttggattctgttatgaaaagaacaagagagctataatctacgagttcatgccgaatgggtccctcgacaagtatatttctgcgaatatgtcaacaaagatggaatgggaaagattatacgacgttgcggtaggtatctctcgcggcctagagtatttacacaatcggtgtgtcacgaggattgtccatttcgacataaagccgcagaacatactgatggacgaaaatctttgtcctaagatttcagattttggtcttgctaaactctgcaaaaataaggagagcatcatatcaatgctacacatgagagggacctttggatacattgcccctgaaatgttttccaagaattttggagcagtttcgcataagtcagatgtttatagttatgggatggtagttcttgagatgattggagcaaagaatatagaaaaggttgaatattctggatctaacaatggttcaatgtactttccagaatgggtctataaagattttgagaagggagaaatcacaaggatttttggagatagtataactgatgaagaagagaaaattgcaaagaaattggtattggttgctctatggtgtatacagatgaatccatcagaccgtccaccaatgatcaaagtcattgagatgttagaggggaatctagaggctcttcaagtaccacctaatcctctcttgttttcacccgaggaaacggttccagacactcttgaagatagtgatgacacttcaaccttctttaatccaagtcattttgaaagaggtactctcttagatagtgaagatgttttacaacatgggtcaaggtcctcctaaactaaagtcaacccgagagcggatctatttaaacttgtcaagatctttagctatttctcgattagtttttaataacttctgacttaatagtgtgtttctatgcttattagatgatgtttactgacgcaggcactcaatattgttggttaatgaagactattttctgttgtttttctcttggaaagagagaaacgttaatat

SEQ ID NO: 100550 - protein, 665 aa, Arabidopsis thaliana
  peptide (1)..(665): Ceres Seq. ID no. 13605438
MVEGFSLSLMFLLVSHFFVSGVMSRNFTIENKCDYTVWPGFLTMTTAVSLPTNGFSLKKGESRVINVPPSWSGRLWGRSFCSTSSTGNFSCATGDCGSGKIECSDSGARPPTTLIDFTLDATDGQDFYDVSVVDGYNLPLVVVPQRLGSGRTCSNVGCVVNLNKTCPSELKVMGSSNKEHPIACMNACQKFGLPEFCCYGEYGKPAKCQPTLYSTNFKNECPLAYSYAYDNENNTFRCSNSPNYVITFCPNDISSMSQPSKETNGGTKQKSSWKLKLIVGVSAALTLMILIVVVIIVRTKNMRNSEWNDQNVEAVAMLKRYSYTRVKKMTNSFAHVLGKGGFGTVYKGKLADSGRDVAVKILKVSEGNGEEFINEVASMSRTSHVNIVSLLGFCYEKNKRAIIYEFMPNGSLDKYISANMSTKMEWERLYDVAVGISRGLEYLHNRCVTRIVHFDIKPQNILMDENLCPKISDFGLAKLCKNKESIISMLHMRGTFGYIAPEMFSKNFGAVSHKSDVYSYGMVVLEMIGAKNIEKVEYSGSNNGSMYFPEWVYKDFEKGEITRIFGDSITDEEEKIAKKLVLVALWCIQMNPSDRPPMIKVIEMLEGNLEALQVPPNPLLFSPEETVPDTLEDSDDTSTFFNPSHFERGTLLDSEDVLQHGSRSS

SEQ ID NO: 100551 - protein, 656 aa, Arabidopsis thaliana
  peptide (1)..(656): Ceres Seq. ID no. 13605439
MFLLVSHFFVSGVMSRNFTIENKCDYTVWPGFLTMTTAVSLPTNGFSLKKGESRVINVPPSWSGRLWGRSFCSTSSTGNFSCATGDCGSGKIECSDSGARPPTTLIDFTLDATDGQDFYDVSVVDGYNLPLVVVPQRLGSGRTCSNVGCVVNLNKTCPSELKVMGSSNKEHPIACMNACQKFGLPEFCCYGEYGKPAKCQPTLYSTNFKNECPLAYSYAYDNENNTFRCSNSPNYVITFCPNDISSMSQPSKETNGGTKQKSSWKLKLIVGVSAALTLMILIVVVIIVRTKNMRNSEWNDQNVEAVAMLKRYSYTRVKKMTNSFAHVLGKGGFGTVYKGKLADSGRDVAVKILKVSEGNGEEFINEVASMSRTSHVNIVSLLGFCYEKNKRAIIYEFMPNGSLDKYISANMSTKMEWERLYDVAVGISRGLEYLHNRCVTRIVHFDIKPQNILMDENLCPKISDFGLAKLCKNKESIISMLHMRGTFGYIAPEMFSKNFGAVSHKSDVYSYGMVVLEMIGAKNIEKVEYSGSNNGSMYFPEWVYKDFEKGEITRIFGDSITDEEEKIAKKLVLVALWCIQMNPSDRPPMIKVIEMLEGNLEALQVPPNPLLFSPEETVPDTLEDSDDTSTFFNPSHFERGTLLDSEDVLQHGSRSS

SEQ ID NO: 100552 - protein, 643 aa, Arabidopsis thaliana
  peptide (1)..(643): Ceres Seq. ID no. 13605440
MSRNFTIENKCDYTVWPGFLTMTTAVSLPTNGFSLKKGESRVINVPPSWSGRLWGRSFCSTSSTGNFSCATGDCGSGKIECSDSGARPPTTLIDFTLDATDGQDFYDVSVVDGYNLPLVVVPQRLGSGRTCSNVGCVVNLNKTCPSELKVMGSSNKEHPIACMNACQKFGLPEFCCYGEYGKPAKCQPTLYSTNFKNECPLAYSYAYDNENNTFRCSNSPNYVITFCPNDISSMSQPSKETNGGTKQKSSWKLKLIVGVSAALTLMILIVVVIIVRTKNMRNSEWNDQNVEAVAMLKRYSYTRVKKMTNSFAHVLGKGGFGTVYKGKLADSGRDVAVKILKVSEGNGEEFINEVASMSRTSHVNIVSLLGFCYEKNKRAIIYEFMPNGSLDKYISANMSTKMEWERLYDVAVGISRGLEYLHNRCVTRIVHFDIKPQNILMDENLCPKISDFGLAKLCKNKESIISMLHMRGTFGYIAPEMFSKNFGAVSHKSDVYSYGMVVLEMIGAKNIEKVEYSGSNNGSMYFPEWVYKDFEKGEITRIFGDSITDEEEKIAKKLVLVALWCIQMNPSDRPPMIKVIEMLEGNLEALQVPPNPLLFSPEETVPDTLEDSDDTSTFFNPSHFERGTLLDSEDVLQHGSRSS

SEQ ID NO: 100553 - DNA, 932 bp, Arabidopsis thaliana
  misc_feature (1)..(932): Ceres Seq. ID no. 13605445
  misc_feature (1)..(932): Ortholog of  Ceres SEQ ID NO 13596519 as cited in SEQ ID NO 62572
  misc_feature (1)..(932): Ortholog of  Ceres SEQ ID NO 12625108 as cited in SEQ ID NO 68102
ggaagctaaaagtaaaacaaaatcatcaaagagggataataatcatgaaattgctagaaaaaatgacatatgtagaatgttttatgataataatggcgacatggttcatgttcataagttacagtcatggagccaatgtagctgcagcacctggaaccaacggacttgatactgcttggtatgatgcgcgagccgcatattatggtgatatccatggtggaggcactgaactagaaggagcttgtggatacggtgatctaaacaaacatggatatggtctagccacagcagcattgagcacggcgctcttcaacagcggggcctcatgtggggcttgttacgagatcatgtgctctcctaatccacaaggatgtttgtccggatctatcaagatcacagcaacagatttatgtccaccaggatccgcttggtgctacctaccaaataaacactttgatctctccttaccaatgttcatcaagatcgctcaggtcaaagccaagatggtcccggttagatacagacgtgttccctgtgcgaaaaccggtggtgtcaagtttgaagttaaaggaaaccctaatatcttaacgatcttgccgtacaatgtaggaggagcaggagatattatagccgtgtctgctaagggaagcaaaaccgcgtgggtagtaatgagcagatattggggacaaaattggactactaatgttaatctaaccggtcaaagtgtatcattaagggttacaacgagtgatgggattacaaaggattttactgatgtgatgccagcaagttggggatttgggcagacttttgatggaaagactaacttttaagaaaaatgatatgaattttttttagttttggcttacaagttacaactaagagagatgtattggttgcaataattaaaaataaatgaaatattgtttatg

SEQ ID NO: 100554 - protein, 276 aa, Arabidopsis thaliana
  peptide (1)..(276): Ceres Seq. ID no. 13605446
KLKVKQNHQRGIIIMKLLEKMTYVECFMIIMATWFMFISYSHGANVAAAPGTNGLDTAWYDARAAYYGDIHGGGTELEGACGYGDLNKHGYGLATAALSTALFNSGASCGACYEIMCSPNPQGCLSGSIKITATDLCPPGSAWCYLPNKHFDLSLPMFIKIAQVKAKMVPVRYRRVPCAKTGGVKFEVKGNPNILTILPYNVGGAGDIIAVSAKGSKTAWVVMSRYWGQNWTTNVNLTGQSVSLRVTTSDGITKDFTDVMPASWGFGQTFDGKTNF

SEQ ID NO: 100555 - protein, 262 aa, Arabidopsis thaliana
  peptide (1)..(262): Ceres Seq. ID no. 13605447
MKLLEKMTYVECFMIIMATWFMFISYSHGANVAAAPGTNGLDTAWYDARAAYYGDIHGGGTELEGACGYGDLNKHGYGLATAALSTALFNSGASCGACYEIMCSPNPQGCLSGSIKITATDLCPPGSAWCYLPNKHFDLSLPMFIKIAQVKAKMVPVRYRRVPCAKTGGVKFEVKGNPNILTILPYNVGGAGDIIAVSAKGSKTAWVVMSRYWGQNWTTNVNLTGQSVSLRVTTSDGITKDFTDVMPASWGFGQTFDGKTNF

SEQ ID NO: 100556 - protein, 256 aa, Arabidopsis thaliana
  peptide (1)..(256): Ceres Seq. ID no. 13605448
MTYVECFMIIMATWFMFISYSHGANVAAAPGTNGLDTAWYDARAAYYGDIHGGGTELEGACGYGDLNKHGYGLATAALSTALFNSGASCGACYEIMCSPNPQGCLSGSIKITATDLCPPGSAWCYLPNKHFDLSLPMFIKIAQVKAKMVPVRYRRVPCAKTGGVKFEVKGNPNILTILPYNVGGAGDIIAVSAKGSKTAWVVMSRYWGQNWTTNVNLTGQSVSLRVTTSDGITKDFTDVMPASWGFGQTFDGKTNF

SEQ ID NO: 100557 - DNA, 1302 bp, Arabidopsis thaliana
  misc_feature (1)..(1302): Ceres Seq. ID no. 13605449
  misc_feature (1)..(1302): Ortholog of  Ceres SEQ ID NO 13594301 as cited in SEQ ID NO 60110
tagacaagcagatttgcttcttctcgattctttgcaatttgcatgcattgctcatcaaaaaaattcctttctggcttttgttggaaaatagctgtataacttcaaatgttgaaactttgcttttcttcttcttctcttttggtcaaattttgtgttctctctagagcaaaaccctaattctctcaattctactcaaaattaatatctcttgcttccttgagaaagataaagatttgtgtttactaaggttgaggaaatgataatagcaaagcaatatcgttgcattcactcggcgacttgtcattgcacgaaaggacatcttagcgaagaagtattgtttcttatggttcagcatctaaactggaaccctaatgtgattgccactctatcttgtgtttgtaaatggtttgatgatctcgctaagcggttattgtggaaagaattctgtagagctagagcgcctaagatgatgagtgaccttcaatctagtggtagccatagtgttgatgggagttggagagcactagggaaacttttgatttactgctctggttcaagcaaaggtggactctttaatgatgttcaaatctctggtcattttgttcacagaacccgcttctctagaacatcgggaaggagctttcttcctccacaatgtcgaactgatgatattctctatgtttctgatccttgtgaacatttggatcaaggagaagatggtgatttgggattcttccgtgggattttcaaatcgttttctatgtcaaaggtgaggaagttgcttattaagaaagggacaccatttcatcctacggaagtttgtccgtattgcaaagcgaagctgtggagtatgcttcaggcgaaaatgataccacagagtgctagctgtagattgggggcttatgaagatagcattgagtattatgtttgtctcaatgggcatatgcttggagtttgtacactcttacctttgtctgattctgaaggggcctccgagtttcagtgactataaattgccgaccttgcgttttccgttgcagaaaatgcttgaagcttggtcagaggttatgatgtcgtctctctgtttcttatgtactggtgaattgttgctgctaaactttgggaatcatcactttgcaaagagttgatgttaagtgtatcataagctcaagttgtgcaaggtttgacgatttcagattctcaatttaccattggtgtgcatctacaaaccatttgttgattctgtgcatgtatatgtattaacaacacttgcaaattgtaatagacgcatatatttctgct

SEQ ID NO: 100558 - protein, 249 aa, Arabidopsis thaliana
  peptide (1)..(249): Ceres Seq. ID no. 13605450
MIIAKQYRCIHSATCHCTKGHLSEEVLFLMVQHLNWNPNVIATLSCVCKWFDDLAKRLLWKEFCRARAPKMMSDLQSSGSHSVDGSWRALGKLLIYCSGSSKGGLFNDVQISGHFVHRTRFSRTSGRSFLPPQCRTDDILYVSDPCEHLDQGEDGDLGFFRGIFKSFSMSKVRKLLIKKGTPFHPTEVCPYCKAKLWSMLQAKMIPQSASCRLGAYEDSIEYYVCLNGHMLGVCTLLPLSDSEGASEFQ

SEQ ID NO: 100559 - protein, 220 aa, Arabidopsis thaliana
  peptide (1)..(220): Ceres Seq. ID no. 13605451
MVQHLNWNPNVIATLSCVCKWFDDLAKRLLWKEFCRARAPKMMSDLQSSGSHSVDGSWRALGKLLIYCSGSSKGGLFNDVQISGHFVHRTRFSRTSGRSFLPPQCRTDDILYVSDPCEHLDQGEDGDLGFFRGIFKSFSMSKVRKLLIKKGTPFHPTEVCPYCKAKLWSMLQAKMIPQSASCRLGAYEDSIEYYVCLNGHMLGVCTLLPLSDSEGASEFQ

SEQ ID NO: 100560 - protein, 179 aa, Arabidopsis thaliana
  peptide (1)..(179): Ceres Seq. ID no. 13605452
MMSDLQSSGSHSVDGSWRALGKLLIYCSGSSKGGLFNDVQISGHFVHRTRFSRTSGRSFLPPQCRTDDILYVSDPCEHLDQGEDGDLGFFRGIFKSFSMSKVRKLLIKKGTPFHPTEVCPYCKAKLWSMLQAKMIPQSASCRLGAYEDSIEYYVCLNGHMLGVCTLLPLSDSEGASEFQ

SEQ ID NO: 100561 - DNA, 1471 bp, Arabidopsis thaliana
  misc_feature (1)..(1471): Ceres Seq. ID no. 13605464
  misc_feature (1)..(1471): Ortholog of  Ceres SEQ ID NO 13596392 as cited in SEQ ID NO 62136
  misc_feature (1)..(1471): Ortholog of  Ceres SEQ ID NO 14313244 as cited in SEQ ID NO 66802
  misc_feature (1)..(1471): Ortholog of  Ceres SEQ ID NO 13654360 as cited in SEQ ID NO 67980
  misc_feature (1)..(1471): Ortholog of  Ceres SEQ ID NO 13596394 as cited in SEQ ID NO 68561
tgattcctgcgagaggagctaattctctctccttgggaagaagacgacgagcttaatacattcgacagtggagaatatcagattctttttggcgagggttggttgattccttcttattcatcagattaaggatcgtttccggtggctgaagagtaatagaaggaggaagaagaggagaggagaggtaaaaatgtcagacctagatcggcaaatagggcagcttaagcgatgcgaaccattgagcgaatcggaggtgaaggctctttgcctcaaagccatggaaattcttgttgaagagagtaatgttcagagagttgatgcccctgtcactttatgtggtgacatccatgggcagttctatgatatgatggagcttttcaaagttgggggtgattgtcctaagaccaactatttgtttatgggagattttgttgatcgtggatattattcggttgagacatttctacttctactcgcactcaaggttagatatccagaccgcataactctcatcagaggaaaccatgaaagcaggcaaatcacacaggtttatggattttatgatgagtgtttgcgtaaatatggctcttcaaatgtctggagatactgcaccgacatttttgactacatgagtctttcagctgttgtggagaacaagatattctgtgttcatggtggtctttctccagctattatgactcttgatcagattaggacaattgaccggaagcaagaagtaccacatgatggtgccatgtgtgatctcctatggtctgatcctgaagatattgttgatggctggggattgagccctcgtggtgccggattcctttttggtggcagtgttgtcacgtcttttaaccactcaaacaacatagactacatagcccgtgcccatcaactagttatggagggttacaaatggatgtttgatagccagattgtgacagtgtggtcagccccaaattactgttacagatgcggtaatgtggcttcaattctagagcttgacgagaatctaaataaagaattccgtgtgtttgatgcagcccagcaggactcgagagggcctcccgccaaaaagccggcccctgattacttcctataatgggcaaaacttcgaaaaccttattcccaaagtcgaactagcgtcaatattcaactccgttgaagaggaagagaattactattcgttcagtgtttaggttgcagtgcagaagaatatacaatagagttgtttcaggcgagctctacctaggccacaaagactgatcgaactggggttgtctaaaaaagatattgttgttgttgtttccggttttggtgtaactgtagtcaaaagagtgtttgtgtattggtagttaaagagtgattttgtcctgattcaagtttgtactttcttaggaggataagacctcaaacagttttggagctcacagttatatcaatagaattcacagggaagcattag

SEQ ID NO: 100562 - protein, 305 aa, Arabidopsis thaliana
  peptide (1)..(305): Ceres Seq. ID no. 13605465
MSDLDRQIGQLKRCEPLSESEVKALCLKAMEILVEESNVQRVDAPVTLCGDIHGQFYDMMELFKVGGDCPKTNYLFMGDFVDRGYYSVETFLLLLALKVRYPDRITLIRGNHESRQITQVYGFYDECLRKYGSSNVWRYCTDIFDYMSLSAVVENKIFCVHGGLSPAIMTLDQIRTIDRKQEVPHDGAMCDLLWSDPEDIVDGWGLSPRGAGFLFGGSVVTSFNHSNNIDYIARAHQLVMEGYKWMFDSQIVTVWSAPNYCYRCGNVASILELDENLNKEFRVFDAAQQDSRGPPAKKPAPDYFL

SEQ ID NO: 100563 - protein, 276 aa, Arabidopsis thaliana
  peptide (1)..(276): Ceres Seq. ID no. 13605466
MEILVEESNVQRVDAPVTLCGDIHGQFYDMMELFKVGGDCPKTNYLFMGDFVDRGYYSVETFLLLLALKVRYPDRITLIRGNHESRQITQVYGFYDECLRKYGSSNVWRYCTDIFDYMSLSAVVENKIFCVHGGLSPAIMTLDQIRTIDRKQEVPHDGAMCDLLWSDPEDIVDGWGLSPRGAGFLFGGSVVTSFNHSNNIDYIARAHQLVMEGYKWMFDSQIVTVWSAPNYCYRCGNVASILELDENLNKEFRVFDAAQQDSRGPPAKKPAPDYFL

SEQ ID NO: 100564 - protein, 247 aa, Arabidopsis thaliana
  peptide (1)..(247): Ceres Seq. ID no. 13605467
MMELFKVGGDCPKTNYLFMGDFVDRGYYSVETFLLLLALKVRYPDRITLIRGNHESRQITQVYGFYDECLRKYGSSNVWRYCTDIFDYMSLSAVVENKIFCVHGGLSPAIMTLDQIRTIDRKQEVPHDGAMCDLLWSDPEDIVDGWGLSPRGAGFLFGGSVVTSFNHSNNIDYIARAHQLVMEGYKWMFDSQIVTVWSAPNYCYRCGNVASILELDENLNKEFRVFDAAQQDSRGPPAKKPAPDYFL

SEQ ID NO: 100565 - DNA, 1008 bp, Arabidopsis thaliana
  misc_feature (1)..(1008): Ceres Seq. ID no. 13605487
  misc_feature (1)..(1008): Ortholog of  Ceres SEQ ID NO 12611159 as cited in SEQ ID NO 59821
atgatgtcatgtggtgggaagaagccagtgtctaagaaaacaacgccgtgttgcacgaagatggggatgaagagaggaccatggacggtggaggaagacgagattcttgtgagcttcattaagaaagaaggtgaaggacggtggcgatcgcttcctaagagagctggtttactcagatgtggaaagagctgtcgtctacggtggatgaactatctccgaccctcggttaaacgtggaggaattacgtcggacgaggaagatctcatcctccgtcttcaccgcctcctcggcaacaggtggtcattgatcgcgggaaggataccgggaaggactgataatgaaattaagaactattggaacactcatcttcgtaagaaacttttaaggcaaggaattgatcctcaaacccacaagcctcttgatgcaaacaacatccataaaccagaagaagaagtttccggtggacaaaagtaccctctagagcctatttctagttctcatactgatgataccactgttaatggcggggatggagatagcaagaacagtatcaatgtctttggtggtgaacacggctacgaagactttggtttctgctacgacgacaagttctcatcgtttcttaattcgctcatcaacgatgttggtgatccttttggtaatattatcccaatatctcaacctttgcagatggatgattgtaaggatgggattgttggagcgtcgtcttctagcttaggacatgactagatacaggaagatatatagttgatcgaatcttgatgtcttctatatctaccatgcttcaagaaggggtcacagatgcgatctagaaggttggcatatatgtgtactaagttgttttgtggtgatttgtgtgattattataaaaccataaattgtgagtgtaactgagtacacaaacctctatttatatatatggatatatctattgcgaataaatgaatcatcactatcgttaaataagactcgtggtaagcttttgtc

SEQ ID NO: 100566 - protein, 249 aa, Arabidopsis thaliana
  peptide (1)..(249): Ceres Seq. ID no. 13605488
MMSCGGKKPVSKKTTPCCTKMGMKRGPWTVEEDEILVSFIKKEGEGRWRSLPKRAGLLRCGKSCRLRWMNYLRPSVKRGGITSDEEDLILRLHRLLGNRWSLIAGRIPGRTDNEIKNYWNTHLRKKLLRQGIDPQTHKPLDANNIHKPEEEVSGGQKYPLEPISSSHTDDTTVNGGDGDSKNSINVFGGEHGYEDFGFCYDDKFSSFLNSLINDVGDPFGNIIPISQPLQMDDCKDGIVGASSSSLGHD

SEQ ID NO: 100567 - protein, 248 aa, Arabidopsis thaliana
  peptide (1)..(248): Ceres Seq. ID no. 13605489
MSCGGKKPVSKKTTPCCTKMGMKRGPWTVEEDEILVSFIKKEGEGRWRSLPKRAGLLRCGKSCRLRWMNYLRPSVKRGGITSDEEDLILRLHRLLGNRWSLIAGRIPGRTDNEIKNYWNTHLRKKLLRQGIDPQTHKPLDANNIHKPEEEVSGGQKYPLEPISSSHTDDTTVNGGDGDSKNSINVFGGEHGYEDFGFCYDDKFSSFLNSLINDVGDPFGNIIPISQPLQMDDCKDGIVGASSSSLGHD

SEQ ID NO: 100568 - protein, 229 aa, Arabidopsis thaliana
  peptide (1)..(229): Ceres Seq. ID no. 13605490
MGMKRGPWTVEEDEILVSFIKKEGEGRWRSLPKRAGLLRCGKSCRLRWMNYLRPSVKRGGITSDEEDLILRLHRLLGNRWSLIAGRIPGRTDNEIKNYWNTHLRKKLLRQGIDPQTHKPLDANNIHKPEEEVSGGQKYPLEPISSSHTDDTTVNGGDGDSKNSINVFGGEHGYEDFGFCYDDKFSSFLNSLINDVGDPFGNIIPISQPLQMDDCKDGIVGASSSSLGHD

SEQ ID NO: 100569 - DNA, 1911 bp, Arabidopsis thaliana
  misc_feature (1)..(1911): Ceres Seq. ID no. 13605495
  misc_feature (1)..(1911): Ortholog of  Ceres SEQ ID NO 15176532 as cited in SEQ ID NO 58184
  misc_feature (1)..(1911): Ortholog of  Ceres SEQ ID NO 13597546 as cited in SEQ ID NO 65017
  misc_feature (1)..(1911): Ortholog of  Ceres SEQ ID NO 14308015 as cited in SEQ ID NO 65798
  misc_feature (1)..(1911): Ortholog of  Ceres SEQ ID NO 14307908 as cited in SEQ ID NO 67189
  misc_feature (1)..(1911): Ortholog of  Ceres SEQ ID NO 13654353 as cited in SEQ ID NO 68318
gaaagaaagtcccaaaaacaaaaaaccaattttaaaaaacacaaacccattcgtgcgtctctggctaattaagttaaaacactaatggacacttcttcttcacttttgttcttctccttcttcttctttatcatcatcgtcatcttcaacaagatcaacggtctcagatcatccccagcttcaaagaaaaaacttaatgatcatcatgttacatcccagagtcacggaccaaagtttccacacggaagcttgggatggcccgtcatcggtgaaaccatcgagttcgtctcttctgcttactcagaccgtcctgagagtttcatggacaagcgtcgtctcatgtatgggagagtgtttaagtcgcatatttttggaacggcgacgatcgtgtcgacggatgctgaagtgaacagagccgttttacagagcgactcgacagctttcgtgccgttttacccaaaaacggtaagggagctaatgggaaaatcgtcgatacttcttatcaacgggagtttacatagacggttccatggattagtcggttctttcttaaagtcgccacttctcaaagctcaaatcgttagagacatgcacaagtttttgtcggaatccatggatctatggtccgaggaccaacctgtgctcctccaagacgtctccaagactgttgcattcaaagtacttgccaaggcattgataagtgtagagaaaggagaagatttagaagagctaaagagagagtttgaaaatttcatatcaggactcatgtcattaccaattaacttccctggaacgcaactccatagatctctccaagctaagaagaatatggtgaagcaagttgaaagaatcatagaaggcaaaattaggaaaacaaagaacaaggaggaagatgatgttattgcaaaggatgttgtggatgtgttgcttaaggactcaagtgaacatttaactcacaatttgattgctaacaatatgatcgacatgatgatccctggccacgattctgtccctgtcctcattacccttgccgtcaaattcctctctgattctcctgctgccctcaatctcctaacggaagaaaacatgaagctgaaaagtttgaaggaattgacaggagagccactatattggaatgactacttgtcgttaccttttacacaaaaggtgattacagagacactgagaatgggaaatgttataattggagtgatgagaaaggcgatgaaagatgttgaaataaaaggatatgtgataccaaaaggatggtgtttcttggcctatctcagatcagttcatcttgataagctttattatgagtctccctacaaatttaatccctggagatggcaagaaagggacatgaacacgagtagtttcagtccttttggaggtggtcagagattgtgccctggtctcgatttggctcgtcttgaaacttcagtttttcttcaccatcttgtcactcgcttcagatggatagcagaagaagacacaatcataaacttcccaacggtgcatatgaagaacaaattacccatttggatcaaaagaatataaatcatttttcttaagtgaaaaatggagaatcagttttgcattatcaaactctaaaaggttaaagaagtcacacgagtgttttgtaagtgggaagtgaaaaagatagtgagacagcaaaaggtaagaaaaaaagagaacatgatggagtttggagacaaaaaatgattcacacgtgtggaagacgatagcacacatgccaactattttgtcgtattccttcacaaggcaaataaggacagaatcacaaaacctttttgttgaccgtatatatatatatatatatattttttttttttgaagtacaaaggtgtatgataattatgcatatgatatagaatcctaattttcatg

SEQ ID NO: 100570 - protein, 491 aa, Arabidopsis thaliana
  peptide (1)..(491): Ceres Seq. ID no. 13605496
MDTSSSLLFFSFFFFIIIVIFNKINGLRSSPASKKKLNDHHVTSQSHGPKFPHGSLGWPVIGETIEFVSSAYSDRPESFMDKRRLMYGRVFKSHIFGTATIVSTDAEVNRAVLQSDSTAFVPFYPKTVRELMGKSSILLINGSLHRRFHGLVGSFLKSPLLKAQIVRDMHKFLSESMDLWSEDQPVLLQDVSKTVAFKVLAKALISVEKGEDLEELKREFENFISGLMSLPINFPGTQLHRSLQAKKNMVKQVERIIEGKIRKTKNKEEDDVIAKDVVDVLLKDSSEHLTHNLIANNMIDMMIPGHDSVPVLITLAVKFLSDSPAALNLLTEENMKLKSLKELTGEPLYWNDYLSLPFTQKVITETLRMGNVIIGVMRKAMKDVEIKGYVIPKGWCFLAYLRSVHLDKLYYESPYKFNPWRWQERDMNTSSFSPFGGGQRLCPGLDLARLETSVFLHHLVTRFRWIAEEDTIINFPTVHMKNKLPIWIKRI

SEQ ID NO: 100571 - protein, 412 aa, Arabidopsis thaliana
  peptide (1)..(412): Ceres Seq. ID no. 13605497
MDKRRLMYGRVFKSHIFGTATIVSTDAEVNRAVLQSDSTAFVPFYPKTVRELMGKSSILLINGSLHRRFHGLVGSFLKSPLLKAQIVRDMHKFLSESMDLWSEDQPVLLQDVSKTVAFKVLAKALISVEKGEDLEELKREFENFISGLMSLPINFPGTQLHRSLQAKKNMVKQVERIIEGKIRKTKNKEEDDVIAKDVVDVLLKDSSEHLTHNLIANNMIDMMIPGHDSVPVLITLAVKFLSDSPAALNLLTEENMKLKSLKELTGEPLYWNDYLSLPFTQKVITETLRMGNVIIGVMRKAMKDVEIKGYVIPKGWCFLAYLRSVHLDKLYYESPYKFNPWRWQERDMNTSSFSPFGGGQRLCPGLDLARLETSVFLHHLVTRFRWIAEEDTIINFPTVHMKNKLPIWIKRI

SEQ ID NO: 100572 - protein, 406 aa, Arabidopsis thaliana
  peptide (1)..(406): Ceres Seq. ID no. 13605498
MYGRVFKSHIFGTATIVSTDAEVNRAVLQSDSTAFVPFYPKTVRELMGKSSILLINGSLHRRFHGLVGSFLKSPLLKAQIVRDMHKFLSESMDLWSEDQPVLLQDVSKTVAFKVLAKALISVEKGEDLEELKREFENFISGLMSLPINFPGTQLHRSLQAKKNMVKQVERIIEGKIRKTKNKEEDDVIAKDVVDVLLKDSSEHLTHNLIANNMIDMMIPGHDSVPVLITLAVKFLSDSPAALNLLTEENMKLKSLKELTGEPLYWNDYLSLPFTQKVITETLRMGNVIIGVMRKAMKDVEIKGYVIPKGWCFLAYLRSVHLDKLYYESPYKFNPWRWQERDMNTSSFSPFGGGQRLCPGLDLARLETSVFLHHLVTRFRWIAEEDTIINFPTVHMKNKLPIWIKRI

SEQ ID NO: 100573 - DNA, 1428 bp, Arabidopsis thaliana
  misc_feature (1)..(1428): Ceres Seq. ID no. 13605509
  misc_feature (1)..(1428): Ortholog of  Ceres SEQ ID NO 15178909 as cited in SEQ ID NO 0
atcaataaacacaaaaacaaaagaagaagagaataaacaaaagaagaaaaaaaaagtattaaaacaaaatcaataaaaagagaataaaaaatggtgggttctcacaaagcaagcggagtgcttcttgtgctactagtggttatggccaccacaatagcaaacgggacacctgttgtcgatacagcaaaaaatgcagctacagcagttgaagatacagcaaaaaatgcagctacagcagttggcggtgcagctgcatcagttggtgctaaagtaacaggtgccaaaccaggcggtgcatcacttgatgttaaagcatcaggagccaaaggagacggcaaaactgatgatagtgcggcatttgcggctgcatggaaagaagcttgtgcagcagggagcacgattacagtgccaaaaggtgagtatttggtagagagcctagagttcaaaggtccatgcaaaggtccagtcactttggaattgaatggcaattttaaggctccggctacggtcaagaccactaagcctcatgccggatggattgatttcgaaaatctcgctgatttcactttgaatggaaacaaagctatttttgacggtcaagggtccctcgcttggaaggccaatgactgcgccaaaaccggcaaatgcaactctctccctatcaacatccgattcactggtctaacaaactcaaagattaacagtattacatcaacaaacagcaagcttttccacatgaacatccttaactgcaagaacataactcttacggatatcggtattgatgcacctccggagagtctcaacaccgatggtatccacatcggaaggtccaatggagtcaacttaattggggcaaagattaaaaccggagatgactgcgtttccattggagatggtaccgaaaatctcattgttgagaacgtagaatgtggaccaggacacggaatttccattggaagtcttggaagataccctaatgaacaaccagtaaaaggagtcaccgtgaggaaatgcctcatcaagaacactgacaatggtgttcgcatcaagacatggccaggatctccccccggtatcgcctccaacattcttttcgaagatatcacaatggacaatgttagccttcccgttctcatcgaccaagagtactgtccttatggccactgcaaagctggggtaccatcgaaagtgaagttgtcagacgtgactatcaagaacattaagggaacatcagcaacaaaggtagcagtgaagctaatgtgcagcaaaggcgttccttgcaccaatattgctctctctgacatcaacttggtccacaacggcaaagagggaccagctgtctcagcatgttctaacatcaagcctattctcagcggaaagttggttccagcggcttgcactgaagtcgctaaaccgggtccttaa

SEQ ID NO: 100574 - protein, 445 aa, Arabidopsis thaliana; identical to SEQ ID NO: 84205
  peptide (1)..(445): Ceres Seq. ID no. 13605510

SEQ ID NO: 100575 - protein, 428 aa, Arabidopsis thaliana; identical to SEQ ID NO: 84206
  peptide (1)..(428): Ceres Seq. ID no. 13605511

SEQ ID NO: 100576 - protein, 230 aa, Arabidopsis thaliana; identical to SEQ ID NO: 84207
  peptide (1)..(230): Ceres Seq. ID no. 13605512

SEQ ID NO: 100577 - DNA, 1340 bp, Arabidopsis thaliana
  misc_feature (1)..(1340): Ceres Seq. ID no. 13605513
  misc_feature (1)..(1340): Ortholog of  Ceres SEQ ID NO 15171293 as cited in SEQ ID NO 51744
gtcttggtctccgacaggaccgactctgttctcgtgttcttttttccctgtcatttccagatttcataaagctaaaagatatctaatttctttgtttaccagagacttaaactggtttctgtatcttttactgggttctttcagatatataaatggatcaaatcgttaacgtggatgagtttcaagagctggccaaacaggccctccctaagatgtactatgatttctacaatggaggagcagaggatcaacacactctcaatgaaaatgtccaagctttccgtagaatcatgtttaggcctagggttcttgttgatgtgagcaacatagatatgtctacaagtatgttgggttacccaatctcagctcccatcatgattgctccaacagcaatgcataagttggctcatcctaaaggagaaatcgccacagcgaaagctgcagctgcgtgtaacactatcatgatagtatcattcatgtctacttgcactattgaggaggttgcttccagttgtaacgctgttcggtttcttcaaatatatgtgtacaagagacgtgatgtaacagctcagattgtgaaaagagctgaaaaagctggattcaaggctatagttctaactgttgatgttcccagacttggtagaagggaagcagatataaagaacaaaatgatatccccacagctgaagaattttgaaggcttagtttcaaccgaagtccgacctaatgaaggttcaggggttgaagcctttgcctctagtgcatttgatgcttcgttaagctggaaggatatcgaatggttaagatctattacaaagttgccaattctggtcaaagggttactcacacgtgaagacgctcttaaggctgttgaagccggtgtagatggaatagtggtatccaaccacggggctcgccagctcgactattccccggctacgataactgttttagaagaggttgttcatgctgtgaaaggtaggattccggttttgcttgatggaggagtaagacgaggaacagatgttttcaaagcgctggcgctcggagcacaagctgttcttatagggaggcctatagtctatgggcttgcagctaagggtgaagatggagtgaaaaaagtgattgatatgctgaaaaatgagtttgagattactatggccctttctggctgtccaaccattgatgacgtaaccagaaaccatgttaggacagagaatgagagaattaaatctatgctctgatcctaaaaccaacagatctagtctcagagacttaatcagacagttggacaacagtatgaaatactgtcaatgcacataaataaaaagctctatttc

SEQ ID NO: 100578 - protein, 363 aa, Arabidopsis thaliana; identical to SEQ ID NO: 41959
  peptide (1)..(363): Ceres Seq. ID no. 13605514

SEQ ID NO: 100579 - protein, 343 aa, Arabidopsis thaliana; identical to SEQ ID NO: 41960
  peptide (1)..(343): Ceres Seq. ID no. 13605515

SEQ ID NO: 100580 - protein, 317 aa, Arabidopsis thaliana; identical to SEQ ID NO: 41961
  peptide (1)..(317): Ceres Seq. ID no. 13605516

SEQ ID NO: 100581 - DNA, 1854 bp, Arabidopsis thaliana
  misc_feature (1)..(1854): Ceres Seq. ID no. 13605517
  misc_feature (1)..(1854): Ortholog of  Ceres SEQ ID NO 14314359 as cited in SEQ ID NO 51039
  misc_feature (1)..(1854): Ortholog of  Ceres SEQ ID NO 14316184 as cited in SEQ ID NO 54517
  misc_feature (1)..(1854): Ortholog of  Ceres SEQ ID NO 15226529 as cited in SEQ ID NO 55005
  misc_feature (1)..(1854): Ortholog of  Ceres SEQ ID NO 12616225 as cited in SEQ ID NO 68930
actctaaagcctttttcccctcttctcattctcgagctccggacttgtcttgaaaccgtgaaggaatctgtatcttttgtatgttacccattttattgtcgttaagaatcaatttagaggcaaaacgccgagaggtttgcccgggagagtgtttttacatcgatcagggtttaagcagaggttggtttgtcatttcgccagtttgcttcttcaaattcactctacgatgaagtgagaacaacaaacaaaacatagataagatagagaccttgggactgttggaagatggagtctgtgaaaccattggatgttgtttcttcaggaaaaggaaaactcagacgcacatttgctaaagtcatcaacatgaaaaagctaaccggtgttgttccagaaggtaacaacaaggttgaaagagtgaagaagagccaagaaaaggtgaagttggataaagatttagcaaagaatgctgcaaatctgtctgagtcctttgacaagctggaggaagagtatgagaaaagactggccatggaggctcttcttgcaaagctgtttgctacgatttcttcgataaaatctggttatgcgcagttgcagtatgctcagtctccttatgatccaaatgggattcagaaagcagataacttggtagtagcagagctgaagacattatcagagctgaaacagagtttcttgaagaaacagcttgatcctaatcctgatagaactcttgttcttgcggagattcaagagctaagaagcgtcttaaagacttatgagatcatggggaagaagctggagtgtcagttaaagctcaaagactctgagatcatatttctcaaagaaaagtttcaagaatccatgactcagaacaagttgatggagaagagattaaaccaaagtggccaactttgcaatccattggatcataatcttcatctatcggcggtaagttcgacccatttcgttacttatctgcaccacactgtcaaatccatccgaggattcgtcaagttgatggttgagcagatgaaactcgctgcttgggacatcgatatggctgctgagttaattcagcctgatgtactctattacaagcaagaccacaagtgttttgccttggagcattatgtctgcaagataatgcttgaagcttttcaactaccttacttctcaaacgaatcatcgaagaagacgagcagagaagacaaagcaatgttctttgagagattcacagagcttagatcgatgaaaccaagagagtatttagcatctcggcctaaatcaagattggctaagttttgcagaactaagtatttgcagctcatacatccaaagatggagcaggcattcttcggacatttgcatcaaagaaaccaagtcactgcaggggagtttccagagacgagcttgtgcactgcgtttctcgaaatggcgaaaagggtttggcttttacattgccttgctttctccttcgatcctgaagcttcaatctttcaagtatctagaggttgcagattctccgaagtgtacatgaagagcgtgtcggaggaagcgtttttctcaccggagcaagaagaaagctcgtcggaaactgaaccgggggttgcgtttacggttgttcctgggtttagaattgggaaaacgacgatacaatgtgaggtctacctctcgcgttcatgtcaacgccgtcagagcagatagattccggtgatgacgtcacaggggtattagggtaatttatcttggggaactttttgggggtaggaaaatatatgagagaaaatttgttgaccgttggattaagagaagaggcaagtatgtatgttgcttgttgagatttatggtttttatttt

SEQ ID NO: 100582 - protein, 471 aa, Arabidopsis thaliana
  peptide (1)..(471): Ceres Seq. ID no. 13605518
MESVKPLDVVSSGKGKLRRTFAKVINMKKLTGVVPEGNNKVERVKKSQEKVKLDKDLAKNAANLSESFDKLEEEYEKRLAMEALLAKLFATISSIKSGYAQLQYAQSPYDPNGIQKADNLVVAELKTLSELKQSFLKKQLDPNPDRTLVLAEIQELRSVLKTYEIMGKKLECQLKLKDSEIIFLKEKFQESMTQNKLMEKRLNQSGQLCNPLDHNLHLSAVSSTHFVTYLHHTVKSIRGFVKLMVEQMKLAAWDIDMAAELIQPDVLYYKQDHKCFALEHYVCKIMLEAFQLPYFSNESSKKTSREDKAMFFERFTELRSMKPREYLASRPKSRLAKFCRTKYLQLIHPKMEQAFFGHLHQRNQVTAGEFPETSLCTAFLEMAKRVWLLHCLAFSFDPEASIFQVSRGCRFSEVYMKSVSEEAFFSPEQEESSSETEPGVAFTVVPGFRIGKTTIQCEVYLSRSCQRRQSR

SEQ ID NO: 100583 - protein, 445 aa, Arabidopsis thaliana
  peptide (1)..(445): Ceres Seq. ID no. 13605519
MKKLTGVVPEGNNKVERVKKSQEKVKLDKDLAKNAANLSESFDKLEEEYEKRLAMEALLAKLFATISSIKSGYAQLQYAQSPYDPNGIQKADNLVVAELKTLSELKQSFLKKQLDPNPDRTLVLAEIQELRSVLKTYEIMGKKLECQLKLKDSEIIFLKEKFQESMTQNKLMEKRLNQSGQLCNPLDHNLHLSAVSSTHFVTYLHHTVKSIRGFVKLMVEQMKLAAWDIDMAAELIQPDVLYYKQDHKCFALEHYVCKIMLEAFQLPYFSNESSKKTSREDKAMFFERFTELRSMKPREYLASRPKSRLAKFCRTKYLQLIHPKMEQAFFGHLHQRNQVTAGEFPETSLCTAFLEMAKRVWLLHCLAFSFDPEASIFQVSRGCRFSEVYMKSVSEEAFFSPEQEESSSETEPGVAFTVVPGFRIGKTTIQCEVYLSRSCQRRQSR

SEQ ID NO: 100584 - protein, 391 aa, Arabidopsis thaliana
  peptide (1)..(391): Ceres Seq. ID no. 13605520
MEALLAKLFATISSIKSGYAQLQYAQSPYDPNGIQKADNLVVAELKTLSELKQSFLKKQLDPNPDRTLVLAEIQELRSVLKTYEIMGKKLECQLKLKDSEIIFLKEKFQESMTQNKLMEKRLNQSGQLCNPLDHNLHLSAVSSTHFVTYLHHTVKSIRGFVKLMVEQMKLAAWDIDMAAELIQPDVLYYKQDHKCFALEHYVCKIMLEAFQLPYFSNESSKKTSREDKAMFFERFTELRSMKPREYLASRPKSRLAKFCRTKYLQLIHPKMEQAFFGHLHQRNQVTAGEFPETSLCTAFLEMAKRVWLLHCLAFSFDPEASIFQVSRGCRFSEVYMKSVSEEAFFSPEQEESSSETEPGVAFTVVPGFRIGKTTIQCEVYLSRSCQRRQSR

SEQ ID NO: 100585 - DNA, 867 bp, Arabidopsis thaliana
  misc_feature (1)..(867): Ceres Seq. ID no. 13605521
  misc_feature (1)..(867): Ortholog of  Ceres SEQ ID NO 15175034 as cited in SEQ ID NO 62432
  misc_feature (1)..(867): Ortholog of  Ceres SEQ ID NO 12619999 as cited in SEQ ID NO 66123
  misc_feature (1)..(867): Ortholog of  Ceres SEQ ID NO 13656436 as cited in SEQ ID NO 69154
ctttttctccttttgtccgtacgcgttttcttaccggtgacctgaaagtctcaaaaaatggcggcgtatagagctgacgatgattacgatttcctctacaaggtggtattaatcggtgattccggcgtcggtaaatccaatctgctttctcgattcacgcgcaacgagttcagcctcgagtctaaatccaccatcggtgtcgaattcgccacccgaagcattcatgtcgatgaaaaaatcgtcaaggctcagatttgggacaccgccggccaagagagataccgagcaatcacaagcgcatactatcgaggagctgttggggctttgcttgtttatgatgttacacggcatgtgacatttgagaacgttgagagatggttgaaggagcttagagaccacacagaggccaacattgtgatcatgcttgttgggaataaagcggatctacgtcacctaagagctgtttcaactgaagatgctaaagcctttgcagagagagagaacacattctttatggagacatctgcacttgaagctttgaacgttgagaatgctttcactgaagtgctttctcaaatataccgtgttgcaagcaagaaggcgttggatattggtgatgatcacactactcttcctaaaggacaaagtattaatgttgggtctaaggatgatgtttctgaggttaagaaggttggatgctgctcaagttgatcttgatcaagccattttgtctgtttcttaggcaagaatatagtttgattatctatggaagacatgcagatgattctttcttgtgtttttcctttagttgcttcttttggtgtaagtttctcagatcctgttttaaatattattttttacacaatc

SEQ ID NO: 100586 - protein, 217 aa, Arabidopsis thaliana
  peptide (1)..(217): Ceres Seq. ID no. 13605522
MAAYRADDDYDFLYKVVLIGDSGVGKSNLLSRFTRNEFSLESKSTIGVEFATRSIHVDEKIVKAQIWDTAGQERYRAITSAYYRGAVGALLVYDVTRHVTFENVERWLKELRDHTEANIVIMLVGNKADLRHLRAVSTEDAKAFAERENTFFMETSALEALNVENAFTEVLSQIYRVASKKALDIGDDHTTLPKGQSINVGSKDDVSEVKKVGCCSS

SEQ ID NO: 100587 - DNA, 693 bp, Arabidopsis thaliana
  misc_feature (1)..(693): Ceres Seq. ID no. 13605535
  misc_feature (1)..(693): Ortholog of  Ceres SEQ ID NO 12557420 as cited in SEQ ID NO 15
  misc_feature (1)..(693): Ortholog of  Ceres SEQ ID NO 15224673 as cited in SEQ ID NO 0
  misc_feature (1)..(693): Ortholog of  Ceres SEQ ID NO 15227157 as cited in SEQ ID NO 0
atctttagccgccgacttggtatcatcaaatcgaggagattcgaagaagcatggtgggatttaagaacagatacatgttaatggaagtttttctggatccggacaaggatcttctcggagaaggaacaccgatcattcttacacaattcaatctctcgaaagcaatcaaagacagtatcctcgtcaatttcggcgagtgtggtctaggttcgtctctcggttccttccaagtgaaatatgtgaatccaatcacgaagctatgcattgtaagatcatcaagagaagaacacagacaagtttggttagcaatcacattggtcaaaagcatcggaaactgtccggtgatcttaaacttgctcgatattagcggttgcatcagagcgtgtagagacacagccttgaagtgcgacaaggagaagtttgagcagtgtagcaaaagcttgtctgaagaggagattaggcagatgaatacttctcttgagaagatcaaactattggaaaactgaaacttttctagaccttttttccttcgaatttgacccctaagttttgaaattgtacaatctttgtatttttcttaattctgaaatacaaagggataagaaacagcatcattccctgaaaagattgtttgcgatttgaatcactgggtttttatatgttggaattaaaataagagggtgtgaattgttg

SEQ ID NO: 100588 - protein, 151 aa, Arabidopsis thaliana
  peptide (1)..(151): Ceres Seq. ID no. 13605536
MVGFKNRYMLMEVFLDPDKDLLGEGTPIILTQFNLSKAIKDSILVNFGECGLGSSLGSFQVKYVNPITKLCIVRSSREEHRQVWLAITLVKSIGNCPVILNLLDISGCIRACRDTALKCDKEKFEQCSKSLSEEEIRQMNTSLEKIKLLEN

SEQ ID NO: 100589 - protein, 143 aa, Arabidopsis thaliana
  peptide (1)..(143): Ceres Seq. ID no. 13605537
MLMEVFLDPDKDLLGEGTPIILTQFNLSKAIKDSILVNFGECGLGSSLGSFQVKYVNPITKLCIVRSSREEHRQVWLAITLVKSIGNCPVILNLLDISGCIRACRDTALKCDKEKFEQCSKSLSEEEIRQMNTSLEKIKLLEN

SEQ ID NO: 100590 - protein, 141 aa, Arabidopsis thaliana
  peptide (1)..(141): Ceres Seq. ID no. 13605538
MEVFLDPDKDLLGEGTPIILTQFNLSKAIKDSILVNFGECGLGSSLGSFQVKYVNPITKLCIVRSSREEHRQVWLAITLVKSIGNCPVILNLLDISGCIRACRDTALKCDKEKFEQCSKSLSEEEIRQMNTSLEKIKLLEN

SEQ ID NO: 100591 - DNA, 1097 bp, Arabidopsis thaliana
  misc_feature (1)..(1097): Ceres Seq. ID no. 13605565
  misc_feature (1)..(1097): Ortholog of  Ceres SEQ ID NO 12578315 as cited in SEQ ID NO 62451
  misc_feature (1)..(1097): Ortholog of  Ceres SEQ ID NO 12617090 as cited in SEQ ID NO 64005
  misc_feature (1)..(1097): Ortholog of  Ceres SEQ ID NO 13597233 as cited in SEQ ID NO 64370
  misc_feature (1)..(1097): Ortholog of  Ceres SEQ ID NO 13584577 as cited in SEQ ID NO 65298
attttcagctaaaagcaatggagtcatcacttccccaagttgctgcacttgatcgttcaactctactcaaagctttcgacgagactaaaaccggcgtgaaaggccttatcgacgccggaatcacagagattccttcgatatttcgtgcacctccggctactttaacaagtccaaaaccaccttcctcctctgatttctccatccccacaatcgatctcaaaggaggtggcacggactcgatcacgcggcggagcttggtggagaagatcggagacgcggcagagaaatggggatttttccaggtgatcaaccacgggatcccgatggatgtgttggagaagatgatagatgggattcgtgagtttcacgagcaagacactgaagtgaagaaagggttttactctcgagatccagctagtaagatggtatacagcagcaacttcgatctgtttagctcaccggcggcgaattggagagatacacttggttgttatacagcaccagatcccccgagaccggaggacttacccgccacttgtggggagatgatgattgagtactcaaaggaagtgatgaaattgggtaaattactcttcgagcttctctcggaagctctagggttaaacactaatcacctcaaggacatggattgcactaactccttgctgttgctcggccattattacccgccatgtccccaacccgaccttactctaggcttaacgaaacactccgacaactcttttctcactattcttcttcaagaccatatcggagggcttcaagttcttcatgaccaatattgggttgatgttcctcctgtccctggagctcttgttgttaaccttataacaaacgacaagttcataagcgtggagcatagggttttggccaatgtagctggaccgagaatttcagtggcatgtttcttcagctcgtatttgatggcgaatcctcgagtttatggacccatcaaagagattttgtctgaagaaaaccctcctaattatagagacactactattacagagtatgcaaagttctacagatccaaaggattcgatggtacctctggattactctatctcaagatctga

SEQ ID NO: 100592 - protein, 364 aa, Arabidopsis thaliana
  peptide (1)..(364): Ceres Seq. ID no. 13605566
FQLKAMESSLPQVAALDRSTLLKAFDETKTGVKGLIDAGITEIPSIFRAPPATLTSPKPPSSSDFSIPTIDLKGGGTDSITRRSLVEKIGDAAEKWGFFQVINHGIPMDVLEKMIDGIREFHEQDTEVKKGFYSRDPASKMVYSSNFDLFSSPAANWRDTLGCYTAPDPPRPEDLPATCGEMMIEYSKEVMKLGKLLFELLSEALGLNTNHLKDMDCTNSLLLLGHYYPPCPQPDLTLGLTKHSDNSFLTILLQDHIGGLQVLHDQYWVDVPPVPGALVVNLITNDKFISVEHRVLANVAGPRISVACFFSSYLMANPRVYGPIKEILSEENPPNYRDTTITEYAKFYRSKGFDGTSGLLYLKI

SEQ ID NO: 100593 - protein, 359 aa, Arabidopsis thaliana
  peptide (1)..(359): Ceres Seq. ID no. 13605567
MESSLPQVAALDRSTLLKAFDETKTGVKGLIDAGITEIPSIFRAPPATLTSPKPPSSSDFSIPTIDLKGGGTDSITRRSLVEKIGDAAEKWGFFQVINHGIPMDVLEKMIDGIREFHEQDTEVKKGFYSRDPASKMVYSSNFDLFSSPAANWRDTLGCYTAPDPPRPEDLPATCGEMMIEYSKEVMKLGKLLFELLSEALGLNTNHLKDMDCTNSLLLLGHYYPPCPQPDLTLGLTKHSDNSFLTILLQDHIGGLQVLHDQYWVDVPPVPGALVVNLITNDKFISVEHRVLANVAGPRISVACFFSSYLMANPRVYGPIKEILSEENPPNYRDTTITEYAKFYRSKGFDGTSGLLYLKI

SEQ ID NO: 100594 - protein, 257 aa, Arabidopsis thaliana
  peptide (1)..(257): Ceres Seq. ID no. 13605568
MDVLEKMIDGIREFHEQDTEVKKGFYSRDPASKMVYSSNFDLFSSPAANWRDTLGCYTAPDPPRPEDLPATCGEMMIEYSKEVMKLGKLLFELLSEALGLNTNHLKDMDCTNSLLLLGHYYPPCPQPDLTLGLTKHSDNSFLTILLQDHIGGLQVLHDQYWVDVPPVPGALVVNLITNDKFISVEHRVLANVAGPRISVACFFSSYLMANPRVYGPIKEILSEENPPNYRDTTITEYAKFYRSKGFDGTSGLLYLKI

SEQ ID NO: 100595 - DNA, 1292 bp, Arabidopsis thaliana
  misc_feature (1)..(1292): Ceres Seq. ID no. 13605569
  misc_feature (1)..(1292): Ortholog of  Ceres SEQ ID NO 12636774 as cited in SEQ ID NO 372
  misc_feature (1)..(1292): Ortholog of  Ceres SEQ ID NO 12578315 as cited in SEQ ID NO 62451
  misc_feature (1)..(1292): Ortholog of  Ceres SEQ ID NO 12615466 as cited in SEQ ID NO 62761
  misc_feature (1)..(1292): Ortholog of  Ceres SEQ ID NO 13597295 as cited in SEQ ID NO 63743
  misc_feature (1)..(1292): Ortholog of  Ceres SEQ ID NO 12617090 as cited in SEQ ID NO 64005
  misc_feature (1)..(1292): Ortholog of  Ceres SEQ ID NO 13597439 as cited in SEQ ID NO 64081
  misc_feature (1)..(1292): Ortholog of  Ceres SEQ ID NO 13597233 as cited in SEQ ID NO 64370
  misc_feature (1)..(1292): Ortholog of  Ceres SEQ ID NO 13584577 as cited in SEQ ID NO 65298
  misc_feature (1)..(1292): Ortholog of  Ceres SEQ ID NO 13599438 as cited in SEQ ID NO 0
gtcttacgagagaccaaaacgatggagagcacgaagattgctccttcattcgatcgtgccagtgagcttaaagctttcgatgagacgaagactggtgtgaaaggactcgttgactctggaatctcaaagattccacgcattttccatcactcatctgtcgaactagcaaaccctaaaccacttccctcggacctgctacatctcaagacgatcccaacgatcgatctcggaggacgggacttccaggacgcgattaagcacaagaacgcgattgaagggattaaagaagcagctgccaagtggggtttcttccaagtgatcaaccatggagtttcgctcgagcttcttgagaagatgaaagatggagttcgtgactttcatgagcaacctcctgaagtgaggaaagatttgtacagccgcgatttcggcagaaagtttatctatttaagtaatttcgatctctacactgctgcagctgcgaattggagagacacattctattgttacatggctccagatcctccagaaccacaggatctgccagagatttgtagggatgttatgatggaatactcaaagcaagtgatgattttgggtgaatttctgtttgagcttttgtcagaagcactagggttgaaccctaatcacctcaaggacatggagtgcttaaagggtttgcgcatgctttgccactacttcccaccgtgtccggagcctgacctaacttttggcacaagtaagcactccgacggctcttttcttaccgtccttctaccagataacatagaagggcttcaggtttgtcgtgagggatactggttcgatgttcctcatgttcccggcgctctcatcatcaacatcggagatcttctgcagcttataacaaacgacaagttcatcagtttgaagcatagagtattggcgaacagagccacaagagctcgagtctctgtcgcatgtttcttccatacccacgtaaaaccaaatcctagagtgtacggacccattaaagagcttgtgtccgaagaaaatcctccaaagtacagagagaccaccatcagagattacgctacttacttcaatggcaaaggacttggcgggacctctgctttgctggattttaaagtatgaatcatgccgagctactactttctcacagatatacgacatgacattatatgtaacatgttggagatgtgtgaaccaaatgtggaatttatgtattgaacattgtcatcaaggtttggtccaaataaagtgtaatcggatatggttaatcaattggattacgc

SEQ ID NO: 100596 - protein, 376 aa, Arabidopsis thaliana; identical to SEQ ID NO: 23901
  peptide (1)..(376): Ceres Seq. ID no. 13605570

SEQ ID NO: 100597 - protein, 369 aa, Arabidopsis thaliana; identical to SEQ ID NO: 23902
  peptide (1)..(369): Ceres Seq. ID no. 13605571

SEQ ID NO: 100598 - protein, 258 aa, Arabidopsis thaliana; identical to SEQ ID NO: 23903
  peptide (1)..(258): Ceres Seq. ID no. 13605572

SEQ ID NO: 100599 - DNA, 1581 bp, Arabidopsis thaliana
  misc_feature (1)..(1581): Ceres Seq. ID no. 13605573
  misc_feature (1)..(1581): Ortholog of  Ceres SEQ ID NO 13597574 as cited in SEQ ID NO 64677
  misc_feature (1)..(1581): Ortholog of  Ceres SEQ ID NO 13597843 as cited in SEQ ID NO 64850
  misc_feature (1)..(1581): Ortholog of  Ceres SEQ ID NO 13597678 as cited in SEQ ID NO 65375
  misc_feature (1)..(1581): Ortholog of  Ceres SEQ ID NO 13596180 as cited in SEQ ID NO 67941
  misc_feature (1)..(1581): Ortholog of  Ceres SEQ ID NO 13591190 as cited in SEQ ID NO 68044
  misc_feature (1)..(1581): Ortholog of  Ceres SEQ ID NO 13595961 as cited in SEQ ID NO 68223
ataaagaaaaaaaagtaaagagatgaagacagcagagctcatattcgttcctctgccggagaccggccatctcttgtcaacgatcgagtttggaaagcgtctactcaatctagaccgtcggatttctatgattacaatcctctccatgaatcttccttacgctcctcacgccgacgcttctcttgcttcgctaacagcctccgagcctggtatccgaatcatcagtctcccggagatccacgatccacctccgatcaagcttcttgacacttcctccgagacttacatcctcgatttcatccataaaaacataccttgtctcagaaaaaccatccaagatttagtctcatcatcatcatcttccggaggtggtagtagtcatgtcgccggcttgattcttgatttcttctgcgttggtttgatcgacatcggccgtgaggtaaaccttccttcctatatcttcatgacttccaactttggtttcttaggggttctacagtatctcccggaacgacaacgtttgactccgtcggagttcgatgagagctccggcgaggaagagttacatattccggcgtttgtgaaccgtgttcccgccaaggttctgccgccaggtgtgttcgataaactctcttacgggtctctggtcaaaatcggcgagcgattacatgaagccaagggtattttggttaattcatttacccaagtggagccttatgctgctgaacatttttctcaaggacgagattaccctcacgtgtatcctgttgggccggttctcaacttaacgggccgtacaaatccgggtctagcttcggcccaatataaagagatgatgaagtggcttgacgagcaaccagactcgtcggttttgttcctgtgtttcgggagcatgggagtcttccctgcacctcagatcacagagattgctcacgcgctcgagcttatcgggtgcaggttcatctgggcgatccgtacgaacatggcgggagatggcgatcctcaggagccgcttccagaaggatttgtcgatcgaacaatgggccgtggaattgtgtgtagttgggctccacaagtggatatcttggcccacaaggcaacaggtggattcgtttctcactgcgggtggaattccgtccaagagagtctatggtacggtgtacctattgcaacgtggccaatgtatgcggagcaacaactgaacgcatttgagatggtgaaggagttgggcttagcagtggagataaggcttgactacgtggcggatggtgatagggttactttggagatcgtgtcagccgatgaaatagccacagccgtccgatcattgatggatagtgataaccccgtgagaaagaaggttatagaaaaatcttcagtggcgaggaaagctgttggtgatggtgggtcttctacggtggccacatgtaattttatcaaagatattcttggggatcacttttgagttttgaccatttcactttcagagcaagataattttgtaatttgtaataaaaataaacaaatgttatcaatttattatggactaaatgttaatcaacgccatttgtgcttgaagac

SEQ ID NO: 100600 - protein, 480 aa, Arabidopsis thaliana; identical to SEQ ID NO: 27630
  peptide (1)..(480): Ceres Seq. ID no. 13605574

SEQ ID NO: 100601 - protein, 445 aa, Arabidopsis thaliana; identical to SEQ ID NO: 27631
  peptide (1)..(445): Ceres Seq. ID no. 13605575

SEQ ID NO: 100602 - protein, 439 aa, Arabidopsis thaliana
  peptide (1)..(439): Ceres Seq. ID no. 13605576
MNLPYAPHADASLASLTASEPGIRIISLPEIHDPPPIKLLDTSSETYILDFIHKNIPCLRKTIQDLVSSSSSSGGGSSHVAGLILDFFCVGLIDIGREVNLPSYIFMTSNFGFLGVLQYLPERQRLTPSEFDESSGEEELHIPAFVNRVPAKVLPPGVFDKLSYGSLVKIGERLHEAKGILVNSFTQVEPYAAEHFSQGRDYPHVYPVGPVLNLTGRTNPGLASAQYKEMMKWLDEQPDSSVLFLCFGSMGVFPAPQITEIAHALELIGCRFIWAIRTNMAGDGDPQEPLPEGFVDRTMGRGIVCSWAPQVDILAHKATGGFVSHCGWNSVQESLWYGVPIATWPMYAEQQLNAFEMVKELGLAVEIRLDYVADGDRVTLEIVSADEIATAVRSLMDSDNPVRKKVIEKSSVARKAVGDGGSSTVATCNFIKDILGDHF

SEQ ID NO: 100603 - DNA, 1685 bp, Arabidopsis thaliana
  misc_feature (1)..(1685): Ceres Seq. ID no. 13605584
  misc_feature (1)..(1685): Ortholog of  Ceres SEQ ID NO 14302875 as cited in SEQ ID NO 66242
  misc_feature (1)..(1685): Ortholog of  Ceres SEQ ID NO 13660287 as cited in SEQ ID NO 67316
atctcaataaacaaacactaacaatggtggtcgaagaagattcacgtctcataaatctccaacacaagtacaacccgacaatgcccgaggtggtggaggagctgaagagaatttgggacataagttttccggtggccgccatgagcatattaaactacctaaagaacatgacatccgtcgtgtgtatgggacgactcggtagccttgagctcgcaggaggagccttagccatcggtttcaccaacatcaccggttactccgtcctctctggtttagccaccggtatggaaccattatgtggtcaagccatcggttctaaaaacccttcactcgcttccttaaccctcaagcgaaccatcttcctccttctcttagcttctcttcccatatcactcctttggctaaacctcgcgcctctaatgctgatgctccgccaacaacatgatatcactcgtgtcgcatctctctattgttccttctctttgcctgatcttctcgctaatagtttccttcatcctttacgtatttacttacgttgtaaaggcaccacttggcctttgatgtggtgcacgttagtctccgtccttcttcatcttcccattactgctttcttcacgttttacatctctctcggagttcccggagtcgccgtctcttcttttcttaccaacttcatctctttgtcgcttctcctttgctacatctacttggaaaacaacaacaacgacaaaaccacttccaagtctctttgtcttgatacgccgttgatgctgtatggttcgagagactccggtgaaaatgatgtgtggtcaacgctggttaaattcgctgttccgagctgtatagcggtttgcttggagtggtggtggtacgagttcatgacggtcctcgctggatatctccccgagccgaaggtggcgctagcagcagccgccatcgtgatacaaacaacctcattgatgtatacaatcccaacggccctctcggccgcggtatccacgagggtaagcaacgagttaggagcaggacggccagagaaagcaaaaacagcggcgactgtggctgtcggagccgccgtggcagtgtcagtgtttggacttgtggggaccaccgtggggagagaagcttggggaaaagttttcaccgccgacaaagttgtcctcgagctgacggcggcggttattccggtgattggagcttgtgagcttgccaactgtcctcagaccattagctgtggaatcttacgtggcagtgcgaggccaggtataggggccaagattaatttctacgccttctatgtagttggagcaccagtggcggttgttttagcgtttgtgtggggtttaggcttcatgggcctatgctatggcttgcttggggcacagctagcttgtgcaatctccattttgaccgttgtttataacacagattggaacaaagagtccttgaaggctcatgacttggtgggcaagaacgtcatttcacctaatgtcgatcaaattattgtcaaatgcgaagaaggcctacactaacagtttttccttctcttttctttttgttcttcatatatactatctccatttatgtctcaatgatttgcttttgttttaaaacttatacatttatgtaagtgtcttcattggacaaggacagaatgtaaaactttatgaaacacaaaactgttg

SEQ ID NO: 100604 - protein, 509 aa, Arabidopsis thaliana
  peptide (1)..(509): Ceres Seq. ID no. 13605585
LNKQTLTMVVEEDSRLINLQHKYNPTMPEVVEELKRIWDISFPVAAMSILNYLKNMTSVVCMGRLGSLELAGGALAIGFTNITGYSVLSGLATGMEPLCGQAIGSKNPSLASLTLKRTIFLLLLASLPISLLWLNLAPLMLMLRQQHDITRVASLYCSFSLPDLLANSFLHPLRIYLRCKGTTWPLMWCTLVSVLLHLPITAFFTFYISLGVPGVAVSSFLTNFISLSLLLCYIYLENNNNDKTTSKSLCLDTPLMLYGSRDSGENDVWSTLVKFAVPSCIAVCLEWWWYEFMTVLAGYLPEPKVALAAAAIVIQTTSLMYTIPTALSAAVSTRVSNELGAGRPEKAKTAATVAVGAAVAVSVFGLVGTTVGREAWGKVFTADKVVLELTAAVIPVIGACELANCPQTISCGILRGSARPGIGAKINFYAFYVVGAPVAVVLAFVWGLGFMGLCYGLLGAQLACAISILTVVYNTDWNKESLKAHDLVGKNVISPNVDQIIVKCEEGLH

SEQ ID NO: 100605 - protein, 502 aa, Arabidopsis thaliana
  peptide (1)..(502): Ceres Seq. ID no. 13605586
MVVEEDSRLINLQHKYNPTMPEVVEELKRIWDISFPVAAMSILNYLKNMTSVVCMGRLGSLELAGGALAIGFTNITGYSVLSGLATGMEPLCGQAIGSKNPSLASLTLKRTIFLLLLASLPISLLWLNLAPLMLMLRQQHDITRVASLYCSFSLPDLLANSFLHPLRIYLRCKGTTWPLMWCTLVSVLLHLPITAFFTFYISLGVPGVAVSSFLTNFISLSLLLCYIYLENNNNDKTTSKSLCLDTPLMLYGSRDSGENDVWSTLVKFAVPSCIAVCLEWWWYEFMTVLAGYLPEPKVALAAAAIVIQTTSLMYTIPTALSAAVSTRVSNELGAGRPEKAKTAATVAVGAAVAVSVFGLVGTTVGREAWGKVFTADKVVLELTAAVIPVIGACELANCPQTISCGILRGSARPGIGAKINFYAFYVVGAPVAVVLAFVWGLGFMGLCYGLLGAQLACAISILTVVYNTDWNKESLKAHDLVGKNVISPNVDQIIVKCEEGLH

SEQ ID NO: 100606 - protein, 483 aa, Arabidopsis thaliana
  peptide (1)..(483): Ceres Seq. ID no. 13605587
MPEVVEELKRIWDISFPVAAMSILNYLKNMTSVVCMGRLGSLELAGGALAIGFTNITGYSVLSGLATGMEPLCGQAIGSKNPSLASLTLKRTIFLLLLASLPISLLWLNLAPLMLMLRQQHDITRVASLYCSFSLPDLLANSFLHPLRIYLRCKGTTWPLMWCTLVSVLLHLPITAFFTFYISLGVPGVAVSSFLTNFISLSLLLCYIYLENNNNDKTTSKSLCLDTPLMLYGSRDSGENDVWSTLVKFAVPSCIAVCLEWWWYEFMTVLAGYLPEPKVALAAAAIVIQTTSLMYTIPTALSAAVSTRVSNELGAGRPEKAKTAATVAVGAAVAVSVFGLVGTTVGREAWGKVFTADKVVLELTAAVIPVIGACELANCPQTISCGILRGSARPGIGAKINFYAFYVVGAPVAVVLAFVWGLGFMGLCYGLLGAQLACAISILTVVYNTDWNKESLKAHDLVGKNVISPNVDQIIVKCEEGLH

SEQ ID NO: 100607 - DNA, 872 bp, Arabidopsis thaliana
  misc_feature (1)..(872): Ceres Seq. ID no. 13605599
  misc_feature (1)..(872): Ortholog of  Ceres SEQ ID NO 12609037 as cited in SEQ ID NO 51306
  misc_feature (1)..(872): Ortholog of  Ceres SEQ ID NO 12610391 as cited in SEQ ID NO 55942
  misc_feature (1)..(872): Ortholog of  Ceres SEQ ID NO 14309068 as cited in SEQ ID NO 0
cgaaacaaaaactcgtggaggagatatgcaattgctgacgctaaatccggcggccatttccaggacgccgccgcaagccatagacccttcctcatcctcgagtcttcttcttccttttcctcagattttgagctcccaacgcgctcttggtcttgtagctaggccttgtaatccacttcgacgaggattatctaggtttttatcaagtcgacagcttttccgacgatccaaagttgtcaaggcagtagcaaccccagaccccatcttggaagtacctttaactgaggaaaatgtagaaagcgttttggatgaaatccgaccttaccttatgtctgatggtggtaatgtggcattacatgagatcgatggaaatattgtgcgggttaagctgcagggagcatgcggatcatgtccaagttctactatgacaatgaagatgggtattgagcgtcgtctaatggaaaagatccctgaaatagtggctgtagaagctcttccagatgaagagactggccttgaactgaatgaggaaaacattgaaaaggtgctggaagaaatcaggccttacttaatcggaacagcagatggatcgcttgatctagtggagattgaagatccaatcgtgaagataagaatcacaggacctgcagctggagtcatgacagttcgtgtagcagtcactcagaaactaagagagaaaattccatcaatcgcagctgttcaacttatatagaaacaacaactcttcttgtatgctttgtattagctcccttgtatagttgttgtgcatagattatgtgttttgttgacatttgctatttgtcctcaaataagttttcaacatttttgttttacttagaaaaaaagtcctt

SEQ ID NO: 100608 - protein, 243 aa, Arabidopsis thaliana; identical to SEQ ID NO: 38446
  peptide (1)..(243): Ceres Seq. ID no. 13605600

SEQ ID NO: 100609 - protein, 235 aa, Arabidopsis thaliana; identical to SEQ ID NO: 38447
  peptide (1)..(235): Ceres Seq. ID no. 13605601

SEQ ID NO: 100610 - protein, 134 aa, Arabidopsis thaliana; identical to SEQ ID NO: 38448
  peptide (1)..(134): Ceres Seq. ID no. 13605602

SEQ ID NO: 100611 - DNA, 2261 bp, Arabidopsis thaliana
  misc_feature (1)..(2261): Ceres Seq. ID no. 13605611
  misc_feature (1)..(2261): Ortholog of  Ceres SEQ ID NO 15176963 as cited in SEQ ID NO 52894
aaaacagagaattaaagaatcgatttagaccaaattgtatgtgattcgttcggacaagaagcgatgatgaggggatctcggtttctcctctctcgcgcttctctgtatcaccgtcttcgctctgatcatcaccatcacagtttctccagttttatcaaacgtagctcaattcagagatcaccagctatcaatgcattcttcaccgatccatctccatctccatctccagtcaacgcacgagtcttcttcttctcaacttcaacttcaactccaaatcaagatcaaaccaaaacagcatcatctaagaagatcctccgcacgatttcaagctatctatggatgaaagacaacccagaactccgattcagagtcatcgctgctttagcgtgtctcataggagctaagttcttgaatgttcaagttcctttcctcttcaaattatctatcgatttactctcttcatattcatcttcaacaatcactgattcaaatccttatctacttgctgctttcgctactccttcttccgttctcattggctatggcattgctcgatctggatcttcagcttttaacgagcttcgtactgctgttttctccaaagtatctctccgcacaatacgatctgtttctcgtaaagtgctctcgcatttacatgatcttgatcttcgttaccatttgaatcgagaaacaggagctttgaatagaatcattgaccgtggaagtcgcgcgattaacacgatcctctctgctatggttttcaatgttgttccaacgatcttggagatatcaatggtcacaggtatattagcatacaattttggacctgtttttgctttgatcacttctctttccgttggatcatacatagctttcacattggttgtgacacagtatagaactaagtttagaaaagctatgaaccaagctgataatgatgcaagcacaagagctattgattctcttgtaaactacgagactgttaagtattttaacaacgaagattacgaagcgagaaagtacgatgatttactcggaagatatgaagatgctgcattgcaaactcagaagagtcttgcgtttttagattttggacagagttttatatttagtacagctttgtcaacatcaatggtgttgtgttctcaagggattatgaatggagagatgacagttggtgatttggtgatggtgaatggtcttctctttcaattgtctcttcctctttactttctcggtggtgtttaccgtgaaaccgttcagggtcttgttgatatgaaatcattgttccagttgctagaggagagatccgatattggagataaagatacagagacaaagctacctcctcttgttctgagaggtggaagcatcagttttgagaatgtacattttagttatctgccagagagaaagattttggatgggatttcatttgaggtaccggcagggaaaagtgtagcgattgttggtagtagcggaagcggcaaatcgacgattcttagaatgattttcaggttctttgacacagattctggtaatgttaggattgatggtcaagatataaaggaagtgacactagagagtcttcgaagctgcattggagttgtccctcaagatactgtgctcttcaatgacacaatatttcacaacattcactatggaaacctttcagcaacagaagaagaggtgtacgatgcagctaggcgagcagtgattcacgatacgatcatgaaatttccggataaatattcgaccgcggtgggagaaagagggctgatgctgagtggtggagaaaaacaaagagtggcacttgctcgtgcctttctgaaatcaccagcgattctcttgtgtgacgaagcaacgaatgcgcttgatagtaaaaccgaggcagagataatgaaaacgttcaggtcgctagcgagtaacagaacatgcattttcattgcacataggctgaccactgcgatgcaatgtgatgagataatagtaatggagaaagggaaagtggtggaaaaagggacacaccaagtgttgttggagaaatctggcagatacgctaaattatggacacaacaaaacagtacactggaggtgtgaatctcaagagctagacagctagtgtttgggttctgttttcgcctcactaattctttttttttgctgacttcccttatttttggaatcatatatttgcaaatatcattgatggtactttgtagccttgttacaaaaaataaaacatatttgtaacctaatat

SEQ ID NO: 100612 - protein, 678 aa, Arabidopsis thaliana
  peptide (1)..(678): Ceres Seq. ID no. 13605612
MMRGSRFLLSRASLYHRLRSDHHHHSFSSFIKRSSIQRSPAINAFFTDPSPSPSPVNARVFFFSTSTSTPNQDQTKTASSKKILRTISSYLWMKDNPELRFRVIAALACLIGAKFLNVQVPFLFKLSIDLLSSYSSSTITDSNPYLLAAFATPSSVLIGYGIARSGSSAFNELRTAVFSKVSLRTIRSVSRKVLSHLHDLDLRYHLNRETGALNRIIDRGSRAINTILSAMVFNVVPTILEISMVTGILAYNFGPVFALITSLSVGSYIAFTLVVTQYRTKFRKAMNQADNDASTRAIDSLVNYETVKYFNNEDYEARKYDDLLGRYEDAALQTQKSLAFLDFGQSFIFSTALSTSMVLCSQGIMNGEMTVGDLVMVNGLLFQLSLPLYFLGGVYRETVQGLVDMKSLFQLLEERSDIGDKDTETKLPPLVLRGGSISFENVHFSYLPERKILDGISFEVPAGKSVAIVGSSGSGKSTILRMIFRFFDTDSGNVRIDGQDIKEVTLESLRSCIGVVPQDTVLFNDTIFHNIHYGNLSATEEEVYDAARRAVIHDTIMKFPDKYSTAVGERGLMLSGGEKQRVALARAFLKSPAILLCDEATNALDSKTEAEIMKTFRSLASNRTCIFIAHRLTTAMQCDEIIVMEKGKVVEKGTHQVLLEKSGRYAKLWTQQNSTLEV

SEQ ID NO: 100613 - protein, 677 aa, Arabidopsis thaliana
  peptide (1)..(677): Ceres Seq. ID no. 13605613
MRGSRFLLSRASLYHRLRSDHHHHSFSSFIKRSSIQRSPAINAFFTDPSPSPSPVNARVFFFSTSTSTPNQDQTKTASSKKILRTISSYLWMKDNPELRFRVIAALACLIGAKFLNVQVPFLFKLSIDLLSSYSSSTITDSNPYLLAAFATPSSVLIGYGIARSGSSAFNELRTAVFSKVSLRTIRSVSRKVLSHLHDLDLRYHLNRETGALNRIIDRGSRAINTILSAMVFNVVPTILEISMVTGILAYNFGPVFALITSLSVGSYIAFTLVVTQYRTKFRKAMNQADNDASTRAIDSLVNYETVKYFNNEDYEARKYDDLLGRYEDAALQTQKSLAFLDFGQSFIFSTALSTSMVLCSQGIMNGEMTVGDLVMVNGLLFQLSLPLYFLGGVYRETVQGLVDMKSLFQLLEERSDIGDKDTETKLPPLVLRGGSISFENVHFSYLPERKILDGISFEVPAGKSVAIVGSSGSGKSTILRMIFRFFDTDSGNVRIDGQDIKEVTLESLRSCIGVVPQDTVLFNDTIFHNIHYGNLSATEEEVYDAARRAVIHDTIMKFPDKYSTAVGERGLMLSGGEKQRVALARAFLKSPAILLCDEATNALDSKTEAEIMKTFRSLASNRTCIFIAHRLTTAMQCDEIIVMEKGKVVEKGTHQVLLEKSGRYAKLWTQQNSTLEV

SEQ ID NO: 100614 - protein, 586 aa, Arabidopsis thaliana
  peptide (1)..(586): Ceres Seq. ID no. 13605614
MKDNPELRFRVIAALACLIGAKFLNVQVPFLFKLSIDLLSSYSSSTITDSNPYLLAAFATPSSVLIGYGIARSGSSAFNELRTAVFSKVSLRTIRSVSRKVLSHLHDLDLRYHLNRETGALNRIIDRGSRAINTILSAMVFNVVPTILEISMVTGILAYNFGPVFALITSLSVGSYIAFTLVVTQYRTKFRKAMNQADNDASTRAIDSLVNYETVKYFNNEDYEARKYDDLLGRYEDAALQTQKSLAFLDFGQSFIFSTALSTSMVLCSQGIMNGEMTVGDLVMVNGLLFQLSLPLYFLGGVYRETVQGLVDMKSLFQLLEERSDIGDKDTETKLPPLVLRGGSISFENVHFSYLPERKILDGISFEVPAGKSVAIVGSSGSGKSTILRMIFRFFDTDSGNVRIDGQDIKEVTLESLRSCIGVVPQDTVLFNDTIFHNIHYGNLSATEEEVYDAARRAVIHDTIMKFPDKYSTAVGERGLMLSGGEKQRVALARAFLKSPAILLCDEATNALDSKTEAEIMKTFRSLASNRTCIFIAHRLTTAMQCDEIIVMEKGKVVEKGTHQVLLEKSGRYAKLWTQQNSTLEV

SEQ ID NO: 100615 - DNA, 785 bp, Arabidopsis thaliana
  misc_feature (1)..(785): Ceres Seq. ID no. 13605623
  misc_feature (1)..(785): Ortholog of  Ceres SEQ ID NO 14311693 as cited in SEQ ID NO 51239
  misc_feature (1)..(785): Ortholog of  Ceres SEQ ID NO 13661954 as cited in SEQ ID NO 61182
ataattagccctcatcactcaatttctcaatctcagattataattccacaaacgaacaagaagaagaagaagaacacaagataacaatggagagtaacaacaacgagaagaagaaagttgcaagacaatcatcatccttcagactacgtagcccaagcctaaacgcacttcgtctccaacgaatcttcgacttattcgacaaaaacggcgacggattcataaccgtcgaagagctaagccaagctctaacacgtcttggtctcaacgctgatctctccgatctcaaatccaccgttgaatcatacatccaacctggtaacactggtctcaatttcgatgatttctcttctcttcacaaaacactcgacgattctttcttcggtggagcttgtggaggaggagaaaacgaagatgatccttcttccgcagctgaaaatgaatcggatctcgccgaggcgtttaaggtgtttgatgagaacggtgatggattcatctccgctagagaactgcaaactgttctgaagaaacttggtttacctgaaggtggagaaatggagagagtggagaagatgatcgtttccgttgaccggaatcaagatggtcgcgttgacttttttgaattcaagaacatgatgcgtactgttgtcatcccttcttcttgattctccaaaaaaaacattttttctccaaaagattattatttttactttttgtcttttaagtttgtattttttccagtttatgtaatgattgattcaaacattataaacaaataaattttttct

SEQ ID NO: 100616 - protein, 191 aa, Arabidopsis thaliana
  peptide (1)..(191): Ceres Seq. ID no. 13605624
MESNNNEKKKVARQSSSFRLRSPSLNALRLQRIFDLFDKNGDGFITVEELSQALTRLGLNADLSDLKSTVESYIQPGNTGLNFDDFSSLHKTLDDSFFGGACGGGENEDDPSSAAENESDLAEAFKVFDENGDGFISARELQTVLKKLGLPEGGEMERVEKMIVSVDRNQDGRVDFFEFKNMMRTVVIPSS

SEQ ID NO: 100617 - DNA, 2983 bp, Arabidopsis thaliana
  misc_feature (1)..(2983): Ceres Seq. ID no. 13605633
  misc_feature (1)..(2983): Ortholog of  Ceres SEQ ID NO 13582534 as cited in SEQ ID NO 57409
atatattattgacagaaataaaatcggttacgtaaggttcacacattacacaaaacatgtccgatatctccaatggaaataaactctcatacttttctcaagaaagagtgaaaaacaaaaaacttggtttagagaaatgagaggtttaccaaatttctaccattcttacaccttcttcttcttcttcctcttaattctgttccctgcttactctatctctgccaacactttgtcggcttcagaatctctaactatctcaagcaataacaccattgtgtctcctggtaatgtcttcgagcttggtttcttcaaacccggtttagattctcgttggtatcttggaatttggtacaaggcaatctctaagagaacctacgtatgggttgcaaacagagacactcctctctctagttccatcggaactctcaaaatctccgacagtaatcttgtcgttttggatcagtccgatacaccggtttggtcgacgaatctgaccggaggagatgtgagatctccattggtggcagagcttcttgataatggtaattttgtgctcagagactccaagaacagcgctccagatggagttttgtggcagagttttgattttccgacagatactttacttccggagatgaaacttggctgggatgccaaaaccgggttcaacagattcattagatcatggaaatctccagatgatccatcaagtggagatttctcgttcaaactcgaaaccgaaggcttccctgagatttttctatggaacagagaatcacgaatgtaccggagtggtccatggaatggaatccggtttagtggtgtaccggagatgcaaccatttgaatacatggttttcaatttcactacgagtaaagaagaagtgacttactcatttagaatcactaaaagcgacgtttactcgagattaagcataagctcctcaggattgttacaaagattcacttggattgagacagcacagaattggaaccaattctggtacgcaccaaaagaccaatgtgatgagtacaaagagtgtggtgtttacggttattgcgactcgaacacttcacctgtttgtaattgtattaaagggtttaagccgaggaatcctcaagtgtggggattgagagacgggtcggatggttgcgtgaggaagacgctactgagctgtggtggcggagatgggtttgtgcggttgaagaaaatgaaattgccggatactaccacggctagtgtggacagaggaattggtgtgaaagaatgtgaacagaagtgtttaagagattgtaattgcacggcgtttgcgaatacggatatccggggtagcgggtcgggttgtgtgacttggaccggagagctttttgatatcaggaattatgccaaaggtggtcaagatctttacgttagattggctgctactgatctcgaggacaaaagaaacagaagtgcaaaaatcataggttcgagtattggagtgagcgttttgcttcttttaagtttcattatcttcttcttgtggaaaaggaagcagaagcgatcaatactaatcgaaacacctattgttgatcatcaactgagaagccgagatttgctaatgaacgaagttgtaatatcaagtaggagacacatatctagagaaaacaatacagacgatctcgaattgccattgatggagtttgaagaagttgccatggccacaaacaatttttctaacgccaacaagctaggacaaggtggttttggtatagtttataagggaaagttacttgatggtcaagaaatggcagtgaagagactatcaaagacatcagttcaggggactgatgagttcaagaatgaggtaaagttgattgcaaggcttcagcacataaaccttgttaggcttcttgcatgttgcgtcgatgcgggtgagaagatgttgatttacgagtacttggaaaatctaagcctcgactctcatctatttgacaaatcccgaaactctaagctaaattggcaaatgagatttgatatcatcaatggtattgctcgaggacttctatatcttcaccaagattcacggtttagaattatccatagagacttgaaagcaagtaacatcttgcttgataaatatatgactccaaagatctcggatttcggaatggctaggatctttggacgggatgagacagaagctaatacgaggaaggtggttggaacctacggttatatgtctcctgaatatgcaatggacgggatattctcgatgaagtcagatgttttcagttttggggtcttgcttcttgagattataagtagcaagaggaacaaaggattctacaattcggaccgtgaccttaaccttctcggttgtgtgtggaggaattggaaagaaggaaaagggctagagatcatagatccaatcatcacagattcttcatcaacattcaggcaacatgaaatcttaagatgcatacaaattggcctcttgtgtgttcaagaacgtgcagaggacagaccaactatgtccttggtaattttgatgctcggaagcgaatcaacaactattcctcaacctaaagcgcccggttattgcctggagagaagtcttcttgacactgattcttcgtcgagtaaacagcgcgacgatgaatcatggacagtgaaccaaattactgtctcggtccttgatgctcggtaatgtgactgtcaactagccaatcttctatactaagatgactaaattgagcgacaataagaatcaactaggaaagatggtattagttatgtgcatagtattttctctgtacgtctccgttgcaaaggttactacatgattcaattgtcttaattaagcatgtattctgtaattgctttatggataacccaaatagtcctgcagttataggacatcaatgtgatattttgaaagattctcagactttcatattataaattatggctactagaagaggcaaatattgttggttagtag

SEQ ID NO: 100618 - protein, 850 aa, Arabidopsis thaliana
  peptide (1)..(850): Ceres Seq. ID no. 13605634
MRGLPNFYHSYTFFFFFLLILFPAYSISANTLSASESLTISSNNTIVSPGNVFELGFFKPGLDSRWYLGIWYKAISKRTYVWVANRDTPLSSSIGTLKISDSNLVVLDQSDTPVWSTNLTGGDVRSPLVAELLDNGNFVLRDSKNSAPDGVLWQSFDFPTDTLLPEMKLGWDAKTGFNRFIRSWKSPDDPSSGDFSFKLETEGFPEIFLWNRESRMYRSGPWNGIRFSGVPEMQPFEYMVFNFTTSKEEVTYSFRITKSDVYSRLSISSSGLLQRFTWIETAQNWNQFWYAPKDQCDEYKECGVYGYCDSNTSPVCNCIKGFKPRNPQVWGLRDGSDGCVRKTLLSCGGGDGFVRLKKMKLPDTTTASVDRGIGVKECEQKCLRDCNCTAFANTDIRGSGSGCVTWTGELFDIRNYAKGGQDLYVRLAATDLEDKRNRSAKIIGSSIGVSVLLLLSFIIFFLWKRKQKRSILIETPIVDHQLRSRDLLMNEVVISSRRHISRENNTDDLELPLMEFEEVAMATNNFSNANKLGQGGFGIVYKGKLLDGQEMAVKRLSKTSVQGTDEFKNEVKLIARLQHINLVRLLACCVDAGEKMLIYEYLENLSLDSHLFDKSRNSKLNWQMRFDIINGIARGLLYLHQDSRFRIIHRDLKASNILLDKYMTPKISDFGMARIFGRDETEANTRKVVGTYGYMSPEYAMDGIFSMKSDVFSFGVLLLEIISSKRNKGFYNSDRDLNLLGCVWRNWKEGKGLEIIDPIITDSSSTFRQHEILRCIQIGLLCVQERAEDRPTMSLVILMLGSESTTIPQPKAPGYCLERSLLDTDSSSSKQRDDESWTVNQITVSVLDAR

SEQ ID NO: 100619 - protein, 684 aa, Arabidopsis thaliana
  peptide (1)..(684): Ceres Seq. ID no. 13605635
MKLGWDAKTGFNRFIRSWKSPDDPSSGDFSFKLETEGFPEIFLWNRESRMYRSGPWNGIRFSGVPEMQPFEYMVFNFTTSKEEVTYSFRITKSDVYSRLSISSSGLLQRFTWIETAQNWNQFWYAPKDQCDEYKECGVYGYCDSNTSPVCNCIKGFKPRNPQVWGLRDGSDGCVRKTLLSCGGGDGFVRLKKMKLPDTTTASVDRGIGVKECEQKCLRDCNCTAFANTDIRGSGSGCVTWTGELFDIRNYAKGGQDLYVRLAATDLEDKRNRSAKIIGSSIGVSVLLLLSFIIFFLWKRKQKRSILIETPIVDHQLRSRDLLMNEVVISSRRHISRENNTDDLELPLMEFEEVAMATNNFSNANKLGQGGFGIVYKGKLLDGQEMAVKRLSKTSVQGTDEFKNEVKLIARLQHINLVRLLACCVDAGEKMLIYEYLENLSLDSHLFDKSRNSKLNWQMRFDIINGIARGLLYLHQDSRFRIIHRDLKASNILLDKYMTPKISDFGMARIFGRDETEANTRKVVGTYGYMSPEYAMDGIFSMKSDVFSFGVLLLEIISSKRNKGFYNSDRDLNLLGCVWRNWKEGKGLEIIDPIITDSSSTFRQHEILRCIQIGLLCVQERAEDRPTMSLVILMLGSESTTIPQPKAPGYCLERSLLDTDSSSSKQRDDESWTVNQITVSVLDAR

SEQ ID NO: 100620 - protein, 635 aa, Arabidopsis thaliana
  peptide (1)..(635): Ceres Seq. ID no. 13605636
MYRSGPWNGIRFSGVPEMQPFEYMVFNFTTSKEEVTYSFRITKSDVYSRLSISSSGLLQRFTWIETAQNWNQFWYAPKDQCDEYKECGVYGYCDSNTSPVCNCIKGFKPRNPQVWGLRDGSDGCVRKTLLSCGGGDGFVRLKKMKLPDTTTASVDRGIGVKECEQKCLRDCNCTAFANTDIRGSGSGCVTWTGELFDIRNYAKGGQDLYVRLAATDLEDKRNRSAKIIGSSIGVSVLLLLSFIIFFLWKRKQKRSILIETPIVDHQLRSRDLLMNEVVISSRRHISRENNTDDLELPLMEFEEVAMATNNFSNANKLGQGGFGIVYKGKLLDGQEMAVKRLSKTSVQGTDEFKNEVKLIARLQHINLVRLLACCVDAGEKMLIYEYLENLSLDSHLFDKSRNSKLNWQMRFDIINGIARGLLYLHQDSRFRIIHRDLKASNILLDKYMTPKISDFGMARIFGRDETEANTRKVVGTYGYMSPEYAMDGIFSMKSDVFSFGVLLLEIISSKRNKGFYNSDRDLNLLGCVWRNWKEGKGLEIIDPIITDSSSTFRQHEILRCIQIGLLCVQERAEDRPTMSLVILMLGSESTTIPQPKAPGYCLERSLLDTDSSSSKQRDDESWTVNQITVSVLDAR

SEQ ID NO: 100621 - DNA, 1796 bp, Arabidopsis thaliana
  misc_feature (1)..(1796): Ceres Seq. ID no. 13605637
  misc_feature (1)..(1796): Ortholog of  Ceres SEQ ID NO 14309674 as cited in SEQ ID NO 55707
  misc_feature (1)..(1796): Ortholog of  Ceres SEQ ID NO 13658728 as cited in SEQ ID NO 66270
  misc_feature (1)..(1796): Ortholog of  Ceres SEQ ID NO 12465428 as cited in SEQ ID NO 68898
gaatctttgactatcttcttcgccggaaccgatgaatatactgagacgaattccggcgaatttgattgcgagcagatattactacactaacagagtaaaaaagacgacactttactcaaaaatcagtcctttaggagacccaaaatcaagtgtttacccagaactccaaaactgggttcaatgcggtaaaaaagtctctgttgctgaacttattcgcatcgttcacgatcttcgtagacgcaaacgcttcctccacgctctcgaggtttcgaaatggatgaatgagactggtgtatgtgtgttctctccgacagaacacgcggttcatcttgatcttattggtagagtttatggatttgtcactgcagaagagtattttgagaatcttaaggaacagtataagaatgataagacttatggagctcttttgaattgttacgttaggcaacagaatgttgagaagtctctgttgcattttgagaagatgaaggagatgggttttgttacttcgtctcttacttacaataacattatgtgtctttacacgaatattggtcagcacgagaaagttcctaaggttttggaggagatgaaggaagagaatgttgctccggataactatagttataggatatgtattaatgcttttggtgctatgtatgatcttgagaggattggtgggaccttgagagatatggagagacgacaggatattactatggattggaacacttatgcggttgcggctaagttttatattgatggtggtgattgtgatagagcggttgagcttttgaagatgtcggagaatagattggagaagaaagatggtgaaggttacaatcatctcattacgctttatgctaggttagggaagaagatagaggttttaaggttatgggatttggagaaagatgtgtgtaaaaggagaataaatcaggactatcttactgtgttgcagtcgcttgtgaagattgatgctttagttgaggctgaggaagtacttacggaatggaaatcatcggggaactgttatgattttcgagtgcctaacactgtgattcgtggttacattggaaaaagtatggaggagaaggcagaagcgatgcttgaagatttagcaagaagagggaaagctactacaccagaatcttgggaacttgtggctactgcttatgcggaaaagggtactttagaaaatgctttcaagtgtatgaaaactgccttaggtgtagaagtgggtagcagaaaatggagacctggattgacgctggttacaagtgttttgagttgggtcggggatgaaggaagtttgaaagaagtagaaagctttgttgcatctcttaggaattgtatcggtgtgaacaaacagatgtatcatgctcttgtcaaggctgatataagagaaggcggacgtaacattgatactctgttgcagcgtatgaaagatgacaaaattgaaatcgatgaagaaaccacagtgattctcagcacaagaagtccatgctaaaagtttcttattcttccttgacgtgatgataccaaagatgtcttctgagacaaggatttaggaatgtgatttcttaacggttgagtcttccttcagcaatacttattagtaccaaatgtaccaaaattttattttgttaagaacactctctagactctgttttcatagcatctatagaacagtctacaagagaatcctctgttcttttttcaaatgcagtgtactatcatattgaatcagcagaaggcaaagttagagctttggcaatttggttccatttttattg

SEQ ID NO: 100622 - protein, 492 aa, Arabidopsis thaliana
  peptide (1)..(492): Ceres Seq. ID no. 13605638
MNILRRIPANLIASRYYYTNRVKKTTLYSKISPLGDPKSSVYPELQNWVQCGKKVSVAELIRIVHDLRRRKRFLHALEVSKWMNETGVCVFSPTEHAVHLDLIGRVYGFVTAEEYFENLKEQYKNDKTYGALLNCYVRQQNVEKSLLHFEKMKEMGFVTSSLTYNNIMCLYTNIGQHEKVPKVLEEMKEENVAPDNYSYRICINAFGAMYDLERIGGTLRDMERRQDITMDWNTYAVAAKFYIDGGDCDRAVELLKMSENRLEKKDGEGYNHLITLYARLGKKIEVLRLWDLEKDVCKRRINQDYLTVLQSLVKIDALVEAEEVLTEWKSSGNCYDFRVPNTVIRGYIGKSMEEKAEAMLEDLARRGKATTPESWELVATAYAEKGTLENAFKCMKTALGVEVGSRKWRPGLTLVTSVLSWVGDEGSLKEVESFVASLRNCIGVNKQMYHALVKADIREGGRNIDTLLQRMKDDKIEIDEETTVILSTRSPC

SEQ ID NO: 100623 - protein, 410 aa, Arabidopsis thaliana
  peptide (1)..(410): Ceres Seq. ID no. 13605639
MNETGVCVFSPTEHAVHLDLIGRVYGFVTAEEYFENLKEQYKNDKTYGALLNCYVRQQNVEKSLLHFEKMKEMGFVTSSLTYNNIMCLYTNIGQHEKVPKVLEEMKEENVAPDNYSYRICINAFGAMYDLERIGGTLRDMERRQDITMDWNTYAVAAKFYIDGGDCDRAVELLKMSENRLEKKDGEGYNHLITLYARLGKKIEVLRLWDLEKDVCKRRINQDYLTVLQSLVKIDALVEAEEVLTEWKSSGNCYDFRVPNTVIRGYIGKSMEEKAEAMLEDLARRGKATTPESWELVATAYAEKGTLENAFKCMKTALGVEVGSRKWRPGLTLVTSVLSWVGDEGSLKEVESFVASLRNCIGVNKQMYHALVKADIREGGRNIDTLLQRMKDDKIEIDEETTVILSTRSPC

SEQ ID NO: 100624 - protein, 341 aa, Arabidopsis thaliana
  peptide (1)..(341): Ceres Seq. ID no. 13605640
MKEMGFVTSSLTYNNIMCLYTNIGQHEKVPKVLEEMKEENVAPDNYSYRICINAFGAMYDLERIGGTLRDMERRQDITMDWNTYAVAAKFYIDGGDCDRAVELLKMSENRLEKKDGEGYNHLITLYARLGKKIEVLRLWDLEKDVCKRRINQDYLTVLQSLVKIDALVEAEEVLTEWKSSGNCYDFRVPNTVIRGYIGKSMEEKAEAMLEDLARRGKATTPESWELVATAYAEKGTLENAFKCMKTALGVEVGSRKWRPGLTLVTSVLSWVGDEGSLKEVESFVASLRNCIGVNKQMYHALVKADIREGGRNIDTLLQRMKDDKIEIDEETTVILSTRSPC

SEQ ID NO: 100625 - DNA, 1277 bp, Arabidopsis thaliana
  misc_feature (1)..(1277): Ceres Seq. ID no. 13605667
  misc_feature (1)..(1277): Ortholog of  Ceres SEQ ID NO 14304176 as cited in SEQ ID NO 56343
acttttcttttcctcatcataaaaaacattctcagagcaaatttcaagtttatttcattcaatttcgatccgagtaaccatggagtgtagatcattggatctgacgattatatctgcggaggatctcaaagacgttcaattgatcggtaaacaagacttgtacgccgtcgtttccatcaacggcgacgctaggacgaagcagaagacaaaggttgataaagattgcggcaccaaacctaaatggaagcatcaaatgaagctcaccgtcgatgacgcagcggcgcgtgacaatcgtcttactcttgttttcgagatcgtggcggatcgtcccatcgctggtgataaacctgtcggtgaggttagcgttccggtgaaggagcttttggatcagaataaaggtgacgaggagaaaacggttacttacgccgtgaggttgcctaacgggaaggcgaaaggatctctcaaattctcgttcaaatttggggaaaagtatacttatggatcttcgagtggtcctcacgcgccggtcccttcggctatggatcataagactatggatcagcccgtcaccgcttacccgcccggacacggtgcaccgtctgcataccctgctcctcccgcgggtccttcttccggatatccaccacaaggacatgacgataagcacgatggtgtttatggatacccgcagcaggctggatatccagctggaaccggtggttatccgccacctggtgcatacccacaacagggaggttaccctggatatccgcctcagcaacagggtggatacccgggttatccgccacagggtccatatggttacccgcaacaaggttatccaccacagggtccatacggttacccgcaacagcaagctcatggtaaaccgcagaaaccgaagaagcatggtaaggctggagctggaatgggactaggacttgggcttggagctggtttattgggtgggttgttggttggtgaagcggtttctgacatcgctgatatgggtgacatgggtgacatgggtgacatgggtggtttcgatttctgattgctgtgttatcaagttttaatttcttaggataattgctctaatgtttttcgtttgatgaatcatgtgaagaacgtgagagatcaagttttatcttgtgtttatgtctccggttacttattttcttctaatgaatgtaacattatgatatttccaatctctggctgttgaatagaatgcaatgaaacattggaaatatagtgttgactttgtcacctttatt

SEQ ID NO: 100626 - protein, 324 aa, Arabidopsis thaliana
  peptide (1)..(324): Ceres Seq. ID no. 13605668
MECRSLDLTIISAEDLKDVQLIGKQDLYAVVSINGDARTKQKTKVDKDCGTKPKWKHQMKLTVDDAAARDNRLTLVFEIVADRPIAGDKPVGEVSVPVKELLDQNKGDEEKTVTYAVRLPNGKAKGSLKFSFKFGEKYTYGSSSGPHAPVPSAMDHKTMDQPVTAYPPGHGAPSAYPAPPAGPSSGYPPQGHDDKHDGVYGYPQQAGYPAGTGGYPPPGAYPQQGGYPGYPPQQQGGYPGYPPQGPYGYPQQGYPPQGPYGYPQQQAHGKPQKPKKHGKAGAGMGLGLGLGAGLLGGLLVGEAVSDIADMGDMGDMGDMGGFDF

SEQ ID NO: 100627 - protein, 266 aa, Arabidopsis thaliana
  peptide (1)..(266): Ceres Seq. ID no. 13605669
MKLTVDDAAARDNRLTLVFEIVADRPIAGDKPVGEVSVPVKELLDQNKGDEEKTVTYAVRLPNGKAKGSLKFSFKFGEKYTYGSSSGPHAPVPSAMDHKTMDQPVTAYPPGHGAPSAYPAPPAGPSSGYPPQGHDDKHDGVYGYPQQAGYPAGTGGYPPPGAYPQQGGYPGYPPQQQGGYPGYPPQGPYGYPQQGYPPQGPYGYPQQQAHGKPQKPKKHGKAGAGMGLGLGLGAGLLGGLLVGEAVSDIADMGDMGDMGDMGGFDF

SEQ ID NO: 100628 - protein, 171 aa, Arabidopsis thaliana
  peptide (1)..(171): Ceres Seq. ID no. 13605670
MDHKTMDQPVTAYPPGHGAPSAYPAPPAGPSSGYPPQGHDDKHDGVYGYPQQAGYPAGTGGYPPPGAYPQQGGYPGYPPQQQGGYPGYPPQGPYGYPQQGYPPQGPYGYPQQQAHGKPQKPKKHGKAGAGMGLGLGLGAGLLGGLLVGEAVSDIADMGDMGDMGDMGGFDF

SEQ ID NO: 100629 - DNA, 2115 bp, Arabidopsis thaliana
  misc_feature (1)..(2115): Ceres Seq. ID no. 13605671
  misc_feature (1)..(2115): Ortholog of  Ceres SEQ ID NO 12465083 as cited in SEQ ID NO 68239
acaaacgagatcgaagaagagttctcaacaacgaaaaatgatttttatcaaggaaaacacagcgaagatgacgaggaacaaagctattgcgtgtttggtttttctgactgtgcttgattttttaatgaatattggagcagctttgatgtcaagtttggcaatagaaggcgaagagcagaaactggggacggtgatagggatcgatctagggactacatattcatgtgttggtgtctatcataacaaacatgtggaaatcatagcaaacgatcaaggaaacagaattacaccatcttgggttgcatttactgataccgaacgtctcatcggggaagctgctaagaatcaagcagccaagaacccggagcgaaccatcttcgacccgaaacgtctgattggaagaaaatttgatgatcctgatgtacaaagggatatcaaattcttgccatacaaggttgtgaacaaagatgggaagccttacattcaagtgaaggttaaaggtgaagagaaattgtttagccctgaggaaataagtgctatgatactaaccaagatgaaagaaacagctgaagctttcttgggaaagaagattaaagatgctgtgatcacggttccagcgtatttcaatgatgcgcagaggcaagccacaaaggatgcaggggcaatcgcggggcttaacgtggttcgtataatcaatgagccaacgggtgctgccatagcttatggtttagacaaaaaaggtggggagtcaaacattctcgtatatgatcttggtggtggaacattcgatgttagtatccttaccatagacaatggagtctttgaagtcttatccacaagtggagacactcaccttggtggagaagattttgaccacagagtgatggactatttcatcaaacttgtcaagaagaagtataacaaagacattagcaaggatcacaaagcccttggtaaacttaggcgtgaatgtgagcttgcgaaacgatctttgagcaaccagcaccaagtccgtgttgagattgagtcgctctttgatggagttgatttctctgagcctttaacgagagcaagattcgaggaactcaacatggatttgttcaagaagactatggagccagtgaagaaggctcttaaagatgcgggtttgaagaaatctgatatcgacgagattgttcttgttggaggaagcactcgaatcccaaaagttcagcagatgttaaaggatttcttcgacggcaaggaacccagcaaagggactaaccctgatgaggctgtggcctatggcgccgcggtccaaggtggagtattaagtggtgaaggtggagaagaaacacaaaatattctactgcttgatgttgcgcctttgagtctcggtattgaaactgtcggaggcgtgatgacaaacattattccgaggaacacggtgatcccaacgaagaagtctcaggtgttcactacttaccaagatcagcaaactactgtgactatcaacgtctacgaaggcgagagaagcatgacgaaagataaccgcgagcttggaaaattcgatctcacaggcattcttcctgcacccaggggagtgccacagattgaggtgactttcgaagtggacgcaaatgggatcctgcaggtgaaagctgaagacaaagttgctaagacgtcacaatcgattacaataacgaacgataaaggtcgtttgacagaagaagagattgaggaaatgatcagagaagcagaggagtttgctgaggaagataagattatgaaggagaagattgatgcgaggaacaagcttgaaacgtatgtgtacaacatgaaaagtacagtggccgataaggagaagcttgcgaagaagataagtgatgaagataaagagaagatggaaggggttttgaaggaggctttggagtggttagaagagaatgtgaatgcagagaaggaagattatgatgagaaactgaaggaggtggagttggtttgtgacccggttattaagtcggtttacgagaaaaccgagggagagaatgaggacacgatggagatgatcacgatgagttatagaatcgtataattgaaggtcttttgagtcggttagctataggatttgcagct

SEQ ID NO: 100630 - protein, 690 aa, Arabidopsis thaliana
  peptide (1)..(690): Ceres Seq. ID no. 13605672
QTRSKKSSQQRKMIFIKENTAKMTRNKAIACLVFLTVLDFLMNIGAALMSSLAIEGEEQKLGTVIGIDLGTTYSCVGVYHNKHVEIIANDQGNRITPSWVAFTDTERLIGEAAKNQAAKNPERTIFDPKRLIGRKFDDPDVQRDIKFLPYKVVNKDGKPYIQVKVKGEEKLFSPEEISAMILTKMKETAEAFLGKKIKDAVITVPAYFNDAQRQATKDAGAIAGLNVVRIINEPTGAAIAYGLDKKGGESNILVYDLGGGTFDVSILTIDNGVFEVLSTSGDTHLGGEDFDHRVMDYFIKLVKKKYNKDISKDHKALGKLRRECELAKRSLSNQHQVRVEIESLFDGVDFSEPLTRARFEELNMDLFKKTMEPVKKALKDAGLKKSDIDEIVLVGGSTRIPKVQQMLKDFFDGKEPSKGTNPDEAVAYGAAVQGGVLSGEGGEETQNILLLDVAPLSLGIETVGGVMTNIIPRNTVIPTKKSQVFTTYQDQQTTVTINVYEGERSMTKDNRELGKFDLTGILPAPRGVPQIEVTFEVDANGILQVKAEDKVAKTSQSITITNDKGRLTEEEIEEMIREAEEFAEEDKIMKEKIDARNKLETYVYNMKSTVADKEKLAKKISDEDKEKMEGVLKEALEWLEENVNAEKEDYDEKLKEVELVCDPVIKSVYEKTEGENEDTMEMITMSYRIV

SEQ ID NO: 100631 - protein, 678 aa, Arabidopsis thaliana
  peptide (1)..(678): Ceres Seq. ID no. 13605673
MIFIKENTAKMTRNKAIACLVFLTVLDFLMNIGAALMSSLAIEGEEQKLGTVIGIDLGTTYSCVGVYHNKHVEIIANDQGNRITPSWVAFTDTERLIGEAAKNQAAKNPERTIFDPKRLIGRKFDDPDVQRDIKFLPYKVVNKDGKPYIQVKVKGEEKLFSPEEISAMILTKMKETAEAFLGKKIKDAVITVPAYFNDAQRQATKDAGAIAGLNVVRIINEPTGAAIAYGLDKKGGESNILVYDLGGGTFDVSILTIDNGVFEVLSTSGDTHLGGEDFDHRVMDYFIKLVKKKYNKDISKDHKALGKLRRECELAKRSLSNQHQVRVEIESLFDGVDFSEPLTRARFEELNMDLFKKTMEPVKKALKDAGLKKSDIDEIVLVGGSTRIPKVQQMLKDFFDGKEPSKGTNPDEAVAYGAAVQGGVLSGEGGEETQNILLLDVAPLSLGIETVGGVMTNIIPRNTVIPTKKSQVFTTYQDQQTTVTINVYEGERSMTKDNRELGKFDLTGILPAPRGVPQIEVTFEVDANGILQVKAEDKVAKTSQSITITNDKGRLTEEEIEEMIREAEEFAEEDKIMKEKIDARNKLETYVYNMKSTVADKEKLAKKISDEDKEKMEGVLKEALEWLEENVNAEKEDYDEKLKEVELVCDPVIKSVYEKTEGENEDTMEMITMSYRIV

SEQ ID NO: 100632 - protein, 668 aa, Arabidopsis thaliana
  peptide (1)..(668): Ceres Seq. ID no. 13605674
MTRNKAIACLVFLTVLDFLMNIGAALMSSLAIEGEEQKLGTVIGIDLGTTYSCVGVYHNKHVEIIANDQGNRITPSWVAFTDTERLIGEAAKNQAAKNPERTIFDPKRLIGRKFDDPDVQRDIKFLPYKVVNKDGKPYIQVKVKGEEKLFSPEEISAMILTKMKETAEAFLGKKIKDAVITVPAYFNDAQRQATKDAGAIAGLNVVRIINEPTGAAIAYGLDKKGGESNILVYDLGGGTFDVSILTIDNGVFEVLSTSGDTHLGGEDFDHRVMDYFIKLVKKKYNKDISKDHKALGKLRRECELAKRSLSNQHQVRVEIESLFDGVDFSEPLTRARFEELNMDLFKKTMEPVKKALKDAGLKKSDIDEIVLVGGSTRIPKVQQMLKDFFDGKEPSKGTNPDEAVAYGAAVQGGVLSGEGGEETQNILLLDVAPLSLGIETVGGVMTNIIPRNTVIPTKKSQVFTTYQDQQTTVTINVYEGERSMTKDNRELGKFDLTGILPAPRGVPQIEVTFEVDANGILQVKAEDKVAKTSQSITITNDKGRLTEEEIEEMIREAEEFAEEDKIMKEKIDARNKLETYVYNMKSTVADKEKLAKKISDEDKEKMEGVLKEALEWLEENVNAEKEDYDEKLKEVELVCDPVIKSVYEKTEGENEDTMEMITMSYRIV

SEQ ID NO: 100633 - DNA, 1421 bp, Arabidopsis thaliana
  misc_feature (1)..(1421): Ceres Seq. ID no. 13605684
  misc_feature (1)..(1421): Ortholog of  Ceres SEQ ID NO 13597574 as cited in SEQ ID NO 64677
  misc_feature (1)..(1421): Ortholog of  Ceres SEQ ID NO 12617417 as cited in SEQ ID NO 65089
  misc_feature (1)..(1421): Ortholog of  Ceres SEQ ID NO 13597678 as cited in SEQ ID NO 65375
  misc_feature (1)..(1421): Ortholog of  Ceres SEQ ID NO 12779098 as cited in SEQ ID NO 67698
  misc_feature (1)..(1421): Ortholog of  Ceres SEQ ID NO 13596180 as cited in SEQ ID NO 67941
  misc_feature (1)..(1421): Ortholog of  Ceres SEQ ID NO 13591190 as cited in SEQ ID NO 68044
  misc_feature (1)..(1421): Ortholog of  Ceres SEQ ID NO 13595961 as cited in SEQ ID NO 68223
  misc_feature (1)..(1421): Ortholog of  Ceres SEQ ID NO 13596089 as cited in SEQ ID NO 68373
atggagttagaaaaagttcacgtggttttgttcccatacttgtccaaagggcacatgattcctatgctccaattagctcgtctcctcttatcccactccttcgccggagacatctccgtcaccgtcttcaccactcctttgaaccgtcctttcatcgttgactcactctccggcaccaaagcgaccatcgtcgacgtacctttccctgataacgtcccggagatcccacccggcgtcgagtgcactgacaaactccctgctttgtcgtcctccctcttcgttcctttcacaagagccaccaagtcaatgcaggcagactttgagcgagagctcatgtcactgccacgtgtcagtttcatggtctcagacggtttcttgtggtggacgcaagagtcagctcgaaagctagggtttcctcggcttgttttctttggtatgaattgcgcttccaccgttatatgtgacagtgtttttcaaaaccagcttctatctaatgttaagtccgagacggagccagtttctgtaccggagtttccgtggattaaggttaggaaatgtgatttcgttaaagatatgtttgatccaaaaaccaccacagatcctggattcaagcttatcctagatcaagtcacgtctatgaatcaaagccaaggtatcatattcaatacatttgacgaccttgaacccgtgtttattgatttctacaagcgtaaacgcaaactcaagctttgggcagttggaccgctttgttacgtaaataacttcttggatgatgaagtagaagagaaggtcaaacctagttggatgaaatggctagatgaaaagcgagacaagggatgcaatgttctgtatgtggctttcgggtcacaagccgagatctcgagagaacaactagaggagattgcgttagggttggaagaatcgaaggtgaacttcttgtgggtggtcaaaggaaatgaaataggaaaagggtttgaagagagagtgggagaaagaggaatgatggtgagagatgaatgggttgatcagaggaagatattagagcacgagagtgttagagggttcttgagccattgtgggtggaattctctgacggagagcatttgctcggaggttccaatcttggcgtttcctttagcagcggagcaacctctgaatgcgattttggtggtggaagagctgagagtggcggagagagtggtggcggcgagtgaaggggttgtgagaagagaagagattgcagagaaagtgaaggagttgatggagggagagaaagggaaagagctgaggaggaatgtcgaggcatatggtaagatggcgaagaaggctttggaggaaggtattggttcgtctaggaagaatttagacaaccttatcaacgagttttgtaacaatggaacatgatgatgtatgttaacacc

SEQ ID NO: 100634 - protein, 467 aa, Arabidopsis thaliana
  peptide (1)..(467): Ceres Seq. ID no. 13605685
MELEKVHVVLFPYLSKGHMIPMLQLARLLLSHSFAGDISVTVFTTPLNRPFIVDSLSGTKATIVDVPFPDNVPEIPPGVECTDKLPALSSSLFVPFTRATKSMQADFERELMSLPRVSFMVSDGFLWWTQESARKLGFPRLVFFGMNCASTVICDSVFQNQLLSNVKSETEPVSVPEFPWIKVRKCDFVKDMFDPKTTTDPGFKLILDQVTSMNQSQGIIFNTFDDLEPVFIDFYKRKRKLKLWAVGPLCYVNNFLDDEVEEKVKPSWMKWLDEKRDKGCNVLYVAFGSQAEISREQLEEIALGLEESKVNFLWVVKGNEIGKGFEERVGERGMMVRDEWVDQRKILEHESVRGFLSHCGWNSLTESICSEVPILAFPLAAEQPLNAILVVEELRVAERVVAASEGVVRREEIAEKVKELMEGEKGKELRRNVEAYGKMAKKALEEGIGSSRKNLDNLINEFCNNGT

SEQ ID NO: 100635 - protein, 449 aa, Arabidopsis thaliana
  peptide (1)..(449): Ceres Seq. ID no. 13605686
MIPMLQLARLLLSHSFAGDISVTVFTTPLNRPFIVDSLSGTKATIVDVPFPDNVPEIPPGVECTDKLPALSSSLFVPFTRATKSMQADFERELMSLPRVSFMVSDGFLWWTQESARKLGFPRLVFFGMNCASTVICDSVFQNQLLSNVKSETEPVSVPEFPWIKVRKCDFVKDMFDPKTTTDPGFKLILDQVTSMNQSQGIIFNTFDDLEPVFIDFYKRKRKLKLWAVGPLCYVNNFLDDEVEEKVKPSWMKWLDEKRDKGCNVLYVAFGSQAEISREQLEEIALGLEESKVNFLWVVKGNEIGKGFEERVGERGMMVRDEWVDQRKILEHESVRGFLSHCGWNSLTESICSEVPILAFPLAAEQPLNAILVVEELRVAERVVAASEGVVRREEIAEKVKELMEGEKGKELRRNVEAYGKMAKKALEEGIGSSRKNLDNLINEFCNNGT

SEQ ID NO: 100636 - protein, 446 aa, Arabidopsis thaliana
  peptide (1)..(446): Ceres Seq. ID no. 13605687
MLQLARLLLSHSFAGDISVTVFTTPLNRPFIVDSLSGTKATIVDVPFPDNVPEIPPGVECTDKLPALSSSLFVPFTRATKSMQADFERELMSLPRVSFMVSDGFLWWTQESARKLGFPRLVFFGMNCASTVICDSVFQNQLLSNVKSETEPVSVPEFPWIKVRKCDFVKDMFDPKTTTDPGFKLILDQVTSMNQSQGIIFNTFDDLEPVFIDFYKRKRKLKLWAVGPLCYVNNFLDDEVEEKVKPSWMKWLDEKRDKGCNVLYVAFGSQAEISREQLEEIALGLEESKVNFLWVVKGNEIGKGFEERVGERGMMVRDEWVDQRKILEHESVRGFLSHCGWNSLTESICSEVPILAFPLAAEQPLNAILVVEELRVAERVVAASEGVVRREEIAEKVKELMEGEKGKELRRNVEAYGKMAKKALEEGIGSSRKNLDNLINEFCNNGT

SEQ ID NO: 100637 - DNA, 596 bp, Arabidopsis thaliana
  misc_feature (1)..(596): Ceres Seq. ID no. 13605691
  misc_feature (1)..(596): Ortholog of  Ceres SEQ ID NO 12612527 as cited in SEQ ID NO 52588
tgaagagagcgagatggcaacggcgtcgtttaggtggatcttgcagctccacagagacgtaccaaaagcggctcgattctatgagaaaggtctcgatttctccgtcaatgtcgttaccttacgttgggctgaacttcagtcaggtcccctcaagctagctcttatgcaagctcccagcgagcatgtgatgagtgagaaaggatactcttcgttactatcgttcactgtagcagacattaatacaacaatctctaaacttatggaattaggagctgaactcgatggctctatcaaatatgaagtccatggcaaggttgcttctgtgagatgtcttgatggtcatgtgctcggactctatgaaccttcatgagttttctattcagttcggattatgtggatttgattttgtttttttcgatccgattttggttgaataatgtttcaaaattttgctaatcggatgtttggtaaggacttagctctaagacaaatgtaaatctaatatatccggcgcagaaaagtcgttaattgattgttcaactaatcgtctagacattcgatctattaaagacaggggagatatgttttacaaattt

SEQ ID NO: 100638 - protein, 122 aa, Arabidopsis thaliana
  peptide (1)..(122): Ceres Seq. ID no. 13605692
EESEMATASFRWILQLHRDVPKAARFYEKGLDFSVNVVTLRWAELQSGPLKLALMQAPSEHVMSEKGYSSLLSFTVADINTTISKLMELGAELDGSIKYEVHGKVASVRCLDGHVLGLYEPS

SEQ ID NO: 100639 - protein, 118 aa, Arabidopsis thaliana; identical to SEQ ID NO: 28436
  peptide (1)..(118): Ceres Seq. ID no. 13605693

SEQ ID NO: 100640 - protein, 68 aa, Arabidopsis thaliana; identical to SEQ ID NO: 28437
  peptide (1)..(68): Ceres Seq. ID no. 13605694

SEQ ID NO: 100641 - DNA, 1146 bp, Arabidopsis thaliana
  misc_feature (1)..(1146): Ceres Seq. ID no. 13605703
  misc_feature (1)..(1146): Ortholog of  Ceres SEQ ID NO 13599030 as cited in SEQ ID NO 0
ttttctctcaatcctccaattcccaaatttcaacaacaagacgaagcaaacgatgtggattgaaatcatctgcggtctcgtcatctacaaactcgtccgccgtttcttctacgacgacgaattctccgacgtcgaaacttccgattccactgctctcttctccgttgctcacagacttgagaaactttatggtggaaaagcttatgtaggacttcgaattccagatgccgacactgcttctagacaagacattgatgttgttcttgttactaaaggagatgttgtagtgatttctgtgaagaatctatcggggattgttacggtaactagtgatggtagctgggtttgtgaaggtggcaagcatcatactactgagactttccctgatcctctggcggaggtcaagaaacaagcttcagttcttgaatcatatcttgaacagaggggagttactttactagaaggaaatgtgtcttgcaaagttgtcattcccaatccaagttttcgtacaattcatgcattcccgagtgaggtaattacctatgaagattggcaacagctaaaaccagtatcaaaaagtaaaatttctggttgggttaaaggcgcattcagcaccggaaaagagatgcaggaatcttcgcatcaaaaacttaatttcatccttggcacagcaccaacgtgggatagagtggagcttaaaagtagcaaaattgtgttaggggaattcctcgagtttaaaggaaagcaggaagataccctggctttaagaaatatcaaaaggtcaaaagtcgaccgtgtctctattcagaaaacaagcatgtttggattagctccttcgaggttgcaggttctgtattcgtatagggactacagaagtgaaggcagttcaggggcagagtcgaaagaagtgactgtcaggtcgagcactgaggttctgtttcagccacgagactccacaaagatgaagaaattcaagctatcgtcgcttgtctccatttcactaagtgcctaactatgaagtgagcttattagcatgcagcagaggaagttgtcaatgtttattgtaacaattacattgtccatgactgaagtaagcttatgttattctcaagagtattgacctctttatggaaatgttttcttcgt

SEQ ID NO: 100642 - protein, 336 aa, Arabidopsis thaliana
  peptide (1)..(336): Ceres Seq. ID no. 13605704
FLSILQFPNFNNKTKQTMWIEIICGLVIYKLVRRFFYDDEFSDVETSDSTALFSVAHRLEKLYGGKAYVGLRIPDADTASRQDIDVVLVTKGDVVVISVKNLSGIVTVTSDGSWVCEGGKHHTTETFPDPLAEVKKQASVLESYLEQRGVTLLEGNVSCKVVIPNPSFRTIHAFPSEVITYEDWQQLKPVSKSKISGWVKGAFSTGKEMQESSHQKLNFILGTAPTWDRVELKSSKIVLGEFLEFKGKQEDTLALRNIKRSKVDRVSIQKTSMFGLAPSRLQVLYSYRDYRSEGSSGAESKEVTVRSSTEVLFQPRDSTKMKKFKLSSLVSISLSA

SEQ ID NO: 100643 - protein, 319 aa, Arabidopsis thaliana
  peptide (1)..(319): Ceres Seq. ID no. 13605705
MWIEIICGLVIYKLVRRFFYDDEFSDVETSDSTALFSVAHRLEKLYGGKAYVGLRIPDADTASRQDIDVVLVTKGDVVVISVKNLSGIVTVTSDGSWVCEGGKHHTTETFPDPLAEVKKQASVLESYLEQRGVTLLEGNVSCKVVIPNPSFRTIHAFPSEVITYEDWQQLKPVSKSKISGWVKGAFSTGKEMQESSHQKLNFILGTAPTWDRVELKSSKIVLGEFLEFKGKQEDTLALRNIKRSKVDRVSIQKTSMFGLAPSRLQVLYSYRDYRSEGSSGAESKEVTVRSSTEVLFQPRDSTKMKKFKLSSLVSISLSA

SEQ ID NO: 100644 - DNA, 1212 bp, Arabidopsis thaliana
  misc_feature (1)..(1212): Ceres Seq. ID no. 13605706
  misc_feature (1)..(1212): Ortholog of  Ceres SEQ ID NO 13656155 as cited in SEQ ID NO 64609
aaaaacttgcaaaactctcgtccgagatatatcgactccgcgaccctccactactctgctgatctacacacacacacaaaaaaaaaaaaactcaatcgccagcaacaatggcgaagctcacacttctcttcttcctttcctttctcatcttctcctcatccatcgctttccaatcagacgagctcctcgttgacgacgacgaatttggtctagaaggagcaaagccccgctccaccgatctttacacatcttcttcttcttcgccacagcagcagcaacagactccaactatccggagaagatactcagatcctaccgatttggattcaaaagtccaatttactctcgaacatgccttcggtgactctgatttctcccccgccggtactttctccgctcgtctcaaaacctggagtcatggcggaaagacattaacgaagctgcgattctctagaaatgatttttctgctgaagagaaagatgcattcaagaatctgctgaaaggagatgacttttatcggattcggcttccatctaatgtggttagtccaccagggagagagtttgtgattgcatcagtgagagctagatgtctaccacgggatggcttggatgagcatttcattatacacatggaaggtgctaacatcttggcagttagttatggttctcctggggcgtgtcaatatcctcgccaattgaaacttccagcaaaatggtcgtttaactctcacacaattctgaaaagcagtgagcaggcgccaagaactccaatattcactgaggagattctaggcagtgagaatgtagagggagaagttgaaccaccaccagagagatcattttgggcgaaatattggatgtatttgataccgctgggactcgtagtgatgaatgccgtgacacaagcatcaaacatggctgaagaacctgcgggtggacaggcaggaggtgcacaagtgcaaccagctgccaggagaagatgattccacttttacttctcccaaagcaatgaaagctgcagctggttagagatgatgattcaacagatcttcatgtaaaccatcttgccatcatttggttttatgtaacctttaattttaatcctcgatcggtgtgtttttgtactcaccaatcgggaaatcaaaaatcttgtcttcatgacatatcaagaacaaagacatttagcagcttccatatcttgttttgatc

SEQ ID NO: 100645 - protein, 292 aa, Arabidopsis thaliana
  peptide (1)..(292): Ceres Seq. ID no. 13605707
MAKLTLLFFLSFLIFSSSIAFQSDELLVDDDEFGLEGAKPRSTDLYTSSSSSPQQQQQTPTIRRRYSDPTDLDSKVQFTLEHAFGDSDFSPAGTFSARLKTWSHGGKTLTKLRFSRNDFSAEEKDAFKNLLKGDDFYRIRLPSNVVSPPGREFVIASVRARCLPRDGLDEHFIIHMEGANILAVSYGSPGACQYPRQLKLPAKWSFNSHTILKSSEQAPRTPIFTEEILGSENVEGEVEPPPERSFWAKYWMYLIPLGLVVMNAVTQASNMAEEPAGGQAGGAQVQPAARRR

SEQ ID NO: 100646 - DNA, 1253 bp, Arabidopsis thaliana
  misc_feature (1)..(1253): Ceres Seq. ID no. 13605708
  misc_feature (1)..(1253): Ortholog of  Ceres SEQ ID NO 13596891 as cited in SEQ ID NO 62868
  misc_feature (1)..(1253): Ortholog of  Ceres SEQ ID NO 12617235 as cited in SEQ ID NO 63990
  misc_feature (1)..(1253): Ortholog of  Ceres SEQ ID NO 13655371 as cited in SEQ ID NO 68945
acactcgtcttaccaaactctctcctacacaaccaaaaccatctctttgcaacaaaacttgttgtaactcatcttcttcttcttcttctccatcacagactcataacaaatgggagaagtttcagtggtggagaacaagaaagtgatactaaagaattatgtagatggtattcctacagaaacagacatggaagtgaaactcggagaaacaattgagctaaaagcaccaaaaggatcttcttgtttcctcgtcaaaaatctatacttgtcttgtgatccttacatgagaggtcgtatgcgtgattttcacggttcctatctcccgccttttgttcctggccaacgtatcgaagggtttggtttagcaagagtgatagattctgatgatactaattataagcccggcgatatagtctctggtatcattggttgggaagaatacagtttgctacgtagttcagataacctacagttgagaaatattcagttagacgacgacattccgctttcttatcatctcggacttctcgggatggctggatttacagcatatgcagggtttaatgagatatgttgtcctaagaaaggggacagtgtttttgtctctgcagcatgtggagcagttggacaacttgttggtcagctagctaagttgcacggctgctatgttgttggtagcgccggtagtaagcaaaaggttgagatccttaaaaacgagcttggatatgatgaagcctttaactacaaggaagaggctgatcttgatactgctttgaagaggtacttcccggaggggatagatatctacttcgataacgtgggtggatccatgcttgatgcagcgctcctcaacatgaaggtacgtggaagaatcgcgctctgtggaatggtgtctttgcaaagcctctcaacttcatcacaaggaatcaagaacctatacagcgctatctacaaacgtttaaggttagaagggttcttgcagagcgattaccttcatatcttcccacagtttcttgaaaatgtcaagagatattacaaagaaggcaagattgtctacgtcgaagatatatctgaaggcctcgacctcgctcccgctgcacttgttgggctgttttccgggaaaaatatcggtaaacaggttgttcgggttgctaaagagtgattgtttctgaaagtatattgcaagtgatttaagaacatacattggatgaaataaagccactataagtctcttatggaaaaacgttagttaa

SEQ ID NO: 100647 - protein, 350 aa, Arabidopsis thaliana; identical to SEQ ID NO: 77649
  peptide (1)..(350): Ceres Seq. ID no. 13605709

SEQ ID NO: 100648 - protein, 324 aa, Arabidopsis thaliana; identical to SEQ ID NO: 77650
  peptide (1)..(324): Ceres Seq. ID no. 13605710

SEQ ID NO: 100649 - protein, 292 aa, Arabidopsis thaliana; identical to SEQ ID NO: 77651
  peptide (1)..(292): Ceres Seq. ID no. 13605711

SEQ ID NO: 100650 - DNA, 650 bp, Arabidopsis thaliana
  misc_feature (1)..(650): Ceres Seq. ID no. 13605712
  misc_feature (1)..(650): Ortholog of  Ceres SEQ ID NO 13585616 as cited in SEQ ID NO 63719
aaaaacacacgccggagagttttctaagaacaacagtgacgaaaaggtttttagggtttctttaccaatcagaatctccgccaagtaacgattttcagattccgaagcagcaaagttcaaataatttccgaactgtaacatggcggcaactactggacttgagactctcgtcgatcagattatttcggtgattacaaatgacggacgcaacattgtgggagttcttaaaggttttgaccaggctacaaatataatccttgatgaatctcatgaacgtgtgttttccacaaaggaaggagtacaacaacatgtgttgggtttgtacatcatcagaggggacaacataggtgttatcggggagctggacgaggagcttgatgctagtctggatttttcgaagctgagagcccatccgttgaaacccgtagtgcattgattgaatatagttatggtgagaaaatctaattctctcattcaaagcctaaaaacaaagagaagatttgattgtaaacaatttggatagtttgttttgatgtctggagttgtcttatttgtgtatcctaaggacaaaagctatatgatattttatgtcttaaacgttttggtcggaaacttaaatcatacaatcttttggacggacctaggtttgc

SEQ ID NO: 100651 - protein, 98 aa, Arabidopsis thaliana; identical to SEQ ID NO: 21579
  peptide (1)..(98): Ceres Seq. ID no. 13605713

SEQ ID NO: 100652 - protein, 62 aa, Arabidopsis thaliana; identical to SEQ ID NO: 21580
  peptide (1)..(62): Ceres Seq. ID no. 13605714

SEQ ID NO: 100653 - DNA, 1560 bp, Arabidopsis thaliana
  misc_feature (1)..(1560): Ceres Seq. ID no. 13605720
  misc_feature (1)..(1560): Ortholog of  Ceres SEQ ID NO 13654928 as cited in SEQ ID NO 62546
ttaaaaaaaaaaaaaaaaaaacagaacaatttcttcttcctctgggatccataagttttgagattttggtggtcagtgtctgatggagtgtaatgcaaagccaccgtttcaatgggaattggaaaacttgatatcttttggcacttctacagctgaagttcctagaaagctaaaaccaatggagtgggaaattgatggatttgattgcacctctctgtattcttcaagctttgcctatgctggtagttcaggttctgatatagctcatgctttctctaaaagctcaaagtcaacttccattagctcttcatcagctgaagtaagaacacacaattttacatccgaaactggtgaaagtcttcctggagaatttgcaaaggggattgatacttctccaagtcttgaactttcttttggctctggtgatccggttctcggtttaaagcttggtaaacgaacgtactttgaagacttttgggaagtggagaatgctaaaggtttgggacttccagtgactctggcttcatcttctgtttctcccgtgaagaaatcgaaatccattcctcagaggttacaaactcctcactgtcaagttgaaggctgtaatcttgatctttcatcagctaaagactatcatcggaaacataggatttgtgaaaatcattcaaagtttcctaaagtcgttgtgagtggcgtagagcgtcggttctgccaacaatgtagcaggttccactgtctctctgagtttgatgagaagaaacgtagctgtcgccgacgtctctcagatcacaatgcaagacgtcgcaagccaaatcctggaaggacatatgatgggaaaccacaggtggattttgtatggaacagatttgcacttatccatccaagaagtgaggaaaagtttatatggccaagttcgaagcacgtaccatcaagagtgttaatgccgcaacctgcaaagactgagatttccgataccgagcacaatagatttggattgttggaccccaaaaccaaaaccgcaagagccgagttattcagtaaagaaaaggtcacaatctcttcacacatgggtgcttctcaagatcttgatggtgctctctctcttctgtcaaattcaacaacatgggtttcttcctctgaccaaccaaggcgttttacccttgatcaccatccctcaagcaacctccaacccgtagctcaccggtctgcggctcaactcaattcagtttccggctattggcagccggacccacccgcagttgaaggcccgaccgctctgcatagaaatggggtaggccagtttaatgaaaactacttcagcttgaaccagttttataactgaaaattgtatgcctttaaatcctaataagatatttgatgttaaaggatcaagcaagctagtgataagttaagataggagctttgaaacttgcaagacaccaaatcctctcttgtttttttgtccaaatattttcatgggttagagagctttgacaattgtcttaatatcatctttgtcgtgttatacattaggattataaatcttgatggtgtactacg

SEQ ID NO: 100654 - protein, 419 aa, Arabidopsis thaliana
  peptide (1)..(419): Ceres Seq. ID no. 13605721
MECNAKPPFQWELENLISFGTSTAEVPRKLKPMEWEIDGFDCTSLYSSSFAYAGSSGSDIAHAFSKSSKSTSISSSSAEVRTHNFTSETGESLPGEFAKGIDTSPSLELSFGSGDPVLGLKLGKRTYFEDFWEVENAKGLGLPVTLASSSVSPVKKSKSIPQRLQTPHCQVEGCNLDLSSAKDYHRKHRICENHSKFPKVVVSGVERRFCQQCSRFHCLSEFDEKKRSCRRRLSDHNARRRKPNPGRTYDGKPQVDFVWNRFALIHPRSEEKFIWPSSKHVPSRVLMPQPAKTEISDTEHNRFGLLDPKTKTARAELFSKEKVTISSHMGASQDLDGALSLLSNSTTWVSSSDQPRRFTLDHHPSSNLQPVAHRSAAQLNSVSGYWQPDPPAVEGPTALHRNGVGQFNENYFSLNQFYN

SEQ ID NO: 100655 - protein, 387 aa, Arabidopsis thaliana
  peptide (1)..(387): Ceres Seq. ID no. 13605722
MEWEIDGFDCTSLYSSSFAYAGSSGSDIAHAFSKSSKSTSISSSSAEVRTHNFTSETGESLPGEFAKGIDTSPSLELSFGSGDPVLGLKLGKRTYFEDFWEVENAKGLGLPVTLASSSVSPVKKSKSIPQRLQTPHCQVEGCNLDLSSAKDYHRKHRICENHSKFPKVVVSGVERRFCQQCSRFHCLSEFDEKKRSCRRRLSDHNARRRKPNPGRTYDGKPQVDFVWNRFALIHPRSEEKFIWPSSKHVPSRVLMPQPAKTEISDTEHNRFGLLDPKTKTARAELFSKEKVTISSHMGASQDLDGALSLLSNSTTWVSSSDQPRRFTLDHHPSSNLQPVAHRSAAQLNSVSGYWQPDPPAVEGPTALHRNGVGQFNENYFSLNQFYN

SEQ ID NO: 100656 - DNA, 1133 bp, Arabidopsis thaliana
  misc_feature (1)..(1133): Ceres Seq. ID no. 13605727
  misc_feature (1)..(1133): Ortholog of  Ceres SEQ ID NO 13596392 as cited in SEQ ID NO 62136
  misc_feature (1)..(1133): Ortholog of  Ceres SEQ ID NO 13654360 as cited in SEQ ID NO 67980
  misc_feature (1)..(1133): Ortholog of  Ceres SEQ ID NO 13596394 as cited in SEQ ID NO 68561
cttctaggcgttgttgttgttttgtctcattgttgctctgtttcttgaggttttataaatggatcctggtactttaaactcggtgatcaataggttgcttgaagctagagaaaaaccaggaaagattgttcagttgtctgaaacagagatcaaacagctctgtttcgtctctagagatatcttcttgagacaaccaaatctcttggaacttgaagctcctgttaaaatatgtggggacattcatggacaatatccggatctcttgagactattcgaacatggcggataccctcctaattcaaactacttgtttcttggagattatgtcgatcgcggcaagcaaagcctcgaaacgatttgtcttttacttgcttacaagattaagttccctgaaaacttcttccttctcagaggaaaccatgaaagtgcatcaatcaatcgtatttacggcttctatgacgagtgtaaacgtagattcagtgtcaagatttggcgaatcttcactgattgcttcaactgtctccccgtcgctgcactcatcgatgagcggattttttgtatgcatggtgggctctccccggagctgctaagcttgaggcagattagggatattcgtcgtccaacggatattcctgatcgtggtttactctgtgatctcttgtggtctgatcctgataaagatgttagaggttgggggcctaacgatcgcggagtttcttacacttttggatcagatatagtttctggatttcttaaaagactcgatcttgacctcatttgtagggctcaccaggttgttgaagatggattcgagttctttgcgaataagcagctcgtaacgatattctctgcgccgaattactgtggggaatttgacaatgcaggtgcgatgatgagtgtgtctgaggatttgacctgctcttttcagatcttaaaatctaatgacaagaaatcaaagttcagtttcggaagcagaggtggtgctaaaactagcttcccttatcctaaagtgaaggtatgtattaatcacatcactttttaatttgtggatatactgtagcacaaaaaataaatatggtaaatgcatataatttgctctaaaaaaaaaaaaaaaaaaaccctgacgtagctcg

SEQ ID NO: 100657 - protein, 327 aa, Arabidopsis thaliana
  peptide (1)..(327): Ceres Seq. ID no. 13605728
MDPGTLNSVINRLLEAREKPGKIVQLSETEIKQLCFVSRDIFLRQPNLLELEAPVKICGDIHGQYPDLLRLFEHGGYPPNSNYLFLGDYVDRGKQSLETICLLLAYKIKFPENFFLLRGNHESASINRIYGFYDECKRRFSVKIWRIFTDCFNCLPVAALIDERIFCMHGGLSPELLSLRQIRDIRRPTDIPDRGLLCDLLWSDPDKDVRGWGPNDRGVSYTFGSDIVSGFLKRLDLDLICRAHQVVEDGFEFFANKQLVTIFSAPNYCGEFDNAGAMMSVSEDLTCSFQILKSNDKKSKFSFGSRGGAKTSFPYPKVKVCINHITF

SEQ ID NO: 100658 - DNA, 795 bp, Arabidopsis thaliana
  misc_feature (1)..(795): Ceres Seq. ID no. 13605733
  misc_feature (1)..(795): Ortholog of  Ceres SEQ ID NO 12624653 as cited in SEQ ID NO 61262
  misc_feature (1)..(795): Ortholog of  Ceres SEQ ID NO 12579223 as cited in SEQ ID NO 0
  misc_feature (1)..(795): Ortholog of  Ceres SEQ ID NO 12635708 as cited in SEQ ID NO 0
aaataaacctaaaccaatagaaccgcagtttttcctcctcgccgaaacgaagaagattctccttctctccgtcagacaaatctacgaacaagcgagcctgagcttaagaccaaactcatagagatgggtttcttctcttttcttggaagagttctcttcgcttctctctttatcctctccgcttggcaaatgttcaatgatggtggtcctgcagctaaagaattggctccaaagcttgatttggttaaggcacatttatcttctagattaggagtaacattgcccaaaatagaggtgagacaagtcgttgctactattattgccctgaaaggagtcggaggcttactctttgttatcggaaacaccttcggtgcttatcttctggcttcctacttggtggttttcggtcctattctctatgatttctacaactacggacctcaggaacgtcatttctctcttctgttgacagagttcttgcagagcgttgcactctttggagcgttactcttctttatcggaatgaagaactcgacacccgccaagaagaatttgaagaagaggacacctaagccgaaagctgcctagtatcaatattagttttcttctggttttgccatgagcaagcaataccttgccttttccttttttcccgacaaaatctttccttagaacttttgttttctttctgttttaggattcttagattagctcatgatcttatactaatactgtgatttgatattggggatcttgaagttttggtttgttgaaactggaaccatgcagctacag

SEQ ID NO: 100659 - protein, 154 aa, Arabidopsis thaliana
  peptide (1)..(154): Ceres Seq. ID no. 13605734
MGFFSFLGRVLFASLFILSAWQMFNDGGPAAKELAPKLDLVKAHLSSRLGVTLPKIEVRQVVATIIALKGVGGLLFVIGNTFGAYLLASYLVVFGPILYDFYNYGPQERHFSLLLTEFLQSVALFGALLFFIGMKNSTPAKKNLKKRTPKPKAA

SEQ ID NO: 100660 - protein, 132 aa, Arabidopsis thaliana
  peptide (1)..(132): Ceres Seq. ID no. 13605735
MFNDGGPAAKELAPKLDLVKAHLSSRLGVTLPKIEVRQVVATIIALKGVGGLLFVIGNTFGAYLLASYLVVFGPILYDFYNYGPQERHFSLLLTEFLQSVALFGALLFFIGMKNSTPAKKNLKKRTPKPKAA

SEQ ID NO: 100661 - DNA, 2934 bp, Arabidopsis thaliana
  misc_feature (1)..(2934): Ceres Seq. ID no. 13605736
  misc_feature (1)..(2934): Ortholog of  Ceres SEQ ID NO 15169274 as cited in SEQ ID NO 55176
ggcgctgtgtcgtcttcgtcttcttcttccttcttcttcttcatctctctctttcgttttctcagtaagtgaaggatttgcagaagtagatgattgaatatccatggagggtgattggtttcaggaggtatgggagatggagatgagcaaagtaaagagttaggaggagtttcgtcttcgagtcgtcgttgttcttccggtactgctggtgctgcaaatgcagaagcaagaatgaagtttgctgctgttgatgctataacagaattagtgtggtctcctagcaacggtctaagcttaagatgtgcagatatcagtttcacgggaaaggcaaaattactctctcctaacttctttgatataggactaactaacatggcgattcactcaaatagcacaagtattgaagaccaagaagatcacgtagatgtcgaattgagaaaccgagatcaagtgaaccaagcaatgattggtggttctgttgaggatatgaaacctgaaatggttgaggataaggttgaaaccaatgatgatataaagaatgaagaagcaggatgttccaaaagatcttcagatagtccgaaagctatggaaggagaaaccagagacttgttggttaatgaacagttgaggatggaaagtgctggatctcaagaagaaggggataaggcgcataatagagttgatcgtttagaatcaatggatgagaacaacctcgcaactcttgctgttgtagcatgtgaaggtaaaggggactatttgccggagggtgaggctggacctagtggttcctacaggcgtcgtgagaaagcaaaagggaaagagaaagctttatctgatgaaaactttggtggtgatggtgaagatgaggatgaggagagttttggtagtgtagaaagttgcaatagtgcgggtttgctctcaaggggaaagaaaagaccaggctttgaggagcagctgatttttggaagcaaacggctcaaaacgttaaatcaagaatgtttggggtcaacttcaaagctcaagcaagatagttccttcatgaattggatatcaaatatgactaaaggaatctggaaaggtaatgaagaagacaattctccttttgtagctcttaccaccacctcaaatgctaatggtcatggccaagtcaatgccatcgttgaccaacaacaattgagtccatgctgtgtgaaggaaaatagtggatgcagaaacaccggtttccagtcttttttccagtctatatattgtccgaagaaacaaagtcaagatgtcgtcgacatggatttcccgaatgatgttaatgctgctcctttgcaggaacttccctggattcctgaacattgcgacatttccaaaggggatgacttgtcttcatctggtaatgagattggtccagtggctgaacccaacatttcatcaggaaaagttgtatttaatcagacaagcaaaacacagtcttcagagaacaaacgtgaggacaaagagccaaacatctcgttgatgtctcttagtaagtctaagccaaatgaagagccaaaaacatgcggtgaagctgatggaaaggttagtccatgtttaaccaacagaaactctggtcttaaaagtttgtggattagtcggttttcttctaaaggttcgttccctcagaaaaaggcaagtgaaacggctaaagaggccaatgcttcagcctcagacgcagctaaaacccgtgattcacggaaaatgctggcagacaagaatgttataagacccagtatcagctcggtagatgggcccgataaaccggacactgtccttcctatagtttcgtcaatgagaatagagtcttcagaagcaatggcttctttgtttgctagaagattagaagcaatgaaaagcatcatgccctcaggttctttagctgagaatgcagaggaggaacagagggatctaatttgtttctactgcggtaaaaagggtcattgtttacgggattgtttggaagtaactgatactgagctcagagatctagtacagaacataagtgtgcggaatggaagagaagaagcgtcaagtctatgcattagatgttttcagcttagtcactgggctgcaacatgcccgaatgctcccctgtatggttcaggagctgaaggtagagctatgaagaacgctttagcttctacctctggcatgaagctgcccataagtggtttcacagacgtaccaagggcggtctttgatgctgttcaagtgcttcgcctgagccgcacagacgttctcaaatggataaacaccaagaagtctgtatcgggtctcgaagggttcttcttgcggttaaggctcgggaaatgggaagaagggcttggaggaacagggtattatgtagctcgcatagatggggacacagagggacaaagctcaaggagacattcagagaaaagcttaatttcagttaaggttaaaggtgtgacttgccttgttgagtctcagtttatctcaaaccaagactttcttgaggaggagttaaaggcctggtggcagagcgcggggaaaagtgccagaacaagcggctacgacggcatcccgtcggcggaggaacttagtcggaaaattcagcagagaaaaatgttaggcttttaggacatttgttcaagtagataaatgtttttaagttataggttttacgattacccgtgtattttttcggttgaaaaggagagtgtaaatttcttagttcagagggcatcgaatgtctcaaaccatacaacaatctaaaactggatgtccaatctatttagatttgcgagttttattcggatctttatgtctcgatgactatttattgtgattgttaagcttgtatagtctatgtgtgaaggatcaagtatcatggaagaacaaagtacattgatatcaagagagatattgtggtgtcttgctcatttttcg

SEQ ID NO: 100662 - protein, 831 aa, Arabidopsis thaliana
  peptide (1)..(831): Ceres Seq. ID no. 13605737
MGDGDEQSKELGGVSSSSRRCSSGTAGAANAEARMKFAAVDAITELVWSPSNGLSLRCADISFTGKAKLLSPNFFDIGLTNMAIHSNSTSIEDQEDHVDVELRNRDQVNQAMIGGSVEDMKPEMVEDKVETNDDIKNEEAGCSKRSSDSPKAMEGETRDLLVNEQLRMESAGSQEEGDKAHNRVDRLESMDENNLATLAVVACEGKGDYLPEGEAGPSGSYRRREKAKGKEKALSDENFGGDGEDEDEESFGSVESCNSAGLLSRGKKRPGFEEQLIFGSKRLKTLNQECLGSTSKLKQDSSFMNWISNMTKGIWKGNEEDNSPFVALTTTSNANGHGQVNAIVDQQQLSPCCVKENSGCRNTGFQSFFQSIYCPKKQSQDVVDMDFPNDVNAAPLQELPWIPEHCDISKGDDLSSSGNEIGPVAEPNISSGKVVFNQTSKTQSSENKREDKEPNISLMSLSKSKPNEEPKTCGEADGKVSPCLTNRNSGLKSLWISRFSSKGSFPQKKASETAKEANASASDAAKTRDSRKMLADKNVIRPSISSVDGPDKPDTVLPIVSSMRIESSEAMASLFARRLEAMKSIMPSGSLAENAEEEQRDLICFYCGKKGHCLRDCLEVTDTELRDLVQNISVRNGREEASSLCIRCFQLSHWAATCPNAPLYGSGAEGRAMKNALASTSGMKLPISGFTDVPRAVFDAVQVLRLSRTDVLKWINTKKSVSGLEGFFLRLRLGKWEEGLGGTGYYVARIDGDTEGQSSRRHSEKSLISVKVKGVTCLVESQFISNQDFLEEELKAWWQSAGKSARTSGYDGIPSAEELSRKIQQRKMLGF

SEQ ID NO: 100663 - protein, 797 aa, Arabidopsis thaliana
  peptide (1)..(797): Ceres Seq. ID no. 13605738
MKFAAVDAITELVWSPSNGLSLRCADISFTGKAKLLSPNFFDIGLTNMAIHSNSTSIEDQEDHVDVELRNRDQVNQAMIGGSVEDMKPEMVEDKVETNDDIKNEEAGCSKRSSDSPKAMEGETRDLLVNEQLRMESAGSQEEGDKAHNRVDRLESMDENNLATLAVVACEGKGDYLPEGEAGPSGSYRRREKAKGKEKALSDENFGGDGEDEDEESFGSVESCNSAGLLSRGKKRPGFEEQLIFGSKRLKTLNQECLGSTSKLKQDSSFMNWISNMTKGIWKGNEEDNSPFVALTTTSNANGHGQVNAIVDQQQLSPCCVKENSGCRNTGFQSFFQSIYCPKKQSQDVVDMDFPNDVNAAPLQELPWIPEHCDISKGDDLSSSGNEIGPVAEPNISSGKVVFNQTSKTQSSENKREDKEPNISLMSLSKSKPNEEPKTCGEADGKVSPCLTNRNSGLKSLWISRFSSKGSFPQKKASETAKEANASASDAAKTRDSRKMLADKNVIRPSISSVDGPDKPDTVLPIVSSMRIESSEAMASLFARRLEAMKSIMPSGSLAENAEEEQRDLICFYCGKKGHCLRDCLEVTDTELRDLVQNISVRNGREEASSLCIRCFQLSHWAATCPNAPLYGSGAEGRAMKNALASTSGMKLPISGFTDVPRAVFDAVQVLRLSRTDVLKWINTKKSVSGLEGFFLRLRLGKWEEGLGGTGYYVARIDGDTEGQSSRRHSEKSLISVKVKGVTCLVESQFISNQDFLEEELKAWWQSAGKSARTSGYDGIPSAEELSRKIQQRKMLGF

SEQ ID NO: 100664 - protein, 750 aa, Arabidopsis thaliana
  peptide (1)..(750): Ceres Seq. ID no. 13605739
MAIHSNSTSIEDQEDHVDVELRNRDQVNQAMIGGSVEDMKPEMVEDKVETNDDIKNEEAGCSKRSSDSPKAMEGETRDLLVNEQLRMESAGSQEEGDKAHNRVDRLESMDENNLATLAVVACEGKGDYLPEGEAGPSGSYRRREKAKGKEKALSDENFGGDGEDEDEESFGSVESCNSAGLLSRGKKRPGFEEQLIFGSKRLKTLNQECLGSTSKLKQDSSFMNWISNMTKGIWKGNEEDNSPFVALTTTSNANGHGQVNAIVDQQQLSPCCVKENSGCRNTGFQSFFQSIYCPKKQSQDVVDMDFPNDVNAAPLQELPWIPEHCDISKGDDLSSSGNEIGPVAEPNISSGKVVFNQTSKTQSSENKREDKEPNISLMSLSKSKPNEEPKTCGEADGKVSPCLTNRNSGLKSLWISRFSSKGSFPQKKASETAKEANASASDAAKTRDSRKMLADKNVIRPSISSVDGPDKPDTVLPIVSSMRIESSEAMASLFARRLEAMKSIMPSGSLAENAEEEQRDLICFYCGKKGHCLRDCLEVTDTELRDLVQNISVRNGREEASSLCIRCFQLSHWAATCPNAPLYGSGAEGRAMKNALASTSGMKLPISGFTDVPRAVFDAVQVLRLSRTDVLKWINTKKSVSGLEGFFLRLRLGKWEEGLGGTGYYVARIDGDTEGQSSRRHSEKSLISVKVKGVTCLVESQFISNQDFLEEELKAWWQSAGKSARTSGYDGIPSAEELSRKIQQRKMLGF

SEQ ID NO: 100665 - DNA, 1929 bp, Arabidopsis thaliana
  misc_feature (1)..(1929): Ceres Seq. ID no. 13605751
  misc_feature (1)..(1929): Ortholog of  Ceres SEQ ID NO 13594317 as cited in SEQ ID NO 57796
gtcactgtcgacgaccactgcgtttcacactactctctctctcgctctctccaccgttaaacttcaatacccatttgtcatttcccccaaatctctccgatttcttaaatctaatttggatttactttgcctgtaaaaccattcgcattgttacgcatccgattttgcagttcgaaactcgagttcaacttcaatttgaggtagatttcgagaaaaagctgaagaatttcggaacaactaagattttaacggtggaattggggagtcttgaagcttatttttcctcctggtctcttttttcttatgtggtggtgcttgagagggtttttgtatgatataaatgctctagatcagagaaaaggtctaacatgaagttatcaaatattccgcaacgctatgtaatagtcttcttaactttcctcagcacatgtgtgtgttacatagagcgtgttggcttctctattgcatataccgttgctgctgatgctgctgggatcaatcaatcgagtaaaggaaccatactttctacattctttgttggctatgcatgttctcaagtccctggaggttgggcagctcagaaaattgggggaaggaaagttcttcttctgtcgtttgttttatggtcatcgacgtgtttcttggttccacttgatccaaacagagtcgggcttttggttgttgcccgtttacttgttggtgttgctcaaggtttcatctttccctctatccacacagttttggctcagtgggttcctcctcatgaaaggtctagattggtttcgataacgacatcaggaatgtatttaggtgcagctttaggaatgtggcttctccctgctttagttgagcttagaggtccggaatcagttttcttagcagaggcattagcaggtgttatatggtcattgctttggattaggtacgctactgacccacctcgatctgagcatccaaaagctgctgctgctggattcggaggtgctctgttaccgactaatgtaaaccaccataaagttactcatatcccgtggaagaaaatcatgctcagtttacccgtttgggcgattgtggttaacaatttcacattccattacgctttatatgtgttgatgaactggcttccaacgtatttcgagcttggactccagatcagtcttcaggggatggattcatcaaagatggtgccatacctcaacatgtttgtattctccattgttggtgggttcatcgcagactatttgatcaccaagagaatactctcggtaaccagaacccgcaagttcttgaacacagttgggttcctaattgcttcagcggcattgatggtcttacccatgtttagaacagaaaatggtgtgatcttatgttcctcagtggctcttgggtttttggcattaggaagagccggttttgcggtgaaccatatggatattgctccaagatatgcaggaatagtgatgggagtttcaaatactgctgggacattagctggaatcattggtgttgatttgactggaaagcttcttgaagcttctaaattggtttactcagatttgtcacatccagagagctggagagttgtgttcttcatcccgggtttgctctgtatctttagctctgttgtgtttctgctgttttctactggagaaaggatctttgattgaggaaagaaaaaaagatcaaaacttttagagaaacccttatcaagattagttagtaaaagcctgaatcgaagatcgattgattcggtaattgcggaattttgtgggaaatgtcgtttttgtgtgtgtagtaaagatcttttgagtgatggttttgaaatattgtcttcaggctcattggtattctttttttggtgaataaacttgatcacaccaaagagtattattggttgatctttcaatatatactatgaataaagaatcg

SEQ ID NO: 100666 - protein, 432 aa, Arabidopsis thaliana
  peptide (1)..(432): Ceres Seq. ID no. 13605752
MKLSNIPQRYVIVFLTFLSTCVCYIERVGFSIAYTVAADAAGINQSSKGTILSTFFVGYACSQVPGGWAAQKIGGRKVLLLSFVLWSSTCFLVPLDPNRVGLLVVARLLVGVAQGFIFPSIHTVLAQWVPPHERSRLVSITTSGMYLGAALGMWLLPALVELRGPESVFLAEALAGVIWSLLWIRYATDPPRSEHPKAAAAGFGGALLPTNVNHHKVTHIPWKKIMLSLPVWAIVVNNFTFHYALYVLMNWLPTYFELGLQISLQGMDSSKMVPYLNMFVFSIVGGFIADYLITKRILSVTRTRKFLNTVGFLIASAALMVLPMFRTENGVILCSSVALGFLALGRAGFAVNHMDIAPRYAGIVMGVSNTAGTLAGIIGVDLTGKLLEASKLVYSDLSHPESWRVVFFIPGLLCIFSSVVFLLFSTGERIFD

SEQ ID NO: 100667 - protein, 288 aa, Arabidopsis thaliana
  peptide (1)..(288): Ceres Seq. ID no. 13605753
MYLGAALGMWLLPALVELRGPESVFLAEALAGVIWSLLWIRYATDPPRSEHPKAAAAGFGGALLPTNVNHHKVTHIPWKKIMLSLPVWAIVVNNFTFHYALYVLMNWLPTYFELGLQISLQGMDSSKMVPYLNMFVFSIVGGFIADYLITKRILSVTRTRKFLNTVGFLIASAALMVLPMFRTENGVILCSSVALGFLALGRAGFAVNHMDIAPRYAGIVMGVSNTAGTLAGIIGVDLTGKLLEASKLVYSDLSHPESWRVVFFIPGLLCIFSSVVFLLFSTGERIFD

SEQ ID NO: 100668 - protein, 280 aa, Arabidopsis thaliana
  peptide (1)..(280): Ceres Seq. ID no. 13605754
MWLLPALVELRGPESVFLAEALAGVIWSLLWIRYATDPPRSEHPKAAAAGFGGALLPTNVNHHKVTHIPWKKIMLSLPVWAIVVNNFTFHYALYVLMNWLPTYFELGLQISLQGMDSSKMVPYLNMFVFSIVGGFIADYLITKRILSVTRTRKFLNTVGFLIASAALMVLPMFRTENGVILCSSVALGFLALGRAGFAVNHMDIAPRYAGIVMGVSNTAGTLAGIIGVDLTGKLLEASKLVYSDLSHPESWRVVFFIPGLLCIFSSVVFLLFSTGERIFD

SEQ ID NO: 100669 - DNA, 1756 bp, Arabidopsis thaliana
  misc_feature (1)..(1756): Ceres Seq. ID no. 13605755
  misc_feature (1)..(1756): Ortholog of  Ceres SEQ ID NO 14313216 as cited in SEQ ID NO 66103
taccacctatcttagaaatggagttctcaagctttttgtttactattttactcttttcactgaatatttctcctcttgtttcagctcatggctccaaccatgaagactttcttaagtgtctttcttaccgaatgaacgacaacaccgtcgaacccaaagtcatacacacttccaaagactcttcctttttttccatattggattcttcgatacaaaatccaagattctcggtttccgaaacacctaaaccggtctcaatcatcactcccgttaaagccagtgacgttcaaactgtgatcagatgcgcacagctgcatggaattcatgtaaggactcggagcgccggtcactgctacgaaggtctctcttacattgcgtacaacaaaccattcgctgtcatcgatttaaggaatcttcggtctatatcattagacgttgataaccggacaggttgggtccaaaccggagcaacggctggggaattgtattatgagattgggaaaaccaccaaatctcttgctttcccggccggtattcacccaaccgttggtgtaggcggacaatttagcggtggtggttatggcacattgctaaggaaatacggtttagctgcggataacataatcgatgcacttgtggttgacgcgagtgggaggattcttgaccgacaagcaatgggcgaggattacttttgggctattcgtggagggggcggatcaagcttcggtgttatactatcgtggaaggttaaattagtcgatgttccatccacaattaccgtgtttaaagtccagaaaacatcgaagaaagaggccgttaggatcatcaagaaatggcaatatgctgcagataaggttcctgatgatcttttcattaggacaacattggagagatcaaacaagaacgcagtacacgctttgttcactggactatatattggtccggtgaacaatctattggcgttgatggaagaaaagtttccggaactaggtcttgagaaagaaggttgtgaagagatgagttggattgagtctgtactctggtttgctgatttccctaaaggagaatctcttggtgttctcacgaatcgtgagcgtacatctctatctttcaaaggcaaagatgattttgtccaagaaccgatacccgaggctgcaattcaagagatatggaggcgattagaagcccccgaggctcggcttggaaagatcatattaactccatttggtgggaaaatgagtgaaatggcagagtacgaaacaccattcccacatcgaggagggaatctctatgagattcagtatgtggcttactggagagaagaggaagacaagaacaagacggagacagataaatatctgaaatgggtcgatagcgtttacgaatttatgactccatatgtttcgaaatctccaagaggagcttatgtcaatttcaaggatatggatttgggtatgtatcttggaaagaagaagacaaagtacgaggaaggaaagagttggggagtgaagtatttcaagaacaatttcgagagattggtgagagtgaagactagggttgatccaacagatttcttctgcgatgaacagagcattcctctggtgaacaaagttacctgaagatatcatttgaagttttttattagtcccttttctctgtgaaatcatctgtgcgtgttgaatattatgcgtcaagtgtgtaacttatgtgtgtgattgtgaattgtgatatgtgtgttgaataaacttttcatgtt

SEQ ID NO: 100670 - protein, 538 aa, Arabidopsis thaliana
  peptide (1)..(538): Ceres Seq. ID no. 13605756
PPILEMEFSSFLFTILLFSLNISPLVSAHGSNHEDFLKCLSYRMNDNTVEPKVIHTSKDSSFFSILDSSIQNPRFSVSETPKPVSIITPVKASDVQTVIRCAQLHGIHVRTRSAGHCYEGLSYIAYNKPFAVIDLRNLRSISLDVDNRTGWVQTGATAGELYYEIGKTTKSLAFPAGIHPTVGVGGQFSGGGYGTLLRKYGLAADNIIDALVVDASGRILDRQAMGEDYFWAIRGGGGSSFGVILSWKVKLVDVPSTITVFKVQKTSKKEAVRIIKKWQYAADKVPDDLFIRTTLERSNKNAVHALFTGLYIGPVNNLLALMEEKFPELGLEKEGCEEMSWIESVLWFADFPKGESLGVLTNRERTSLSFKGKDDFVQEPIPEAAIQEIWRRLEAPEARLGKIILTPFGGKMSEMAEYETPFPHRGGNLYEIQYVAYWREEEDKNKTETDKYLKWVDSVYEFMTPYVSKSPRGAYVNFKDMDLGMYLGKKKTKYEEGKSWGVKYFKNNFERLVRVKTRVDPTDFFCDEQSIPLVNKVT

SEQ ID NO: 100671 - protein, 533 aa, Arabidopsis thaliana
  peptide (1)..(533): Ceres Seq. ID no. 13605757
MEFSSFLFTILLFSLNISPLVSAHGSNHEDFLKCLSYRMNDNTVEPKVIHTSKDSSFFSILDSSIQNPRFSVSETPKPVSIITPVKASDVQTVIRCAQLHGIHVRTRSAGHCYEGLSYIAYNKPFAVIDLRNLRSISLDVDNRTGWVQTGATAGELYYEIGKTTKSLAFPAGIHPTVGVGGQFSGGGYGTLLRKYGLAADNIIDALVVDASGRILDRQAMGEDYFWAIRGGGGSSFGVILSWKVKLVDVPSTITVFKVQKTSKKEAVRIIKKWQYAADKVPDDLFIRTTLERSNKNAVHALFTGLYIGPVNNLLALMEEKFPELGLEKEGCEEMSWIESVLWFADFPKGESLGVLTNRERTSLSFKGKDDFVQEPIPEAAIQEIWRRLEAPEARLGKIILTPFGGKMSEMAEYETPFPHRGGNLYEIQYVAYWREEEDKNKTETDKYLKWVDSVYEFMTPYVSKSPRGAYVNFKDMDLGMYLGKKKTKYEEGKSWGVKYFKNNFERLVRVKTRVDPTDFFCDEQSIPLVNKVT

SEQ ID NO: 100672 - protein, 495 aa, Arabidopsis thaliana
  peptide (1)..(495): Ceres Seq. ID no. 13605758
MNDNTVEPKVIHTSKDSSFFSILDSSIQNPRFSVSETPKPVSIITPVKASDVQTVIRCAQLHGIHVRTRSAGHCYEGLSYIAYNKPFAVIDLRNLRSISLDVDNRTGWVQTGATAGELYYEIGKTTKSLAFPAGIHPTVGVGGQFSGGGYGTLLRKYGLAADNIIDALVVDASGRILDRQAMGEDYFWAIRGGGGSSFGVILSWKVKLVDVPSTITVFKVQKTSKKEAVRIIKKWQYAADKVPDDLFIRTTLERSNKNAVHALFTGLYIGPVNNLLALMEEKFPELGLEKEGCEEMSWIESVLWFADFPKGESLGVLTNRERTSLSFKGKDDFVQEPIPEAAIQEIWRRLEAPEARLGKIILTPFGGKMSEMAEYETPFPHRGGNLYEIQYVAYWREEEDKNKTETDKYLKWVDSVYEFMTPYVSKSPRGAYVNFKDMDLGMYLGKKKTKYEEGKSWGVKYFKNNFERLVRVKTRVDPTDFFCDEQSIPLVNKVT

SEQ ID NO: 100673 - DNA, 4585 bp, Arabidopsis thaliana
  misc_feature (1)..(4585): Ceres Seq. ID no. 13605763
  misc_feature (1)..(4585): Ortholog of  Ceres SEQ ID NO 12614157 as cited in SEQ ID NO 67965
atagaggaggtacgatactccttcgtcagccacctctccaaagctctccagcgaaaaggtgtaaacgatgtcttcatcgatagcgatgattcgctttccaacgagtctcaatcaatggtcgagagagctagggtttctgttatgattttaccaggaaaccgtacggtatctcttgacaagctcgtgaaggttctcgattgccagaagaacaaagatcaagtggtggttccggtgttgtacggtgtcagatcatcagagaccgaatggcttagcgcgctggattcgaaaggattctcatcagtacaccattccaggaaagaatgtagtgactcccagcttgtaaaagagactgttagagatgtgtatgagaagctcttttatatggaacgaattggaatatattcgaagctgctggagattgagaaaatgattaacaagcaaccgttggacatccgttgtgttggaatttggggtatgcctggcataggcaagactacacttgctaaagcagtctttgaccaaatgtctggtgagtttgatgctcattgctttattgaagactacaccaaagctattcaagagaagggtgtttattgtttgctggaggaacagtttttgaaagaaaatgctggtgctagtggtaccgttacgaaattgagcttgcttagggatagattaaacaataagagggttcttgttgttcttgatgatgtccgcagtcctctggttgtggagtcttttcttggagggtttgactggtttggtcccaaaagtctaatcatcataacctccaaagataaatcggtgtttcgcctttgtcgagtcaatcaaatatacgaggttcagggtttaaatgagaaagaggctcttcaactcttctctttgtgtgcgtctatagacgatatggcagagcagaatctccacgaggtgtcaatgaaagttattaaatatgctaatggccatccattagctctcaatctctatggcagagaactgatggggaagaaaagaccaccagaaatggagatagcattcctcaaactcaaggaatgtcctccagctatttttgttgatgcaatcaagagctcgtatgacacactcaatgacagggaaaaaaacatttttttggacatagcttgtttcttccagggagaaaatgttgactacgtgatgcaactgcttgagggttgtggtttctttccacatgttggaattgatgttcttgtggagaagagtctggtgactatttcagaaaaccgagtgcggatgcataacttgatccaagatgttggccgacaaataataaatagagaaacaagacagactaagaggcgcagcagactgtgggaaccttgcagcatcaaatatttattagaagataaggaacaaaacgaaaatgaagaacaaaaaacaacttttgaacgtgctcaggtccctgaagagatcgaaggcatgtttctggacacatcaaacttaagttttgatattaagcatgttgcctttgataatatgttgaaccttagattgttcaagatttacagttccaatcctgaagtccatcatgtaaacaatttcctcaaaggctctctcagttctcttcctaatgtgctaagactcctgcattgggagaactatcctctgcagtttctgcctcaaaattttgatcctatacaccttgttgaaatcaacatgccgtacagccaacttaagaaactttggggtggaaccaaggacctggagatgttgaagacaatcaggctttgtcattcccaacaactagttgatattgacgatcttttaaaagctcaaaatcttgaggtagttgatctccaaggctgtacaagactgcagagtttcccagccaccggtcaattgctacatttacgagttgtaaatctctcaggttgcacagagatcaaaagtttcccagaaattcccccaaatattgagacactgaatctacaggggactggtataatagaattaccactttccattgttaattgcttggagctgaatgattgttctcgtttgcgaagtctgccaaacatggttaatttagaacttctcaaagcccttgatctttctggttgctcagagctcgagactatccagggtttcccacggaacctgaaagagttatatcttgttggcactgcagtaagacaagtgccacaacttcctcaaagtctagaattctttaatgcccatggttgtgtctctctcaaatcaattcgtttggacttcaagaagcttcctgtgcattacacatttagtaattgtttcgatctatctccacaagtggtcaacgattttttagtgcaggcgatggctaatgtgattgcaaaacacataccaagagagcgtcatgtcacaggcttttctcaaaagactgtgcagcgttcgagtcgtgacagtcagcaggaactcaacaaaactttggctttcagcttctgtgcgccctcacatgcgaatcaaaattccaaacttgatctgcaaccaggatcttcttcaatgacacgactagatccttcttggaggaacacacttgtgggctttgctatgctggtgcaagtcgcattttccgagggttactgtgatgatactgattttggcattagttgtgtttgcaaatggaaaaacaaggaaggccactctcataggagagaaataaatttgcattgttgggctttagggaaagctgttgaaagggatcatacgtttgtcttctttgatgtcaacatgcgtccagataccgatgaaggaaatgaccccgatatctgggctgatttagttgtttttgagttctttcctgtcaataaacagagaaagcctctaaatgatagttgcacagtgacaagatgtggagtccgtttaataactgctgtaaactgcaatacaagtatcgagaatatatcaccagttttgtccttggatccgatggaggtttctggtaatgaagatgaagaagtattgagagtcagatatgctggtttacaggagatatataaagctttgtttctttacatagcgggtttgttcaatgacgaggatgttggtttggtagcaccacttattgctaacattattgacatggacgttagttatgggctcaaggtcttagcctataggtctctcatacgtgtatcttccaatggggaaatagtgatgcactatttgctacgacaaatgggtaaagaaatcctccatacagaatcaaagaagactgacaaattagtcgacaatattcagagttccatgatcgcaacaaaggaaatcgagatcactcgttcaaagagtcgccgaaagaacaacaaggaaaagagagtggtttgcgtagtggatcgaggcagccggtccagtgacctatgggtttggcgaaagtatggtcaaaaacccatcaaaagttctccttatccaaggagttactatagatgtgccagctcgaaaggttgttttgctaggaaacaagtcgaacgtagccgcactgatccaaatgtttcagtaattacttacatctctgagcataaccatccattccccactctacgcaatactcttgccggctccactcgttcctcttcctccaaatgctcagatgtaactacttctgcctcatcgacagtctcccaagacaaagaaggaccggataaatcccatttgccttcctcccctgcttctcctccttatgcggccatggtggttaaggaggaggacatggagcaatgggacaatatggagttcgatgttgacgttgaagaagatactttcatacccgaattatttccagaggataccttcgctgatatggacaagcttgaggaaaattctcagactatgtttctctctcgcagaagcagcggaggcaacatggaagcccaagggaagaactctagtgatgatagggagttaaaaggaaaaaaaaaaaaattctttgagatgagacttgttctctctggtgcctcttctttcacctccaaccttttttgttcctcccaacaggtcaatggaagaggaaaagaactgaaaaacccaatttctctaaaccacaacaaagatttggactttctgttaaagaagttagctccgccactcacggcggttttacttgctgtttcacccatctgtttccctccagaatctcttgggcagactttggatatacagagaggagctacattgtttaatagagcttgtatcgggtgtcatgatacaggtggaaacattattcaacctggtgcaacgcttttcacaaaagacctcgaaagaaatggagttgatactgaggaagaaatatatcgtgttacctactttggaaagggaagaatgccgggatttggtgagaaatgcacaccgagaggacaatgtacctttggaccgcggttgcaggacgaagaaatcaagcttctcgctgaatttgtaaagtttcaagctgaccaaggctggccaactgtatctacggactagcgactaggcattcttcgtcttgtgagcgtttttgtaatccaattaatccatagggctgtatctacttacacttataacaattccttctgggaggtttcattgcaattgcttatgctcc

SEQ ID NO: 100674 - protein, 1488 aa, Arabidopsis thaliana
  peptide (1)..(1488): Ceres Seq. ID no. 13605764
IEEVRYSFVSHLSKALQRKGVNDVFIDSDDSLSNESQSMVERARVSVMILPGNRTVSLDKLVKVLDCQKNKDQVVVPVLYGVRSSETEWLSALDSKGFSSVHHSRKECSDSQLVKETVRDVYEKLFYMERIGIYSKLLEIEKMINKQPLDIRCVGIWGMPGIGKTTLAKAVFDQMSGEFDAHCFIEDYTKAIQEKGVYCLLEEQFLKENAGASGTVTKLSLLRDRLNNKRVLVVLDDVRSPLVVESFLGGFDWFGPKSLIIITSKDKSVFRLCRVNQIYEVQGLNEKEALQLFSLCASIDDMAEQNLHEVSMKVIKYANGHPLALNLYGRELMGKKRPPEMEIAFLKLKECPPAIFVDAIKSSYDTLNDREKNIFLDIACFFQGENVDYVMQLLEGCGFFPHVGIDVLVEKSLVTISENRVRMHNLIQDVGRQIINRETRQTKRRSRLWEPCSIKYLLEDKEQNENEEQKTTFERAQVPEEIEGMFLDTSNLSFDIKHVAFDNMLNLRLFKIYSSNPEVHHVNNFLKGSLSSLPNVLRLLHWENYPLQFLPQNFDPIHLVEINMPYSQLKKLWGGTKDLEMLKTIRLCHSQQLVDIDDLLKAQNLEVVDLQGCTRLQSFPATGQLLHLRVVNLSGCTEIKSFPEIPPNIETLNLQGTGIIELPLSIVNCLELNDCSRLRSLPNMVNLELLKALDLSGCSELETIQGFPRNLKELYLVGTAVRQVPQLPQSLEFFNAHGCVSLKSIRLDFKKLPVHYTFSNCFDLSPQVVNDFLVQAMANVIAKHIPRERHVTGFSQKTVQRSSRDSQQELNKTLAFSFCAPSHANQNSKLDLQPGSSSMTRLDPSWRNTLVGFAMLVQVAFSEGYCDDTDFGISCVCKWKNKEGHSHRREINLHCWALGKAVERDHTFVFFDVNMRPDTDEGNDPDIWADLVVFEFFPVNKQRKPLNDSCTVTRCGVRLITAVNCNTSIENISPVLSLDPMEVSGNEDEEVLRVRYAGLQEIYKALFLYIAGLFNDEDVGLVAPLIANIIDMDVSYGLKVLAYRSLIRVSSNGEIVMHYLLRQMGKEILHTESKKTDKLVDNIQSSMIATKEIEITRSKSRRKNNKEKRVVCVVDRGSRSSDLWVWRKYGQKPIKSSPYPRSYYRCASSKGCFARKQVERSRTDPNVSVITYISEHNHPFPTLRNTLAGSTRSSSSKCSDVTTSASSTVSQDKEGPDKSHLPSSPASPPYAAMVVKEEDMEQWDNMEFDVDVEEDTFIPELFPEDTFADMDKLEENSQTMFLSRRSSGGNMEAQGKNSSDDRELKGKKKKFFEMRLVLSGASSFTSNLFCSSQQVNGRGKELKNPISLNHNKDLDFLLKKLAPPLTAVLLAVSPICFPPESLGQTLDIQRGATLFNRACIGCHDTGGNIIQPGATLFTKDLERNGVDTEEEIYRVTYFGKGRMPGFGEKCTPRGQCTFGPRLQDEEIKLLAEFVKFQADQGWPTVSTD

SEQ ID NO: 100675 - protein, 1450 aa, Arabidopsis thaliana
  peptide (1)..(1450): Ceres Seq. ID no. 13605765
MVERARVSVMILPGNRTVSLDKLVKVLDCQKNKDQVVVPVLYGVRSSETEWLSALDSKGFSSVHHSRKECSDSQLVKETVRDVYEKLFYMERIGIYSKLLEIEKMINKQPLDIRCVGIWGMPGIGKTTLAKAVFDQMSGEFDAHCFIEDYTKAIQEKGVYCLLEEQFLKENAGASGTVTKLSLLRDRLNNKRVLVVLDDVRSPLVVESFLGGFDWFGPKSLIIITSKDKSVFRLCRVNQIYEVQGLNEKEALQLFSLCASIDDMAEQNLHEVSMKVIKYANGHPLALNLYGRELMGKKRPPEMEIAFLKLKECPPAIFVDAIKSSYDTLNDREKNIFLDIACFFQGENVDYVMQLLEGCGFFPHVGIDVLVEKSLVTISENRVRMHNLIQDVGRQIINRETRQTKRRSRLWEPCSIKYLLEDKEQNENEEQKTTFERAQVPEEIEGMFLDTSNLSFDIKHVAFDNMLNLRLFKIYSSNPEVHHVNNFLKGSLSSLPNVLRLLHWENYPLQFLPQNFDPIHLVEINMPYSQLKKLWGGTKDLEMLKTIRLCHSQQLVDIDDLLKAQNLEVVDLQGCTRLQSFPATGQLLHLRVVNLSGCTEIKSFPEIPPNIETLNLQGTGIIELPLSIVNCLELNDCSRLRSLPNMVNLELLKALDLSGCSELETIQGFPRNLKELYLVGTAVRQVPQLPQSLEFFNAHGCVSLKSIRLDFKKLPVHYTFSNCFDLSPQVVNDFLVQAMANVIAKHIPRERHVTGFSQKTVQRSSRDSQQELNKTLAFSFCAPSHANQNSKLDLQPGSSSMTRLDPSWRNTLVGFAMLVQVAFSEGYCDDTDFGISCVCKWKNKEGHSHRREINLHCWALGKAVERDHTFVFFDVNMRPDTDEGNDPDIWADLVVFEFFPVNKQRKPLNDSCTVTRCGVRLITAVNCNTSIENISPVLSLDPMEVSGNEDEEVLRVRYAGLQEIYKALFLYIAGLFNDEDVGLVAPLIANIIDMDVSYGLKVLAYRSLIRVSSNGEIVMHYLLRQMGKEILHTESKKTDKLVDNIQSSMIATKEIEITRSKSRRKNNKEKRVVCVVDRGSRSSDLWVWRKYGQKPIKSSPYPRSYYRCASSKGCFARKQVERSRTDPNVSVITYISEHNHPFPTLRNTLAGSTRSSSSKCSDVTTSASSTVSQDKEGPDKSHLPSSPASPPYAAMVVKEEDMEQWDNMEFDVDVEEDTFIPELFPEDTFADMDKLEENSQTMFLSRRSSGGNMEAQGKNSSDDRELKGKKKKFFEMRLVLSGASSFTSNLFCSSQQVNGRGKELKNPISLNHNKDLDFLLKKLAPPLTAVLLAVSPICFPPESLGQTLDIQRGATLFNRACIGCHDTGGNIIQPGATLFTKDLERNGVDTEEEIYRVTYFGKGRMPGFGEKCTPRGQCTFGPRLQDEEIKLLAEFVKFQADQGWPTVSTD

SEQ ID NO: 100676 - protein, 1441 aa, Arabidopsis thaliana
  peptide (1)..(1441): Ceres Seq. ID no. 13605766
MILPGNRTVSLDKLVKVLDCQKNKDQVVVPVLYGVRSSETEWLSALDSKGFSSVHHSRKECSDSQLVKETVRDVYEKLFYMERIGIYSKLLEIEKMINKQPLDIRCVGIWGMPGIGKTTLAKAVFDQMSGEFDAHCFIEDYTKAIQEKGVYCLLEEQFLKENAGASGTVTKLSLLRDRLNNKRVLVVLDDVRSPLVVESFLGGFDWFGPKSLIIITSKDKSVFRLCRVNQIYEVQGLNEKEALQLFSLCASIDDMAEQNLHEVSMKVIKYANGHPLALNLYGRELMGKKRPPEMEIAFLKLKECPPAIFVDAIKSSYDTLNDREKNIFLDIACFFQGENVDYVMQLLEGCGFFPHVGIDVLVEKSLVTISENRVRMHNLIQDVGRQIINRETRQTKRRSRLWEPCSIKYLLEDKEQNENEEQKTTFERAQVPEEIEGMFLDTSNLSFDIKHVAFDNMLNLRLFKIYSSNPEVHHVNNFLKGSLSSLPNVLRLLHWENYPLQFLPQNFDPIHLVEINMPYSQLKKLWGGTKDLEMLKTIRLCHSQQLVDIDDLLKAQNLEVVDLQGCTRLQSFPATGQLLHLRVVNLSGCTEIKSFPEIPPNIETLNLQGTGIIELPLSIVNCLELNDCSRLRSLPNMVNLELLKALDLSGCSELETIQGFPRNLKELYLVGTAVRQVPQLPQSLEFFNAHGCVSLKSIRLDFKKLPVHYTFSNCFDLSPQVVNDFLVQAMANVIAKHIPRERHVTGFSQKTVQRSSRDSQQELNKTLAFSFCAPSHANQNSKLDLQPGSSSMTRLDPSWRNTLVGFAMLVQVAFSEGYCDDTDFGISCVCKWKNKEGHSHRREINLHCWALGKAVERDHTFVFFDVNMRPDTDEGNDPDIWADLVVFEFFPVNKQRKPLNDSCTVTRCGVRLITAVNCNTSIENISPVLSLDPMEVSGNEDEEVLRVRYAGLQEIYKALFLYIAGLFNDEDVGLVAPLIANIIDMDVSYGLKVLAYRSLIRVSSNGEIVMHYLLRQMGKEILHTESKKTDKLVDNIQSSMIATKEIEITRSKSRRKNNKEKRVVCVVDRGSRSSDLWVWRKYGQKPIKSSPYPRSYYRCASSKGCFARKQVERSRTDPNVSVITYISEHNHPFPTLRNTLAGSTRSSSSKCSDVTTSASSTVSQDKEGPDKSHLPSSPASPPYAAMVVKEEDMEQWDNMEFDVDVEEDTFIPELFPEDTFADMDKLEENSQTMFLSRRSSGGNMEAQGKNSSDDRELKGKKKKFFEMRLVLSGASSFTSNLFCSSQQVNGRGKELKNPISLNHNKDLDFLLKKLAPPLTAVLLAVSPICFPPESLGQTLDIQRGATLFNRACIGCHDTGGNIIQPGATLFTKDLERNGVDTEEEIYRVTYFGKGRMPGFGEKCTPRGQCTFGPRLQDEEIKLLAEFVKFQADQGWPTVSTD

SEQ ID NO: 100677 - DNA, 1716 bp, Arabidopsis thaliana
  misc_feature (1)..(1716): Ceres Seq. ID no. 13605793
  misc_feature (1)..(1716): Ortholog of  Ceres SEQ ID NO 13660287 as cited in SEQ ID NO 67316
acttacaattttttttgtcatctttatcaacaaacaaacaactatctctgcaaatttggctgaaacctcttaaaagttctttgctctgttccaaattatccatattttctactaacaataatgtcagaaacatcaaagtcagagtctttagatccagaagtctctgaagggctttgttcaaagaccttgatgcagagcattgttcatgagctgaagctgcagatgagaattggtttgccattggtggttatgaatttgttgtggttcggtaagatgaccaccacatctgtgtttcttggccgtcaaggtgagcttaacctagccggaggttcattagggttttcctttgcaaacgttactggcttttctgttttgtatggtatttctgctgcaatggagcctatttgtggccaagctttcggagccaagaactttaagcttcttcataaaaccctttttatggcagtgctcttgctactcttgatttcggtaccaatttctttcttgtggctcaatgttcacaagatccttactggttttggtcaaagagaagatatttccttcatagccaagaaatatcttctctaccttcttccagagttgccaatcctctcttttctttgtccacttaaggcttatttaagctcacaaggtgttactcttcccatcatgttcacaacagctgcagccacttctcttcatatccccatcaacatagtcctctctaaagcaagaggaattgaaggagttgcaatggcggtttggataactgattttattgttgtgattcttctaactggatatgtgatagtcgtagagcgaatgaaagagaacaaatggaaacaaggtggctggttaaaccaaagtgctcaagactggctcacactgatcaagcttagtggaccatgttgtctcaccgtgtgccttgaatggtggtgctacgagatcttggtccttttaaccgggaggttaccaaacccggtgcaagctgtatcaatcttgattatagttttcaacttcgactacttgctttacgcggtgatgctctctttaggcacgtgtgtggcaacaagagtgtccaatgagctcggcgcaaataatcctaagggagcttatagagcagcttacactacactcattgtgggtattatttcaggctgcattggagcattagtgatgatagcatttagaggtttttgggggtctttgtatactcaccatgaccaactcatcttaaacggtgtgaagaagatgatgctgataatggcggttatcgaagttgtaaacttcccattaatggtttgtggagagatagtccgcggaacagcgaaaccgtctcttggaatgtatgcaaatcttagtggattctatctattggctttgcctttaggggcaactttggcgttcaaggctaaacaagggcttcaagggttcttgatcgggttatttgttggtatatctctctgtctctcgatattgctcatctttattgcgaggatagattgggagaaagaagctgggaaagcacagattctgacatgtaacacagaggacgaacaaacttcacaaggttcaggacaagatagccactcatagaaagtactcactgaggtatcttctagctagagatgtagtcaaatttaccttgtgagagtatttatcttcttgatgtaactgtaactatgaattgaggatccaaactttgtattattgtgt

SEQ ID NO: 100678 - protein, 491 aa, Arabidopsis thaliana
  peptide (1)..(491): Ceres Seq. ID no. 13605794
MSETSKSESLDPEVSEGLCSKTLMQSIVHELKLQMRIGLPLVVMNLLWFGKMTTTSVFLGRQGELNLAGGSLGFSFANVTGFSVLYGISAAMEPICGQAFGAKNFKLLHKTLFMAVLLLLLISVPISFLWLNVHKILTGFGQREDISFIAKKYLLYLLPELPILSFLCPLKAYLSSQGVTLPIMFTTAAATSLHIPINIVLSKARGIEGVAMAVWITDFIVVILLTGYVIVVERMKENKWKQGGWLNQSAQDWLTLIKLSGPCCLTVCLEWWCYEILVLLTGRLPNPVQAVSILIIVFNFDYLLYAVMLSLGTCVATRVSNELGANNPKGAYRAAYTTLIVGIISGCIGALVMIAFRGFWGSLYTHHDQLILNGVKKMMLIMAVIEVVNFPLMVCGEIVRGTAKPSLGMYANLSGFYLLALPLGATLAFKAKQGLQGFLIGLFVGISLCLSILLIFIARIDWEKEAGKAQILTCNTEDEQTSQGSGQDSHS

SEQ ID NO: 100679 - protein, 468 aa, Arabidopsis thaliana
  peptide (1)..(468): Ceres Seq. ID no. 13605795
MQSIVHELKLQMRIGLPLVVMNLLWFGKMTTTSVFLGRQGELNLAGGSLGFSFANVTGFSVLYGISAAMEPICGQAFGAKNFKLLHKTLFMAVLLLLLISVPISFLWLNVHKILTGFGQREDISFIAKKYLLYLLPELPILSFLCPLKAYLSSQGVTLPIMFTTAAATSLHIPINIVLSKARGIEGVAMAVWITDFIVVILLTGYVIVVERMKENKWKQGGWLNQSAQDWLTLIKLSGPCCLTVCLEWWCYEILVLLTGRLPNPVQAVSILIIVFNFDYLLYAVMLSLGTCVATRVSNELGANNPKGAYRAAYTTLIVGIISGCIGALVMIAFRGFWGSLYTHHDQLILNGVKKMMLIMAVIEVVNFPLMVCGEIVRGTAKPSLGMYANLSGFYLLALPLGATLAFKAKQGLQGFLIGLFVGISLCLSILLIFIARIDWEKEAGKAQILTCNTEDEQTSQGSGQDSHS

SEQ ID NO: 100680 - protein, 457 aa, Arabidopsis thaliana
  peptide (1)..(457): Ceres Seq. ID no. 13605796
MRIGLPLVVMNLLWFGKMTTTSVFLGRQGELNLAGGSLGFSFANVTGFSVLYGISAAMEPICGQAFGAKNFKLLHKTLFMAVLLLLLISVPISFLWLNVHKILTGFGQREDISFIAKKYLLYLLPELPILSFLCPLKAYLSSQGVTLPIMFTTAAATSLHIPINIVLSKARGIEGVAMAVWITDFIVVILLTGYVIVVERMKENKWKQGGWLNQSAQDWLTLIKLSGPCCLTVCLEWWCYEILVLLTGRLPNPVQAVSILIIVFNFDYLLYAVMLSLGTCVATRVSNELGANNPKGAYRAAYTTLIVGIISGCIGALVMIAFRGFWGSLYTHHDQLILNGVKKMMLIMAVIEVVNFPLMVCGEIVRGTAKPSLGMYANLSGFYLLALPLGATLAFKAKQGLQGFLIGLFVGISLCLSILLIFIARIDWEKEAGKAQILTCNTEDEQTSQGSGQDSHS

SEQ ID NO: 100681 - DNA, 2117 bp, Arabidopsis thaliana
  misc_feature (1)..(2117): Ceres Seq. ID no. 13605801
  misc_feature (1)..(2117): Ortholog of  Ceres SEQ ID NO 14312351 as cited in SEQ ID NO 55278
  misc_feature (1)..(2117): Ortholog of  Ceres SEQ ID NO 13655237 as cited in SEQ ID NO 62892
  misc_feature (1)..(2117): Ortholog of  Ceres SEQ ID NO 13597268 as cited in SEQ ID NO 63929
  misc_feature (1)..(2117): Ortholog of  Ceres SEQ ID NO 13659840 as cited in SEQ ID NO 66970
  misc_feature (1)..(2117): Ortholog of  Ceres SEQ ID NO 13660544 as cited in SEQ ID NO 67401
aatcaaatttgtttcatatatcactcaaagcttgatgagaagaaacacagatcaagaaagcccaattatgtcttattactcctctttcttcttccttttcctcttctcctttctcacgagtttcagagtttctgctcaagatcccacttacgtataccacacctgtcaaaatacggcaaattacacaagtaacagcacttacaacaacaatctcaagacccttttggcttctctttcttcccgcaacgcttcctactccaccggattccaaaacgccaccgtcggccaagctccagacagagtcaccggacttttcaactgccgtggagatgtctcaacggaagtttgccgtagatgcgtctcctttgccgtcaacgacaccttaactcggtgtcctaaccagaaagaagccacactttattacgatgagtgtgtacttagatactctaaccagaatattctctcgacactaataaccaccggtggagttatcttggttaacacccggaatgtgacatctaaccaactagacctgttaagtgatttggttttgcctactctgaaccaagccgccaccgtagccttgaacagttccaaaaaattcggtacgagaaaaaacaattttactgcgttgcagagtttctatggactggttcagtgcacacctgatctcacgagacaagactgttcgcgttgtctccaactggtcatcaatcaaatacctactgacagaattggtgcaagaattattaatccgagctgtacttcaagatacgagatctacgcgttttacaccgaatccgccgttccaccaccaccaccaccaccgtcaatttctactcctccagtttcagctcctccgcgatctggaaaagatgggaattcaaaggtgttagtgatagccattgttgtgcctattatagtggctgttctgctttttatagctggttattgtttccttacaagaagggcaaggaagagttattacacaccatctgcatttgctggagatgatatcacaacagcagactcactacagcttgattatagaacaattcaaactgcaacagatgattttgtagagagtaataagattggtcaaggtggatttggtgaggtttacaagggtactttatcggatgggactgaagttgcggtgaagcgactatcaaagtcatcaggacaaggtgaagtagagttcaagaacgaggttgttcttgttgcaaagctacaacatagaaatctggttagacttcttgggttttgtctagacggagaagaaagagtactggtctacgagtatgtgcccaacaaaagtcttgattacttcctctttgaccctgcaaagaaaggccagctggattggactcgacgatacaagattatcggtggagttgctcgagggattctgtatcttcatcaagactcacgactcacaatcatacaccgtgacctcaaagccagtaacattctcttggacgcggatatgaatcctaaaattgcagattttggaatggctaggatctttggattggaccaaaccgaagagaacacaagcagaatagttggtacctatggttacatgtctcccgagtatgcaatgcatggtcagtactcaatgaaatctgatgtctatagcttcggagtgttagttcttgagattataagtggcaagaagaatagcagcttctaccaaacagatggtgcacatgacttggtctcatatgcttgggggctttggagtaacgggcgaccattagaactcgtggatccagctattgtagaaaattgccaaaggaatgaagttgttcgatgtgtccatatcggtcttttatgtgttcaagaagatcctgctgagcgtccgacgttgtcaaccattgttctgatgctcactagtaacactgtgactttacccgtgccacggcaacccggtcttttctttcagagtagaattggaaaagacccgcttgatacagatacaacgagcaaatctcttctagggtctgttgacgatgcatccatcacagatatacatcctcgatgatgatgagtttttcccttcatacctgattcctgaatctattggtgttgaaaataagttaaaaacttcttttgtt

SEQ ID NO: 100682 - protein, 680 aa, Arabidopsis thaliana
  peptide (1)..(680): Ceres Seq. ID no. 13605802
IKFVSYITQSLMRRNTDQESPIMSYYSSFFFLFLFSFLTSFRVSAQDPTYVYHTCQNTANYTSNSTYNNNLKTLLASLSSRNASYSTGFQNATVGQAPDRVTGLFNCRGDVSTEVCRRCVSFAVNDTLTRCPNQKEATLYYDECVLRYSNQNILSTLITTGGVILVNTRNVTSNQLDLLSDLVLPTLNQAATVALNSSKKFGTRKNNFTALQSFYGLVQCTPDLTRQDCSRCLQLVINQIPTDRIGARIINPSCTSRYEIYAFYTESAVPPPPPPPSISTPPVSAPPRSGKDGNSKVLVIAIVVPIIVAVLLFIAGYCFLTRRARKSYYTPSAFAGDDITTADSLQLDYRTIQTATDDFVESNKIGQGGFGEVYKGTLSDGTEVAVKRLSKSSGQGEVEFKNEVVLVAKLQHRNLVRLLGFCLDGEERVLVYEYVPNKSLDYFLFDPAKKGQLDWTRRYKIIGGVARGILYLHQDSRLTIIHRDLKASNILLDADMNPKIADFGMARIFGLDQTEENTSRIVGTYGYMSPEYAMHGQYSMKSDVYSFGVLVLEIISGKKNSSFYQTDGAHDLVSYAWGLWSNGRPLELVDPAIVENCQRNEVVRCVHIGLLCVQEDPAERPTLSTIVLMLTSNTVTLPVPRQPGLFFQSRIGKDPLDTDTTSKSLLGSVDDASITDIHPR

SEQ ID NO: 100683 - protein, 669 aa, Arabidopsis thaliana
  peptide (1)..(669): Ceres Seq. ID no. 13605803
MRRNTDQESPIMSYYSSFFFLFLFSFLTSFRVSAQDPTYVYHTCQNTANYTSNSTYNNNLKTLLASLSSRNASYSTGFQNATVGQAPDRVTGLFNCRGDVSTEVCRRCVSFAVNDTLTRCPNQKEATLYYDECVLRYSNQNILSTLITTGGVILVNTRNVTSNQLDLLSDLVLPTLNQAATVALNSSKKFGTRKNNFTALQSFYGLVQCTPDLTRQDCSRCLQLVINQIPTDRIGARIINPSCTSRYEIYAFYTESAVPPPPPPPSISTPPVSAPPRSGKDGNSKVLVIAIVVPIIVAVLLFIAGYCFLTRRARKSYYTPSAFAGDDITTADSLQLDYRTIQTATDDFVESNKIGQGGFGEVYKGTLSDGTEVAVKRLSKSSGQGEVEFKNEVVLVAKLQHRNLVRLLGFCLDGEERVLVYEYVPNKSLDYFLFDPAKKGQLDWTRRYKIIGGVARGILYLHQDSRLTIIHRDLKASNILLDADMNPKIADFGMARIFGLDQTEENTSRIVGTYGYMSPEYAMHGQYSMKSDVYSFGVLVLEIISGKKNSSFYQTDGAHDLVSYAWGLWSNGRPLELVDPAIVENCQRNEVVRCVHIGLLCVQEDPAERPTLSTIVLMLTSNTVTLPVPRQPGLFFQSRIGKDPLDTDTTSKSLLGSVDDASITDIHPR

SEQ ID NO: 100684 - protein, 658 aa, Arabidopsis thaliana
  peptide (1)..(658): Ceres Seq. ID no. 13605804
MSYYSSFFFLFLFSFLTSFRVSAQDPTYVYHTCQNTANYTSNSTYNNNLKTLLASLSSRNASYSTGFQNATVGQAPDRVTGLFNCRGDVSTEVCRRCVSFAVNDTLTRCPNQKEATLYYDECVLRYSNQNILSTLITTGGVILVNTRNVTSNQLDLLSDLVLPTLNQAATVALNSSKKFGTRKNNFTALQSFYGLVQCTPDLTRQDCSRCLQLVINQIPTDRIGARIINPSCTSRYEIYAFYTESAVPPPPPPPSISTPPVSAPPRSGKDGNSKVLVIAIVVPIIVAVLLFIAGYCFLTRRARKSYYTPSAFAGDDITTADSLQLDYRTIQTATDDFVESNKIGQGGFGEVYKGTLSDGTEVAVKRLSKSSGQGEVEFKNEVVLVAKLQHRNLVRLLGFCLDGEERVLVYEYVPNKSLDYFLFDPAKKGQLDWTRRYKIIGGVARGILYLHQDSRLTIIHRDLKASNILLDADMNPKIADFGMARIFGLDQTEENTSRIVGTYGYMSPEYAMHGQYSMKSDVYSFGVLVLEIISGKKNSSFYQTDGAHDLVSYAWGLWSNGRPLELVDPAIVENCQRNEVVRCVHIGLLCVQEDPAERPTLSTIVLMLTSNTVTLPVPRQPGLFFQSRIGKDPLDTDTTSKSLLGSVDDASITDIHPR

SEQ ID NO: 100685 - DNA, 1440 bp, Arabidopsis thaliana
  misc_feature (1)..(1440): Ceres Seq. ID no. 13605824
  misc_feature (1)..(1440): Ortholog of  Ceres SEQ ID NO 14314511 as cited in SEQ ID NO 52424
tttctttcttcttcttccgtttcttttgcctctttcttttgtcttcttccttctatttttttgtggctttaaatttattgggttttgttcttcttcttcttctatagccgtttcatcttcacaatagcatcttcttctttttttccctgtcaagatcctgaatcatcggatctagaaggaaactagagtttgtgaaatcagattaaatcttgtgagaaatctctgaaaaagctgcaggtttctatacttctgttagtactctaattcaaccgagaaagtcgaatacatacacacattcataacacttttgaggaagatgttaagtggaaacaatggaaacactgcaccaccggttttcatgaacgagaaccagttgcaataccagacaaacctacgatcgaatcagcttcacttgctcggaaacatgggaggtggatgcactgttgatccagtaaactactttgctaacgataacctcgttccaatgatccgccctaacaaaagaggaagggaagccgaaagcattagtaacaacatccaaagacaacagcagaagcttcaaatgtctttgaactataattataacaacactagtgttcgagaagaagtgcctaaagagaatctagtctcaactggtctgagactatcttatgacgacgatgaacacaattcttcagtgacttctgctagtggtagcattttagctgcttctccaatctttcagtcactcgatgatagtcttcggattgatctccatagacaaaaagatgagtttgaccagttcatcaagatccaggcagctcaaatggcgaaaggtgtgagggatatgaaacagagacacatcgcgtcttttctcacaacattagagaaaggagtgagcaagaagcttcaagagaaagatcacgagatcaatgatatgaacaagaagaataaagagcttgtggagcggataaagcaagtggcaatggaagctcagaattggcactacagagcaaagtacaatgagtctgtggttaatgtcttaaaggcaaatctccaacaagcaatgtcacacaacaacagtgtgatagctgctgcagatcaaggcaaagaaggttttggagacagcgaaatagatgatgcagcttcatcatacatcgatccaaacaacaataacaacaacaacatggggattcatcagaggatgagatgcaaaatgtgcaacgtcaaggaagtatcggtgttgatagtgccatgtcggcacttgagtttgtgtaaagaatgtgatgtattcactaagatttgtcctgtatgcaagtctttgaaaagttcttgcgtccaagtcttcttttcttgatttgtgaccaaatggaacagaaggaaaaagagaatccattatataagtctttcatactctttttaaaaaaatattttgttatataaatttatttgtatcggtgt

SEQ ID NO: 100686 - protein, 339 aa, Arabidopsis thaliana
  peptide (1)..(339): Ceres Seq. ID no. 13605825
MLSGNNGNTAPPVFMNENQLQYQTNLRSNQLHLLGNMGGGCTVDPVNYFANDNLVPMIRPNKRGREAESISNNIQRQQQKLQMSLNYNYNNTSVREEVPKENLVSTGLRLSYDDDEHNSSVTSASGSILAASPIFQSLDDSLRIDLHRQKDEFDQFIKIQAAQMAKGVRDMKQRHIASFLTTLEKGVSKKLQEKDHEINDMNKKNKELVERIKQVAMEAQNWHYRAKYNESVVNVLKANLQQAMSHNNSVIAAADQGKEGFGDSEIDDAASSYIDPNNNNNNNMGIHQRMRCKMCNVKEVSVLIVPCRHLSLCKECDVFTKICPVCKSLKSSCVQVFFS

SEQ ID NO: 100687 - protein, 325 aa, Arabidopsis thaliana
  peptide (1)..(325): Ceres Seq. ID no. 13605826
MNENQLQYQTNLRSNQLHLLGNMGGGCTVDPVNYFANDNLVPMIRPNKRGREAESISNNIQRQQQKLQMSLNYNYNNTSVREEVPKENLVSTGLRLSYDDDEHNSSVTSASGSILAASPIFQSLDDSLRIDLHRQKDEFDQFIKIQAAQMAKGVRDMKQRHIASFLTTLEKGVSKKLQEKDHEINDMNKKNKELVERIKQVAMEAQNWHYRAKYNESVVNVLKANLQQAMSHNNSVIAAADQGKEGFGDSEIDDAASSYIDPNNNNNNNMGIHQRMRCKMCNVKEVSVLIVPCRHLSLCKECDVFTKICPVCKSLKSSCVQVFFS

SEQ ID NO: 100688 - protein, 303 aa, Arabidopsis thaliana
  peptide (1)..(303): Ceres Seq. ID no. 13605827
MGGGCTVDPVNYFANDNLVPMIRPNKRGREAESISNNIQRQQQKLQMSLNYNYNNTSVREEVPKENLVSTGLRLSYDDDEHNSSVTSASGSILAASPIFQSLDDSLRIDLHRQKDEFDQFIKIQAAQMAKGVRDMKQRHIASFLTTLEKGVSKKLQEKDHEINDMNKKNKELVERIKQVAMEAQNWHYRAKYNESVVNVLKANLQQAMSHNNSVIAAADQGKEGFGDSEIDDAASSYIDPNNNNNNNMGIHQRMRCKMCNVKEVSVLIVPCRHLSLCKECDVFTKICPVCKSLKSSCVQVFFS

SEQ ID NO: 100689 - DNA, 1792 bp, Arabidopsis thaliana
  misc_feature (1)..(1792): Ceres Seq. ID no. 13605828
  misc_feature (1)..(1792): Ortholog of  Ceres SEQ ID NO 15169749 as cited in SEQ ID NO 55675
  misc_feature (1)..(1792): Ortholog of  Ceres SEQ ID NO 12612090 as cited in SEQ ID NO 58429
  misc_feature (1520)..(1520): n is a, c, t, g, unknown, or other
  misc_feature (1521)..(1521): n is a, c, t, g, unknown, or other
  misc_feature (1558)..(1558): n is a, c, t, g, unknown, or other
  misc_feature (1565)..(1565): n is a, c, t, g, unknown, or other
  misc_feature (1570)..(1570): n is a, c, t, g, unknown, or other
  misc_feature (1574)..(1574): n is a, c, t, g, unknown, or other
atgataactggatacagcacgccaagtgcacatgttctaatgagctctcgggcattcaagtcatcatcatatagagctgcagcaggacagactcaacattatcttgctcgaagttcattgcctgtcgtaaagaactcgtggggatcaccaccttcacctttcaatgagcttccgagagtgtcaagaggcatgtgtgcctctgtcatatctctcagcctcgtcttctctgcttctgaatggagaacaagaaaaactcttttgactccacgagcgtcaaaagatgtaccttctagcttccgatttcccccgatgaccaagaagccacaatggtggtggagaactttggcttgcctgccttacctaatgccactgcatgaaacttggatgtatgcagaaaccgcttaccatctccacccattcctagaagattttgaattcttaacctacccatttctaggcgccataggaagattaccaagctggttcctcatggcttacttttttgtagcttatctagggatagtgcgaagaaaagaatggcctcacttcttcaggttccatgtagtgatgggtatgctgcttgaaatcgcactccaggttatagggaccgttagcaagtggatgcctcttggagtctattggggtaagtttgggatgcatttctggactgctgttgcgtttgcttatctgtttaccgtccttgaaagcatacggtgtgcacttgcggcccacaagcagcgaacaggttgtaccggaaaaaggaagttcaccgacgtcgttcccctctccaagttcgacgacaatctcctcctctctgtgataaagaatcatctcaagcctggcccctggattcacaagctcaagcctttttgtgatgtggatcttgattctctcaaactttttatacgccaatacccaaagggtgcaaaggctcctttcaaggagctggacatcaaagctcctttgaggaaacagcttgccaaagttgttatattagagtacccggtgatccatgtatatctaccttcacagagctatgaatttaaagttatcaaagactttaacacgacacctaatcctaatgattcgttatacgatggtcatggatgcacaaatggtataaccttccgagaagaagaaatagaagaagacgacattgactcctttgagccagaggttcttggtcttatgaaacaaatgaactataacccgtgtctgcgagtctcagagaaaagcaaggcagagggcgttggtaccaacaactcaaatcctcaggttgataccacagaacaagaagatgccggtaacatggagcttgaatttgagcaagggttaatagacacatactcagatctttttgcggagatgaacccaggtgactatttcaactttgaatgtgaatttgcaaaggggttggattcggatgataattgcaatctccaaaatttagatactgatttcatcgctgatggactagatttagaagaaggggaaatcgtcgaatgatggtcatagtcttnntctggcaaaaaggaattactctctgtgaaacattttngaggatnatgtncatncctgaagctctcttgttcgagcacattagctatacttggtaatagccaaagcttttactggaatgcaataagccacagcactgatggtcataagttttcggtctgggctttgatcaacaggtatttcttttgtagtaaaccagattactaggctgttctgtggtttgtagcaaacttgattgtttacatacaagatagttaacttaagaatgtctccg

SEQ ID NO: 100690 - protein, 501 aa, Arabidopsis thaliana
  peptide (1)..(501): Ceres Seq. ID no. 13605829
MITGYSTPSAHVLMSSRAFKSSSYRAAAGQTQHYLARSSLPVVKNSWGSPPSPFNELPRVSRGMCASVISLSLVFSASEWRTRKTLLTPRASKDVPSSFRFPPMTKKPQWWWRTLACLPYLMPLHETWMYAETAYHLHPFLEDFEFLTYPFLGAIGRLPSWFLMAYFFVAYLGIVRRKEWPHFFRFHVVMGMLLEIALQVIGTVSKWMPLGVYWGKFGMHFWTAVAFAYLFTVLESIRCALAAHKQRTGCTGKRKFTDVVPLSKFDDNLLLSVIKNHLKPGPWIHKLKPFCDVDLDSLKLFIRQYPKGAKAPFKELDIKAPLRKQLAKVVILEYPVIHVYLPSQSYEFKVIKDFNTTPNPNDSLYDGHGCTNGITFREEEIEEDDIDSFEPEVLGLMKQMNYNPCLRVSEKSKAEGVGTNNSNPQVDTTEQEDAGNMELEFEQGLIDTYSDLFAEMNPGDYFNFECEFAKGLDSDDNCNLQNLDTDFIADGLDLEEGEIVE

SEQ ID NO: 100691 - protein, 488 aa, Arabidopsis thaliana
  peptide (1)..(488): Ceres Seq. ID no. 13605830
MSSRAFKSSSYRAAAGQTQHYLARSSLPVVKNSWGSPPSPFNELPRVSRGMCASVISLSLVFSASEWRTRKTLLTPRASKDVPSSFRFPPMTKKPQWWWRTLACLPYLMPLHETWMYAETAYHLHPFLEDFEFLTYPFLGAIGRLPSWFLMAYFFVAYLGIVRRKEWPHFFRFHVVMGMLLEIALQVIGTVSKWMPLGVYWGKFGMHFWTAVAFAYLFTVLESIRCALAAHKQRTGCTGKRKFTDVVPLSKFDDNLLLSVIKNHLKPGPWIHKLKPFCDVDLDSLKLFIRQYPKGAKAPFKELDIKAPLRKQLAKVVILEYPVIHVYLPSQSYEFKVIKDFNTTPNPNDSLYDGHGCTNGITFREEEIEEDDIDSFEPEVLGLMKQMNYNPCLRVSEKSKAEGVGTNNSNPQVDTTEQEDAGNMELEFEQGLIDTYSDLFAEMNPGDYFNFECEFAKGLDSDDNCNLQNLDTDFIADGLDLEEGEIVE

SEQ ID NO: 100692 - protein, 438 aa, Arabidopsis thaliana
  peptide (1)..(438): Ceres Seq. ID no. 13605831
MCASVISLSLVFSASEWRTRKTLLTPRASKDVPSSFRFPPMTKKPQWWWRTLACLPYLMPLHETWMYAETAYHLHPFLEDFEFLTYPFLGAIGRLPSWFLMAYFFVAYLGIVRRKEWPHFFRFHVVMGMLLEIALQVIGTVSKWMPLGVYWGKFGMHFWTAVAFAYLFTVLESIRCALAAHKQRTGCTGKRKFTDVVPLSKFDDNLLLSVIKNHLKPGPWIHKLKPFCDVDLDSLKLFIRQYPKGAKAPFKELDIKAPLRKQLAKVVILEYPVIHVYLPSQSYEFKVIKDFNTTPNPNDSLYDGHGCTNGITFREEEIEEDDIDSFEPEVLGLMKQMNYNPCLRVSEKSKAEGVGTNNSNPQVDTTEQEDAGNMELEFEQGLIDTYSDLFAEMNPGDYFNFECEFAKGLDSDDNCNLQNLDTDFIADGLDLEEGEIVE

SEQ ID NO: 100693 - DNA, 1595 bp, Arabidopsis thaliana
  misc_feature (1)..(1595): Ceres Seq. ID no. 13605840
  misc_feature (1)..(1595): Ortholog of  Ceres SEQ ID NO 13594345 as cited in SEQ ID NO 58043
  misc_feature (1)..(1595): Ortholog of  Ceres SEQ ID NO 12614112 as cited in SEQ ID NO 60891
  misc_feature (1)..(1595): Ortholog of  Ceres SEQ ID NO 14302832 as cited in SEQ ID NO 64926
  misc_feature (1)..(1595): Ortholog of  Ceres SEQ ID NO 13662880 as cited in SEQ ID NO 65422
  misc_feature (1)..(1595): Ortholog of  Ceres SEQ ID NO 12779098 as cited in SEQ ID NO 67698
  misc_feature (1)..(1595): Ortholog of  Ceres SEQ ID NO 13596180 as cited in SEQ ID NO 67941
  misc_feature (1)..(1595): Ortholog of  Ceres SEQ ID NO 13591190 as cited in SEQ ID NO 68044
  misc_feature (1)..(1595): Ortholog of  Ceres SEQ ID NO 13596089 as cited in SEQ ID NO 68373
aaggagagacacagattcttgtattgatactcacttcagtggagctaagacaagtagaaaaaaaatggcgccaccgcattttctactggtaacgtttccggcgcaaggtcacgtgaacccatctctccgttttgctcgtcggctcatcaaaagaaccggcgcacgtgtcactttcgtcacttgtgtctccgtcttccacaactccatgatcgcaaaccacaacaaagtcgaaaatctctctttccttactttctccgacggtttcgacgatggaggcatttccacctacgaagaccgtcagaaaaggtcggtgaatctcaaggttaacggcgataaggcactatcggatttcatcgaagctactaagaatggtgactctcccgtgacttgcttgatctacacgattcttctcaattgggctccaaaagtagcacgtagatttcaacttccctccgctcttctctggatccaaccggctttggttttcaacatctattacactcatttcatgggaaacaagtccgttttcgagttacctaatctgtcttctctggaaatcagagatcttccatctttcctcacaccttccaacacaaacaaaggcgcatacgatgcgtttcaagaaatgatggagtttctcataaaagaaaccaaaccgaaaattctcatcaacactttcgattcgctggaaccagaggccttaacggctttcccgaatatcgatatggtggcggttggtcctttacttcccacggagattttctcaggaagcaccaacaaatcagttaaagatcaaagtagtagttatacactttggctagactcgaaaacagagtcctctgttatttacgtttcctttggaacaatggttgagttgtccaagaaacagatagaggaactagcgagagcactcatagaagggaaacgaccgtttttgtgggttataactgataaatccaacagagaaacgaaaacagaaggagaagaagagacagagattgagaagatagctggattcagacacgagcttgaagaggttgggatgattgtgtcgtggtgttcgcagatagaggttttaagtcaccgagccgtaggttgttttgtgactcattgtgggtggagctcgacgctggagagtttggttcttggcgttccggttgtggcgtttccgatgtggtcggatcaaccgacgaacgcgaagctactggaagaaagttggaagactggtgtgagggtaagagagaacaaggatggtttggtggagagaggagagatcaggaggtgtttggaagccgtgatggaggagaagtcggtggagttgagggaaaacgcaaagaaatggaagcgtttagcgatggaagcgggtagagaaggaggatcttcggataagaacatggaggcttttgtggaggatatttgtggagaatctcttattcaaaacttgtgtgaagcagaggaggtaaaagtaaagtaaataaaggacaaaagagttggtgtctagaagtggcggagtgttatttgctaatactgtcactttgtaatatcaaattcaattaaaacataaaatttactccatctagataaatatgtttttt

SEQ ID NO: 100694 - protein, 490 aa, Arabidopsis thaliana
  peptide (1)..(490): Ceres Seq. ID no. 13605841
RRDTDSCIDTHFSGAKTSRKKMAPPHFLLVTFPAQGHVNPSLRFARRLIKRTGARVTFVTCVSVFHNSMIANHNKVENLSFLTFSDGFDDGGISTYEDRQKRSVNLKVNGDKALSDFIEATKNGDSPVTCLIYTILLNWAPKVARRFQLPSALLWIQPALVFNIYYTHFMGNKSVFELPNLSSLEIRDLPSFLTPSNTNKGAYDAFQEMMEFLIKETKPKILINTFDSLEPEALTAFPNIDMVAVGPLLPTEIFSGSTNKSVKDQSSSYTLWLDSKTESSVIYVSFGTMVELSKKQIEELARALIEGKRPFLWVITDKSNRETKTEGEEETEIEKIAGFRHELEEVGMIVSWCSQIEVLSHRAVGCFVTHCGWSSTLESLVLGVPVVAFPMWSDQPTNAKLLEESWKTGVRVRENKDGLVERGEIRRCLEAVMEEKSVELRENAKKWKRLAMEAGREGGSSDKNMEAFVEDICGESLIQNLCEAEEVKVK

SEQ ID NO: 100695 - protein, 469 aa, Arabidopsis thaliana
  peptide (1)..(469): Ceres Seq. ID no. 13605842
MAPPHFLLVTFPAQGHVNPSLRFARRLIKRTGARVTFVTCVSVFHNSMIANHNKVENLSFLTFSDGFDDGGISTYEDRQKRSVNLKVNGDKALSDFIEATKNGDSPVTCLIYTILLNWAPKVARRFQLPSALLWIQPALVFNIYYTHFMGNKSVFELPNLSSLEIRDLPSFLTPSNTNKGAYDAFQEMMEFLIKETKPKILINTFDSLEPEALTAFPNIDMVAVGPLLPTEIFSGSTNKSVKDQSSSYTLWLDSKTESSVIYVSFGTMVELSKKQIEELARALIEGKRPFLWVITDKSNRETKTEGEEETEIEKIAGFRHELEEVGMIVSWCSQIEVLSHRAVGCFVTHCGWSSTLESLVLGVPVVAFPMWSDQPTNAKLLEESWKTGVRVRENKDGLVERGEIRRCLEAVMEEKSVELRENAKKWKRLAMEAGREGGSSDKNMEAFVEDICGESLIQNLCEAEEVKVK

SEQ ID NO: 100696 - protein, 422 aa, Arabidopsis thaliana
  peptide (1)..(422): Ceres Seq. ID no. 13605843
MIANHNKVENLSFLTFSDGFDDGGISTYEDRQKRSVNLKVNGDKALSDFIEATKNGDSPVTCLIYTILLNWAPKVARRFQLPSALLWIQPALVFNIYYTHFMGNKSVFELPNLSSLEIRDLPSFLTPSNTNKGAYDAFQEMMEFLIKETKPKILINTFDSLEPEALTAFPNIDMVAVGPLLPTEIFSGSTNKSVKDQSSSYTLWLDSKTESSVIYVSFGTMVELSKKQIEELARALIEGKRPFLWVITDKSNRETKTEGEEETEIEKIAGFRHELEEVGMIVSWCSQIEVLSHRAVGCFVTHCGWSSTLESLVLGVPVVAFPMWSDQPTNAKLLEESWKTGVRVRENKDGLVERGEIRRCLEAVMEEKSVELRENAKKWKRLAMEAGREGGSSDKNMEAFVEDICGESLIQNLCEAEEVKVK

SEQ ID NO: 100697 - DNA, 1820 bp, Arabidopsis thaliana
  misc_feature (1)..(1820): Ceres Seq. ID no. 13605855
  misc_feature (1)..(1820): Ortholog of  Ceres SEQ ID NO 14314945 as cited in SEQ ID NO 58031
  misc_feature (1)..(1820): Ortholog of  Ceres SEQ ID NO 13595833 as cited in SEQ ID NO 59877
  misc_feature (1)..(1820): Ortholog of  Ceres SEQ ID NO 13654452 as cited in SEQ ID NO 65792
  misc_feature (1)..(1820): Ortholog of  Ceres SEQ ID NO 13573778 as cited in SEQ ID NO 0
aaatcttctgatgcacactagttcgaaggatcctttaatgggagagagaatgttctacttcttcttcttcttcttcttcttcttcttcctcctctctcgtcggatctctctgatttagtgatttttcaaatttcaagttttcttcacctttaattttgtgtctcgttgatctctctttggacattctgctttggattctggaggcttctcattagatctctattagtgggtttaggtcaagttcttgaaatggataaggagaaatctcctgcaccaccacctagtggaggtcttcctccaccatcgggtcgttactctgcgttttcacctaatggaagtagctttgcaatgaaagctgaatcatcttttcctcctttgactccaagtggaagcaatagctcagatgctaaccgattcagccatgatattagccgaatgccggataatccacctaagaacctaggccatcgccgagctcattcagagattcttactcttcctgatgacttaagctttgatagtgatcttggtgtggttggtgctgctgatggaccttctttctctgatgatactgacgaggacttactctatatgtatcttgatatggaaaaattcaattcttctgctacatcgacttctcaaatgggtgagccatcagaaccgacttggaggaatgaattagcctcgacttctaaccttcagagtacacccggtagctctagtgaaagaccgagaattagacaccaacacagccaatcgatggatggttcaacaactatcaagcctgagatgcttatgtcagggaatgaagatgtgtctggagttgactctaagaaagccatctctgctgctaaactttctgagcttgctctcattgatccaaaacgcgccaagaggatatgggcaaacaggcagtctgctgcgaggtcaaaagaaaggaagatgagatacattgcagagctcgagagaaaagtacagactttacaaacagaggccacatctctctcagcccagttgactctcttacagagagatacaaatggcctgggtgttgaaaacaatgagcttaaactgcgagtacaaactatggagcaacaggtccacctacaggatgctttaaatgatgcactaaaggaggaagtccagcatcttaaggtattgacggggcaaggtccatcaaatggtacatcaatgaactacggttcttttggatcaaaccagcaattctatcccaataatcagtcgatgcacactatcttagccgcacaacagttacagcagctccagatccagtcacagaaacagcaacaacaacaacagcaacaccagcaacaacaacagcagcagcagcagcaatttcactttcaacagcagcaactgtaccagcttcagcagcagcaacggcttcaacaacaggaacaacaaagcggggcttcagagctaagaagacccatgccttctcctggtcagaaagagagtgtgacatcgcctgatcgtgaaactcccttgacaaaagactgagtctagactgtgctaatgtccaatttagtaagttactcttggaaaatcttctttttcatcgcaggctcatggatttgggatttactgcattatagagttaaaaacaagacagcttagaagttgcggatttagaagttgttagtgaagcttttgttctcgtctgttggtagtttacaatcttctctttgtatgatcctaagctcttaaaaagttcttggatttggtcatttggttagaaatgggtccttagtccaagtctgtagtcgtttaaccatattcatattctttgccttttgttc

SEQ ID NO: 100698 - protein, 423 aa, Arabidopsis thaliana; identical to SEQ ID NO: 41604
  peptide (1)..(423): Ceres Seq. ID no. 13605856

SEQ ID NO: 100699 - protein, 390 aa, Arabidopsis thaliana; identical to SEQ ID NO: 41605
  peptide (1)..(390): Ceres Seq. ID no. 13605857

SEQ ID NO: 100700 - protein, 361 aa, Arabidopsis thaliana; identical to SEQ ID NO: 41606
  peptide (1)..(361): Ceres Seq. ID no. 13605858

SEQ ID NO: 100701 - DNA, 3615 bp, Arabidopsis thaliana
  misc_feature (1)..(3615): Ceres Seq. ID no. 13605875
  misc_feature (1)..(3615): Ortholog of  Ceres SEQ ID NO 15224720 as cited in SEQ ID NO 0
atggccgccgacgaactgatgccgtctcacaggtcacacaggactcccaaatcaggtcctaccgcgaggaagaaatctgaactagataagaagaagcgtggaatctccgttgacaagcagaaaaaccttaaggcgtttggtgttaaatcggttgttcatgcgaagaaagcaaaacatcacgctgcggagaaggagcaaaagcggcttcatcttccgaaaattgatcgtaattatggcgaagctcctcctttcgtcgtcgtggttcaaggccccccaggagttggaaagtctctcgtgattaaatctcttgtgaaggaatttacaaaacagaatgtacccgaggttcgaggacctattaccattgtacaaggtaaacagagaaggtttcaatttgtggagtgcccgaatgatatcaatgcgatggtggattgtgcaaaggttgctgatctagccctacttgttgtagacgggagttatggttttgagatggaaacctttgaattcctcaatattatgcaagtgcatggatttcctagagttatgggtgttctcactcaccttgataagttcaatgatgttaagaagctgagaaaaacaaaacatcatctcaagcatcggttttggactgaaatatatcatggagctaaattgttttatttatctggtctcattcatgggaagtatacgccgcgtgaagttcacaacctcgcccgctttgtaattgttatcaagcctcagccattgacatggcgaacagcacatccttatgtgttggttgatcgccttgaagatgttacccctccggagaaagttcagatggataagaaatgcgatagaaatatcactgtgtttggttacctacgtggttgtaacttcaaaaaaaggatgaaggttcatattgctggagttggtgacttcattgtagctggggtgactgctttaactgatccttgtcctttaccttcagctggcaagaaaaaagggctgagggacagggataagcttttctatgctcctatgtccgggattggagatcttgtgtatgacaaagatgctgtttacatcaacataaatagtcaccaagttcagtactctaaaactgacgatggaaagggagaacctactaataaaggaaagggcagagatgttggtgaagatttggtaaagtcgttgcagaacacaaagtattctgttgatgagaaactagataagacattcattaacttttttggcaaaaagactagtgccagttcagaaacaaaacttaaggctgaagatgcgtatcactctttgccggaaggttctgacagtgagtctcaatctggcgatgatgaggaggatatagtaggtaatgaaagtgaaatgaagcaggaaactgagattcatggtggaaggttgaggaggaaagctatcttcaagacggacttgaatgaagatgattttgaggaagcagacgatcttgaattggattcatatgacccagatacatatgattttgaggaagcagacgatgctgaatcagacgataatgaagttgaagatggtggagatgactctgcttccgattcagccgatggtgaaccaggggattatcagatagatgataaggactctggtaacatatcacaatggaaagcacccttgaaggagatagccagaaagaagaaccccaacttgatgcaaattgtgtatggagcatcatcattagctactcccttgataaatgagaaccatgacattagtgatgatgacgaaagtgatgatgaagacttctttaagccaaaaggagaacaacacaagaatttaggtggtggattggatgtgggatatgtcaactcagaggattgttctaaatttgtgaattatggatacctaaagaattggaaagagaaagaagtatgtgagagcattcgtgatcgatttaccactggtgattggtcaaaagctgctctgagagacaaaaatttaggtactggcggtgagggagaagatgatgaactttatggtgattttgaggatctagagacgggagagaagcacaaaagccatgagaacttggaatcgggtgcaaatgaaaatgaagatgaagatgcagaagtcgttgagcgtgatgggaacaatcctcgtagtcaagccgatgaaccaggatacgctgataaattgaaggaagcgcaggaaattacaaaacagaggaatgagttagaatacaatgatcttgacgaggaaactcgaattgagttagcaggattccggactggaacatacttgaggctggagattcacaatgttccttatgagatggttgaattctttgatccttgtcatccaattctagttggaggtattggtttcggcgaggacaatgttggatatatgcaggcccggttgaagaaacataggtggcataagaaagtactaaagacaagagatcctattattgtgtctattggatggagacgctatcagactattcctgtatttgccattgaagatcgcaatggcaggcatcgaatgctcaagtatactccagaacacatgcactgccttgcttcgttctggggtcctcttgtcccacccaacactggctttgtcgctttccagaacctgtcaaacaatcaggcaggatttaggataacagcgacttctgtagttctggagtttaatcaccaggcccgtattgtaaagaaaatcaagctggttgggactccgtgcaagatcaagaaaaagactgcatttatcaaagacatgttcacttctgaccttgaaatagctcgatttgaaggttcatctgttcggacagttagtggcattagaggacaagtaaaaaaggctggaaaaaacatgcttgataacaaggctgaagaagggattgcgaggtgtacctttgaagatcaaatccatatgagcgacatggtattcttaagggcttggactacagtggaagttccacaattttacaatcctctaacgacagccttgcaaccccgcgataagacctggaatgggatgaaaacttttggcgaactccgtagagagctgaatattcctattccagtgaataaggattcactctacaaggcaatcgaaagaaagcaaaagaagttcaatccactacagattccaaagcgtctagaaaaagatttaccgtttatgtcgaaacccaaaaatataccaaagcggaaaagaccatcactagaggataaaagagcagttataatggaaccgaaagaaagaaaagagcatactatcatccagcaattccagctgcttcaacatcacacgatgaagaagaaaaaggcaacggatcagaagaagaggaaagagtatgaagcagagaaagctaagaatgaggaaataaataagaaacgtaggagagaagagagacgggacagatatcgtgaggaagataaacagaaaaagaagacgagaagaagccttgattaatttattaataccttatttcaacttttgtgtaatactaaaagttttgttttcatctctattgttcttctgtgttgttttttactttaaaacttatgaatttatcaatcacatttctcgaatgatcactttctaccccaaatttttgaaatactgaaacttttcttggttact

SEQ ID NO: 100702 - protein, 1147 aa, Arabidopsis thaliana
  peptide (1)..(1147): Ceres Seq. ID no. 13605876
MAADELMPSHRSHRTPKSGPTARKKSELDKKKRGISVDKQKNLKAFGVKSVVHAKKAKHHAAEKEQKRLHLPKIDRNYGEAPPFVVVVQGPPGVGKSLVIKSLVKEFTKQNVPEVRGPITIVQGKQRRFQFVECPNDINAMVDCAKVADLALLVVDGSYGFEMETFEFLNIMQVHGFPRVMGVLTHLDKFNDVKKLRKTKHHLKHRFWTEIYHGAKLFYLSGLIHGKYTPREVHNLARFVIVIKPQPLTWRTAHPYVLVDRLEDVTPPEKVQMDKKCDRNITVFGYLRGCNFKKRMKVHIAGVGDFIVAGVTALTDPCPLPSAGKKKGLRDRDKLFYAPMSGIGDLVYDKDAVYININSHQVQYSKTDDGKGEPTNKGKGRDVGEDLVKSLQNTKYSVDEKLDKTFINFFGKKTSASSETKLKAEDAYHSLPEGSDSESQSGDDEEDIVGNESEMKQETEIHGGRLRRKAIFKTDLNEDDFEEADDLELDSYDPDTYDFEEADDAESDDNEVEDGGDDSASDSADGEPGDYQIDDKDSGNISQWKAPLKEIARKKNPNLMQIVYGASSLATPLINENHDISDDDESDDEDFFKPKGEQHKNLGGGLDVGYVNSEDCSKFVNYGYLKNWKEKEVCESIRDRFTTGDWSKAALRDKNLGTGGEGEDDELYGDFEDLETGEKHKSHENLESGANENEDEDAEVVERDGNNPRSQADEPGYADKLKEAQEITKQRNELEYNDLDEETRIELAGFRTGTYLRLEIHNVPYEMVEFFDPCHPILVGGIGFGEDNVGYMQARLKKHRWHKKVLKTRDPIIVSIGWRRYQTIPVFAIEDRNGRHRMLKYTPEHMHCLASFWGPLVPPNTGFVAFQNLSNNQAGFRITATSVVLEFNHQARIVKKIKLVGTPCKIKKKTAFIKDMFTSDLEIARFEGSSVRTVSGIRGQVKKAGKNMLDNKAEEGIARCTFEDQIHMSDMVFLRAWTTVEVPQFYNPLTTALQPRDKTWNGMKTFGELRRELNIPIPVNKDSLYKAIERKQKKFNPLQIPKRLEKDLPFMSKPKNIPKRKRPSLEDKRAVIMEPKERKEHTIIQQFQLLQHHTMKKKKATDQKKRKEYEAEKAKNEEINKKRRREERRDRYREEDKQKKKTRRSLD

SEQ ID NO: 100703 - protein, 1141 aa, Arabidopsis thaliana
  peptide (1)..(1141): Ceres Seq. ID no. 13605877
MPSHRSHRTPKSGPTARKKSELDKKKRGISVDKQKNLKAFGVKSVVHAKKAKHHAAEKEQKRLHLPKIDRNYGEAPPFVVVVQGPPGVGKSLVIKSLVKEFTKQNVPEVRGPITIVQGKQRRFQFVECPNDINAMVDCAKVADLALLVVDGSYGFEMETFEFLNIMQVHGFPRVMGVLTHLDKFNDVKKLRKTKHHLKHRFWTEIYHGAKLFYLSGLIHGKYTPREVHNLARFVIVIKPQPLTWRTAHPYVLVDRLEDVTPPEKVQMDKKCDRNITVFGYLRGCNFKKRMKVHIAGVGDFIVAGVTALTDPCPLPSAGKKKGLRDRDKLFYAPMSGIGDLVYDKDAVYININSHQVQYSKTDDGKGEPTNKGKGRDVGEDLVKSLQNTKYSVDEKLDKTFINFFGKKTSASSETKLKAEDAYHSLPEGSDSESQSGDDEEDIVGNESEMKQETEIHGGRLRRKAIFKTDLNEDDFEEADDLELDSYDPDTYDFEEADDAESDDNEVEDGGDDSASDSADGEPGDYQIDDKDSGNISQWKAPLKEIARKKNPNLMQIVYGASSLATPLINENHDISDDDESDDEDFFKPKGEQHKNLGGGLDVGYVNSEDCSKFVNYGYLKNWKEKEVCESIRDRFTTGDWSKAALRDKNLGTGGEGEDDELYGDFEDLETGEKHKSHENLESGANENEDEDAEVVERDGNNPRSQADEPGYADKLKEAQEITKQRNELEYNDLDEETRIELAGFRTGTYLRLEIHNVPYEMVEFFDPCHPILVGGIGFGEDNVGYMQARLKKHRWHKKVLKTRDPIIVSIGWRRYQTIPVFAIEDRNGRHRMLKYTPEHMHCLASFWGPLVPPNTGFVAFQNLSNNQAGFRITATSVVLEFNHQARIVKKIKLVGTPCKIKKKTAFIKDMFTSDLEIARFEGSSVRTVSGIRGQVKKAGKNMLDNKAEEGIARCTFEDQIHMSDMVFLRAWTTVEVPQFYNPLTTALQPRDKTWNGMKTFGELRRELNIPIPVNKDSLYKAIERKQKKFNPLQIPKRLEKDLPFMSKPKNIPKRKRPSLEDKRAVIMEPKERKEHTIIQQFQLLQHHTMKKKKATDQKKRKEYEAEKAKNEEINKKRRREERRDRYREEDKQKKKTRRSLD

SEQ ID NO: 100704 - protein, 1007 aa, Arabidopsis thaliana
  peptide (1)..(1007): Ceres Seq. ID no. 13605878
MVDCAKVADLALLVVDGSYGFEMETFEFLNIMQVHGFPRVMGVLTHLDKFNDVKKLRKTKHHLKHRFWTEIYHGAKLFYLSGLIHGKYTPREVHNLARFVIVIKPQPLTWRTAHPYVLVDRLEDVTPPEKVQMDKKCDRNITVFGYLRGCNFKKRMKVHIAGVGDFIVAGVTALTDPCPLPSAGKKKGLRDRDKLFYAPMSGIGDLVYDKDAVYININSHQVQYSKTDDGKGEPTNKGKGRDVGEDLVKSLQNTKYSVDEKLDKTFINFFGKKTSASSETKLKAEDAYHSLPEGSDSESQSGDDEEDIVGNESEMKQETEIHGGRLRRKAIFKTDLNEDDFEEADDLELDSYDPDTYDFEEADDAESDDNEVEDGGDDSASDSADGEPGDYQIDDKDSGNISQWKAPLKEIARKKNPNLMQIVYGASSLATPLINENHDISDDDESDDEDFFKPKGEQHKNLGGGLDVGYVNSEDCSKFVNYGYLKNWKEKEVCESIRDRFTTGDWSKAALRDKNLGTGGEGEDDELYGDFEDLETGEKHKSHENLESGANENEDEDAEVVERDGNNPRSQADEPGYADKLKEAQEITKQRNELEYNDLDEETRIELAGFRTGTYLRLEIHNVPYEMVEFFDPCHPILVGGIGFGEDNVGYMQARLKKHRWHKKVLKTRDPIIVSIGWRRYQTIPVFAIEDRNGRHRMLKYTPEHMHCLASFWGPLVPPNTGFVAFQNLSNNQAGFRITATSVVLEFNHQARIVKKIKLVGTPCKIKKKTAFIKDMFTSDLEIARFEGSSVRTVSGIRGQVKKAGKNMLDNKAEEGIARCTFEDQIHMSDMVFLRAWTTVEVPQFYNPLTTALQPRDKTWNGMKTFGELRRELNIPIPVNKDSLYKAIERKQKKFNPLQIPKRLEKDLPFMSKPKNIPKRKRPSLEDKRAVIMEPKERKEHTIIQQFQLLQHHTMKKKKATDQKKRKEYEAEKAKNEEINKKRRREERRDRYREEDKQKKKTRRSLD

SEQ ID NO: 100705 - DNA, 965 bp, Arabidopsis thaliana
  misc_feature (1)..(965): Ceres Seq. ID no. 13605883
  misc_feature (1)..(965): Ortholog of  Ceres SEQ ID NO 13638835 as cited in SEQ ID NO 52005
  misc_feature (1)..(965): Ortholog of  Ceres SEQ ID NO 12614289 as cited in SEQ ID NO 68735
  misc_feature (1)..(965): Ortholog of  Ceres SEQ ID NO 14309007 as cited in SEQ ID NO 0
cttggctcttagggctcgctaaattttctcagggctgtgaccatcgaccatcgtcgtcttcgcggagctcagttgaaagatgttaacggctgatataccaccaaatcagtcaatctacataaaacatatcaatgagaagatcaagaaagaagagctgaagaggtctctttactgtttgttctctcagtttggaagattacttgatgtggttgcgttaaagactcctaagctccggggacaagcatgggttgtttttactgaagtcaccgctgctagcaacgctgtccgtcagatgcagaactttcctttctatgataagcctatgcggatacaatatgcaaaatcaaagtcagattatgttactaaagccgaagggtcttttgttccaaaagaaaagaagatgaagcaagaagagaaagttgaaaggaagcgacatgctgaagaaactcaacaaccaagcatgcctaatggcgcaactactcagaacggaatgcctgtgcctcctttccagccgagtgggcaagacacgatgccaccaaacaacatactcttcattcataatcttcccattgagacgaatagtatgatgcttcagctgctctttgagcaatacccaggattcaaagagataagaatgatcgaagcaaaacccggaattgcgtttgtggagtatgaagacgatgttcagtcttccatggccatgcaggctcttcagggtttcaagatcactccgcagaatccaatggtcgtctcttttgccaagaagtgaaaaccagagttttgttatgcggatgaatggtaatgatatactaattagtagctgtttaaaagcaaactgtcttattttatttggttcgtttccgattagtggtgtgaatgaccccgaagctttagaccagaatgtaatgagatcgaagaattgagagtgatttggttggagaaaatctcattttaaatgccttatt

SEQ ID NO: 100706 - protein, 229 aa, Arabidopsis thaliana
  peptide (1)..(229): Ceres Seq. ID no. 13605884
MLTADIPPNQSIYIKHINEKIKKEELKRSLYCLFSQFGRLLDVVALKTPKLRGQAWVVFTEVTAASNAVRQMQNFPFYDKPMRIQYAKSKSDYVTKAEGSFVPKEKKMKQEEKVERKRHAEETQQPSMPNGATTQNGMPVPPFQPSGQDTMPPNNILFIHNLPIETNSMMLQLLFEQYPGFKEIRMIEAKPGIAFVEYEDDVQSSMAMQALQGFKITPQNPMVVSFAKK

SEQ ID NO: 100707 - protein, 158 aa, Arabidopsis thaliana
  peptide (1)..(158): Ceres Seq. ID no. 13605885
MQNFPFYDKPMRIQYAKSKSDYVTKAEGSFVPKEKKMKQEEKVERKRHAEETQQPSMPNGATTQNGMPVPPFQPSGQDTMPPNNILFIHNLPIETNSMMLQLLFEQYPGFKEIRMIEAKPGIAFVEYEDDVQSSMAMQALQGFKITPQNPMVVSFAKK

SEQ ID NO: 100708 - protein, 148 aa, Arabidopsis thaliana
  peptide (1)..(148): Ceres Seq. ID no. 13605886
MRIQYAKSKSDYVTKAEGSFVPKEKKMKQEEKVERKRHAEETQQPSMPNGATTQNGMPVPPFQPSGQDTMPPNNILFIHNLPIETNSMMLQLLFEQYPGFKEIRMIEAKPGIAFVEYEDDVQSSMAMQALQGFKITPQNPMVVSFAKK

SEQ ID NO: 100709 - DNA, 1165 bp, Arabidopsis thaliana
  misc_feature (1)..(1165): Ceres Seq. ID no. 13605901
  misc_feature (1)..(1165): Ortholog of  Ceres SEQ ID NO 13654728 as cited in SEQ ID NO 62302
  misc_feature (1)..(1165): Ortholog of  Ceres SEQ ID NO 13597134 as cited in SEQ ID NO 64501
  misc_feature (1)..(1165): Ortholog of  Ceres SEQ ID NO 15174333 as cited in SEQ ID NO 0
  misc_feature (1)..(1165): Ortholog of  Ceres SEQ ID NO 15179047 as cited in SEQ ID NO 0
atgacccatattctcttgactcgtgaggttgaaatgtaaatcactttaaaattaaaaacgtaccttgtcagttttgagactcaaaaggacttgaaatattgaaatccctattctttacgcgtactcgagatttttcgctcttgagagaatcacttcgacaatgtcggtaacggctgctttcattgattcggatcaaactcagcacaacattcttatggattcccaatcaactgtctccggtgtgaaaactgtcaagattagcaatgtttcactaattgtttctaagaaagatgtcaaagagttcttttctttctctggtgacattcaatacgtcgagatgcgaagtgagacacaagagagtcaggtcgcatatgttacttttaaggattcacaaggagctgaaactgcaatgctcttaacgggagctgtcattgcagatcttcgtgttagtataactcctgctgttaactatcagctaccaccagaagcccttgcacttgactcggaacattcgtttaatggtttttctgtcaagaaagctgaagatgtggtgaacatcatggtgggaagaggttatgctcttggaaaagacgccatggagaaagccaaagcatttgatgacagacacaacttgatctcaaacgcttctgcaaccattgcatcgcttgacgataagatgggtctgagcgaaaagctaagcataggaacaactgtggttaatgagaagttgagagatatcgatgagcgatatcaggtgagggagataacgaaatctgctttagcagctgctgaagagacagcaatcagtgcaagaacggctttaatggcaaacccttatgtatcaagtggagcttcgtggttttcaaacgcgtttggcgcagtgacaaaggcggttaaagagaaagttgagaatggaggagaaggaagaaaggagatcatcacacttgatccctcttcacccaaagttcctgctgtagttcctgttaagctcggttgatgcagatctcatcaaaccaatcggatctcgactaaattctttgataggtttgttgttcatatatatgctttcgtatgctaaagagaagataaaaagacataaaccatgaaaggtgttgttacattcaaccagcatttgttcctctcttgaaagagattattaagattc

SEQ ID NO: 100710 - protein, 278 aa, Arabidopsis thaliana; identical to SEQ ID NO: 23413
  peptide (1)..(278): Ceres Seq. ID no. 13605902

SEQ ID NO: 100711 - protein, 260 aa, Arabidopsis thaliana; identical to SEQ ID NO: 23414
  peptide (1)..(260): Ceres Seq. ID no. 13605903

SEQ ID NO: 100712 - protein, 219 aa, Arabidopsis thaliana; identical to SEQ ID NO: 23415
  peptide (1)..(219): Ceres Seq. ID no. 13605904

SEQ ID NO: 100713 - DNA, 764 bp, Arabidopsis thaliana
  misc_feature (1)..(764): Ceres Seq. ID no. 13605917
  misc_feature (1)..(764): Ortholog of  Ceres SEQ ID NO 15176099 as cited in SEQ ID NO 59451
aaccaaaaatttcttcgtctctgtctccaaaatcgaatcaaaatctctaaagtttcaatttttttgttctgttctttttatttttttaaagaatggcttcaatttctgcaactttgccttcgccattgttactcacacagagaaaatccaatctcacatcgattcaaaaactcccattttctctaactcgaggtacgaatgatctttctccattatctcttactcgaaaccctagcagcatcagtctgatggtgaaagctagtggagaaagctcagattcatcgactgatctcgacgttgttagtacgattcagaatgtttgggataagtctgaagataggttaggtcttattggtttgggttttgctggtattgtagctctttgggcatcattgaatctcatcacggcaatcgacaaattgcccgttatctcgagcggattcgaactagttggtatcttgttctccacgtggttcacatatcgatatctcttgttcaaaccggacagacaggagctttcgaaaattgtcaagaaatcagtagcggatatacttggccagtgaaccttgtgtgtgtgataatacttcatctttggaagatgatttgtttgcaagtttgtaaaattacatgacagggtggttgttgtttctagtccaataatgtcatgcatttgaaacctgtaaatactttattgttggtttttggttgtgagcaaaatcaatcttttctaatttcaaagattctcttttatgattatacgtttt

SEQ ID NO: 100714 - protein, 156 aa, Arabidopsis thaliana; identical to SEQ ID NO: 34973
  peptide (1)..(156): Ceres Seq. ID no. 13605918

SEQ ID NO: 100715 - protein, 104 aa, Arabidopsis thaliana; identical to SEQ ID NO: 34974
  peptide (1)..(104): Ceres Seq. ID no. 13605919

SEQ ID NO: 100716 - DNA, 1611 bp, Arabidopsis thaliana
  misc_feature (1)..(1611): Ceres Seq. ID no. 13605924
  misc_feature (1)..(1611): Ortholog of  Ceres SEQ ID NO 13598351 as cited in SEQ ID NO 68715
  misc_feature (1)..(1611): Ortholog of  Ceres SEQ ID NO 13584744 as cited in SEQ ID NO 69137
atgcacaatcattcccactaatagtttaataaagtgtataatttttttcaaattaaaacagctaaacacacacaaccacattcaaaaaggggttaagcattgaagaatattctaagaaaatttgtttctcttcttacagaagtaaaagcgactctctctctcattaagcatcaaaggagtttcgtttttcttgctttgctgttacattcttcaggaaaaaggcgttacctttactctctctgcatcaacgaggaagcgtgtagagctaaaggagctgaatttgagagatttttttgttttgtttctgggtttgttcaaagatgcaaatttttagttgtttctgctgtggaaaaggatttgatcggcaaaagaaggtgaaaacggagccatcgtggaggatcttttcactcaaggaacttcacgcagcaacaaacagttttaattacgataacaagctcggtgaaggcagatttggcagtgtgtattggggtcagctatgggatggatctcaaattgcagtcaagagattgaaggcatggagtagcagagaagagatagattttgctgtagaagtcgagattcttgctcgtatccgtcacaagaatctattgagtgtacgaggttactgtgcagaaggacaagaacgactcattgtatatgattacatgccaaatttgagcttggtctctcatcttcatggtcaacattcatctgagtcgcttcttgattggactaggcggatgaatattgctgtatcttctgctcaggcgattgcctacttgcatcattttgcaacacctagaatagtccatggagatgtgagagcaagcaatgtgctgctagattctgagtttgaagctcgggttacagatttcggatacgataagctgatgccagatgatggagctaacaaaagcaccaagggtaataacattgggtatctctcaccagaatgtatcgaatctggaaaagaatcagacatgggagatgtgtatagtttcggtgttcttttgctggagcttgtaactggtaagagacctacagagagggtaaacttaacaacaaagaggggtattaccgaatgggttttacctcttgtttacgaaagaaagtttggtgaaattgtggatcaaaggctgaatgggaagtatgtggaagaagagctgaaaaggatagttttggttggtctcatgtgtgctcagagggagtcagagaagagaccaacaatgtctgaagttgtggagatgctaatgattgaatcaaaggagaaaatggctcagcttgaagctaatccactcttcaatggaaacaatgatggtgaagttatagatgaaagctcagagatcatttctgaagtgagagatcatcaataacaagaacaagaatgttattcaaattcacgcattcttgttttcttttgctagaatctggtttttggttgtgcttgtttttagaagagtgtttgtgcttgtttttagaatagcgaagttgggttttaaaagtttattgtgtattttttttcagcttaagattggattttgatcattgatatttgagcttgtaagagagtgtagtggtacatatttggtatttatgagaaagtttttctga

SEQ ID NO: 100717 - protein, 350 aa, Arabidopsis thaliana; identical to SEQ ID NO: 34965
  peptide (1)..(350): Ceres Seq. ID no. 13605925

SEQ ID NO: 100718 - protein, 235 aa, Arabidopsis thaliana; identical to SEQ ID NO: 34966
  peptide (1)..(235): Ceres Seq. ID no. 13605926

SEQ ID NO: 100719 - protein, 210 aa, Arabidopsis thaliana; identical to SEQ ID NO: 34967
  peptide (1)..(210): Ceres Seq. ID no. 13605927

SEQ ID NO: 100720 - DNA, 586 bp, Arabidopsis thaliana
  misc_feature (1)..(586): Ceres Seq. ID no. 13605936
  misc_feature (1)..(586): Ortholog of  Ceres SEQ ID NO 12612527 as cited in SEQ ID NO 52588
attgtgttttattttacactcgttcgtcttcgtctagagagagatggcgacggcgtcgtttaggtggattctgcagcttcacagagacgtaccaaaagctgctcgattctatgctcaaggtctcgacttttccgtcaatgtcgtcactttacgctgggctgagctccattctggtcctatcaagctagctcttatgcaatctcctagcaatcatgttgctgagaagggatactcatcgcttctatcgttcacagtcactgacattaatacaacagtgactaaacttatggctttaggagctgaattagatggcactatcaagtatgagatacatggaaaggttgcggctatgaaatgccctgatggttacatgttaggcctttatgaggctgcatgagcaaatgaatagaattgaagcctgaaaggaagccaattatgcatagagtagatttgtttagagatcatatccataatctctttgaagctattgtatacttcttagaaacctaagccactattatactttatattggttcatgtttaacttgctcttcacattgtttctctagtaagcttttctcaagcc

SEQ ID NO: 100721 - protein, 117 aa, Arabidopsis thaliana
  peptide (1)..(117): Ceres Seq. ID no. 13605937
MATASFRWILQLHRDVPKAARFYAQGLDFSVNVVTLRWAELHSGPIKLALMQSPSNHVAEKGYSSLLSFTVTDINTTVTKLMALGAELDGTIKYEIHGKVAAMKCPDGYMLGLYEAA

SEQ ID NO: 100722 - protein, 67 aa, Arabidopsis thaliana
  peptide (1)..(67): Ceres Seq. ID no. 13605938
MQSPSNHVAEKGYSSLLSFTVTDINTTVTKLMALGAELDGTIKYEIHGKVAAMKCPDGYMLGLYEAA

SEQ ID NO: 100723 - protein, 61 aa, Arabidopsis thaliana
  peptide (1)..(61): Ceres Seq. ID no. 13605939
CVLFYTRSSSSRERWRRRRLGGFCSFTETYQKLLDSMLKVSTFPSMSSLYAGLSSILVLSS

SEQ ID NO: 100724 - DNA, 723 bp, Arabidopsis thaliana
  misc_feature (1)..(723): Ceres Seq. ID no. 13605947
  misc_feature (1)..(723): Ortholog of  Ceres SEQ ID NO 12585325 as cited in SEQ ID NO 63062
gactactttgactttgcgcctgtgatcttcttctcaaatccatccatttattcggtgatggatcaaacacagaacacaatcgccggaattggtgaaatcaacggttcgataaaaaccgaaatcaatgcaattgcaaccgtcgacgattcaaatgagaagctgaaccaaattataaactcgaatcagaaaattttagaactccttcatcaattaaaactcaccgtctcttctttcacacctgcttctcagcttcacctcctccaacgcctcaattctcttgtgatggagcttgataatatggctaagttgtctgataaatgcaacattcaagtccccattgaggttcttaacttgattgatgatgggaagaacccagatgagtttacaaaagatgttcttaataagaactgcattgctaaaaatcaagttacaaagggaaagagtgatgcttttaagggtttgagaaaacatctcttggaggagcttgaacaggcttttcctgatgaagtcgatcggtatagagacatacgtgctagttatgctgctgaagcaaaacggttggctcaaacgcaaagtgtgttaccaaatggggatgctaaggtcaagagtgagctataagagctatgaatcttgccttttagaataaaattttcaagtagatcaatgaggatgtaaacgaacaagccttcttggaatttctataacatccgttggttcttttgc

SEQ ID NO: 100725 - protein, 205 aa, Arabidopsis thaliana
  peptide (1)..(205): Ceres Seq. ID no. 13605948
DYFDFAPVIFFSNPSIYSVMDQTQNTIAGIGEINGSIKTEINAIATVDDSNEKLNQIINSNQKILELLHQLKLTVSSFTPASQLHLLQRLNSLVMELDNMAKLSDKCNIQVPIEVLNLIDDGKNPDEFTKDVLNKNCIAKNQVTKGKSDAFKGLRKHLLEELEQAFPDEVDRYRDIRASYAAEAKRLAQTQSVLPNGDAKVKSEL

SEQ ID NO: 100726 - protein, 186 aa, Arabidopsis thaliana
  peptide (1)..(186): Ceres Seq. ID no. 13605949
MDQTQNTIAGIGEINGSIKTEINAIATVDDSNEKLNQIINSNQKILELLHQLKLTVSSFTPASQLHLLQRLNSLVMELDNMAKLSDKCNIQVPIEVLNLIDDGKNPDEFTKDVLNKNCIAKNQVTKGKSDAFKGLRKHLLEELEQAFPDEVDRYRDIRASYAAEAKRLAQTQSVLPNGDAKVKSEL

SEQ ID NO: 100727 - protein, 111 aa, Arabidopsis thaliana
  peptide (1)..(111): Ceres Seq. ID no. 13605950
MELDNMAKLSDKCNIQVPIEVLNLIDDGKNPDEFTKDVLNKNCIAKNQVTKGKSDAFKGLRKHLLEELEQAFPDEVDRYRDIRASYAAEAKRLAQTQSVLPNGDAKVKSEL

SEQ ID NO: 100728 - DNA, 1686 bp, Arabidopsis thaliana
  misc_feature (1)..(1686): Ceres Seq. ID no. 13605951
  misc_feature (1)..(1686): Ortholog of  Ceres SEQ ID NO 15176457 as cited in SEQ ID NO 55547
  misc_feature (1)..(1686): Ortholog of  Ceres SEQ ID NO 13594349 as cited in SEQ ID NO 58161
  misc_feature (1)..(1686): Ortholog of  Ceres SEQ ID NO 13663419 as cited in SEQ ID NO 66561
cctcttctttctcagacgcttcaactcaaaaagagaaaccagcatagttgtaatcttgaggatcagctatttttctgaaggatatttggcctaatttcgaaactcaaggtacttaggaaacgctgtagaagatggctattgtgtcgttgcgcgatgtggccatggtgatggtgacagtgcaggtgtttgcacgagggtatccggaaacagatttggttgtgaggcttcctggtcaaccaaaggttgtattcagacagtacgcagggtatgttgatctcgacttgaatgctggccgtagccttttctactacttcgtggaagctgaaaaacaccctgacacaaaaccgttaaccttgtggctcaatggaggtccaggttgttcttctgttggtggaggagctttcactgagctaggtccattttaccccacaggatatgggcgtggtcttcgcattaactccatgtcgtggaacaaagcctcaaacctgctatttgtggactcaccggctggagttggttggtcttactccaaccgaagctctgattacaacgctggggacaagtctgcggccagcgatatgctcgtgttcttgttgagatggttcgataagttcccggagttgaagtctcacgatctctttctcactggcgaaagctatgcaggacattacatacctcaactggctgatgcgattctcagctataactcacgctcaagtgggttcaaattcaacatcaaaggcattgcaatagggaatccacttctgaagcttgacagggacattccagctgtatacgagttcttctggtcgcatggcatgatctctgaggtagtgggacgtacaatcaagattcaatgtgacttctcacattacacatatgcatacccccataacgtaagtgatgcctgcaacgatgctatccgtgaagccggagacatcaccactgagtatgtcaatacctttgatgttctccctgacctatgctacccatctattgccctgcaagagctaaggcttaaacaaatggctactaagatgagcatgggagtggatgtgtgtatgaactacgaaagacagttctacctaaatatcccagaggtacagatggctcttcacgcaaaccgcacaaacctgccttattcatggtctttgtgcagcaacctgttaaactactctgccatcgatgtaaacaccaacatgcttccgactctgaagagaattatacagaacaaaattcctgttaggatcttcagtggagatcaagattctgtagttccatttctgggaacacgaactatcgtaggagaactcgccaacgatctcaatttcaagacgacagttccatatggagtgtggttccacaaaagacaggttggaggctgggccatcgagtatggaaacctactaacttttgcaacagtgagaggagcggctcatgcggtggcgtacacgcagccctcacgagctctgcatctattcagcacctttcttcgtgggcagagattgcccaacaagacagatattgctatgcatgactgaaagagaaggaatctcattattagagtacatatccttgggaacatataagggattgtgttgagacatattttcatatgattactagtaacaaaacccgtctggtttaatgatgtaaacgacacataatctccactcacaatcgttg

SEQ ID NO: 100729 - protein, 469 aa, Arabidopsis thaliana
  peptide (1)..(469): Ceres Seq. ID no. 13605952
MAIVSLRDVAMVMVTVQVFARGYPETDLVVRLPGQPKVVFRQYAGYVDLDLNAGRSLFYYFVEAEKHPDTKPLTLWLNGGPGCSSVGGGAFTELGPFYPTGYGRGLRINSMSWNKASNLLFVDSPAGVGWSYSNRSSDYNAGDKSAASDMLVFLLRWFDKFPELKSHDLFLTGESYAGHYIPQLADAILSYNSRSSGFKFNIKGIAIGNPLLKLDRDIPAVYEFFWSHGMISEVVGRTIKIQCDFSHYTYAYPHNVSDACNDAIREAGDITTEYVNTFDVLPDLCYPSIALQELRLKQMATKMSMGVDVCMNYERQFYLNIPEVQMALHANRTNLPYSWSLCSNLLNYSAIDVNTNMLPTLKRIIQNKIPVRIFSGDQDSVVPFLGTRTIVGELANDLNFKTTVPYGVWFHKRQVGGWAIEYGNLLTFATVRGAAHAVAYTQPSRALHLFSTFLRGQRLPNKTDIAMHD

SEQ ID NO: 100730 - protein, 459 aa, Arabidopsis thaliana
  peptide (1)..(459): Ceres Seq. ID no. 13605953
MVMVTVQVFARGYPETDLVVRLPGQPKVVFRQYAGYVDLDLNAGRSLFYYFVEAEKHPDTKPLTLWLNGGPGCSSVGGGAFTELGPFYPTGYGRGLRINSMSWNKASNLLFVDSPAGVGWSYSNRSSDYNAGDKSAASDMLVFLLRWFDKFPELKSHDLFLTGESYAGHYIPQLADAILSYNSRSSGFKFNIKGIAIGNPLLKLDRDIPAVYEFFWSHGMISEVVGRTIKIQCDFSHYTYAYPHNVSDACNDAIREAGDITTEYVNTFDVLPDLCYPSIALQELRLKQMATKMSMGVDVCMNYERQFYLNIPEVQMALHANRTNLPYSWSLCSNLLNYSAIDVNTNMLPTLKRIIQNKIPVRIFSGDQDSVVPFLGTRTIVGELANDLNFKTTVPYGVWFHKRQVGGWAIEYGNLLTFATVRGAAHAVAYTQPSRALHLFSTFLRGQRLPNKTDIAMHD

SEQ ID NO: 100731 - protein, 457 aa, Arabidopsis thaliana
  peptide (1)..(457): Ceres Seq. ID no. 13605954
MVTVQVFARGYPETDLVVRLPGQPKVVFRQYAGYVDLDLNAGRSLFYYFVEAEKHPDTKPLTLWLNGGPGCSSVGGGAFTELGPFYPTGYGRGLRINSMSWNKASNLLFVDSPAGVGWSYSNRSSDYNAGDKSAASDMLVFLLRWFDKFPELKSHDLFLTGESYAGHYIPQLADAILSYNSRSSGFKFNIKGIAIGNPLLKLDRDIPAVYEFFWSHGMISEVVGRTIKIQCDFSHYTYAYPHNVSDACNDAIREAGDITTEYVNTFDVLPDLCYPSIALQELRLKQMATKMSMGVDVCMNYERQFYLNIPEVQMALHANRTNLPYSWSLCSNLLNYSAIDVNTNMLPTLKRIIQNKIPVRIFSGDQDSVVPFLGTRTIVGELANDLNFKTTVPYGVWFHKRQVGGWAIEYGNLLTFATVRGAAHAVAYTQPSRALHLFSTFLRGQRLPNKTDIAMHD

SEQ ID NO: 100732 - DNA, 2843 bp, Arabidopsis thaliana
  misc_feature (1)..(2843): Ceres Seq. ID no. 13605983
  misc_feature (1)..(2843): Ortholog of  Ceres SEQ ID NO 14310452 as cited in SEQ ID NO 54426
  misc_feature (1)..(2843): Ortholog of  Ceres SEQ ID NO 15169663 as cited in SEQ ID NO 64659
  misc_feature (1)..(2843): Ortholog of  Ceres SEQ ID NO 13656177 as cited in SEQ ID NO 64997
  misc_feature (1)..(2843): Ortholog of  Ceres SEQ ID NO 15225015 as cited in SEQ ID NO 0
tttctttaacatcattatacaaagttacaacaacttgaaaaaattaattatataagcccattaaatcttgtatcataagcccagcccaaagttataaacttttcaaaatgcaaggagctaaaaaacaagttggttttgttggtttcaaatcaaaccaaaccgtttttttaagattacgaatcgaatggtttatttttgctaaatcggttcggttttttctccagacctattagtaaacctcttgcttcgattaggcggtcgtctctctgaaattttctgaaacctcttaaaccctagcaatgccgtcgagtttcttctttgaggatgctagtgacgacgagctcgaattaatacgcaatcaagaggacagtagtgaggaagacgtaaaggaaggcgaagcagaagagcatgaagctggagaagacgaagatggagaagaggaatatgaagaagaagatgacgacgaagaagaagaagatgagaagcggaaacgagatgctgatgctcaatctccttgggattttgcatcttactcaagctccgttggtgaagaacacgcccgccgtcacacaacgtctattgatgaaaagatctctaaagctattcagcatcgtccagttcccatttcaataaatgaagaagaagaagaggaagaagaagaagaagatgcctccgatgctgaaactgacaaacaagaggagtatctttcggaagacgatgaggcagctgagtacaaaccagaagatgctactcccaagccgttcttctctacagtggatggagtttcatttcatgctgatactttcatggagcttaatctctctcgtccattgcttcgagcttgtgaaactctcggatacaagaaacctactccgattcaggcagcttgtatacctttagcacttacagggcgtgatctttgtgccagtgccatcactgggtcagggaagactgctgcattcgctttacctactcttgagaggttgctgttccgtcccaagcgggtctttgctactagagttcttattctcactccgactagggagttggccgtccagattcacagtatgattcagaatcttgcacagtttactgatatcaagtgtggattgattgtaggagggctttctgtaagggagcaagaggtggttctgaggtctatgccagatattgttgtggcgactcctggacgtatgatagatcatttgcgtaattctatgtctgttgatttggatgatctagcggttttaatccttgatgaggcagaccgccttctacagactgggtttgccactgaaatcacagagctggttcgcttatgtcccaagagaaggcaaacaatgctcttctcagccacaatgactgaagaagttaaagagctagtcaaactttccttgaacaaaccgttgcggctctcagctgatccatcagctagaaggccaccaggcttgactgaggaggtggtaagaatacgcaggactcgtgaggcaaatcaggaagctgttcttctatcattgtgcacaaggacttttaaatcaaaagtcattatctttagtggaacaaaacaagctgcacatagactgaaaattttattcggattagctggcctcaaagcagctgagcttcatggaaacctaactcaagcacaacgtcttgattctctggagcttttcagaaagcaggaggtcgattttctcattgctaccgatgtagccgctcgaggacttgacatcattggtgttcaaacagttataaattatgcttgtcctcgggaaatagacagttatgttcacagagttggtagaacagctagggctggaagggaaggttatgctgtaacgtttgtgactgatagtgaccgatcccttttgaaagtcattgcaaagaaggtgggttcaaagttgaagagccgagtcatcccagagcagtcaatcgtcaagtggtctcagataatcgatgaaatggaagatcaatattccgctgttatttcagcagagagggatgagcgagctctaaggaaagctgaaatggaatttgcaaaggcggagaacatgcttgagcacagagatgaaatatatgcacgcccaaaaaggacttggttcatgacagagaaggagaagaagctcgtggcacaggctgaaaaggattctgcagggaaccctgctggaggcgaactagttagtgctgatagagcagaggacctcaagatgaaggagaagagaaaacgtgaacgcgagaagaatcttcctaggaaaaaacgtagaaagctagaagctgccagagagatgctagaagataacgaaggagaagaagaggaagaagacgaagaaggagacgaaaagagaggaagatcaagagggaaagacaagaaaaaacaggagacagataagaagggattgacactaaaggatcttggttacatgagagcaaaagcggtgaaagcaaaacagagagcaattgattccggtaagatggagagaccaaagccggacaagaaacaaagccggagtaaaccaagaaaccagcctcgtggtgaagagatgaaagatctgttcaagagtgatatgggcgagaagaaacagggcagaggcggtgccgcggctgcagcaaaacctcggacgaagtcgaagaactcattcaagagcaaagccagatataagcgtaggtaaaaggaaaaagcatttttgagaagatatcgaaggacaaacccacgagaagaaggacatttcattgagaagggtttaaacaatttaaattattgttgtaatatcataatttagaacaaaactggttaagatgttcgaaattttgttttctttgtcctatggtttttataatctttc

SEQ ID NO: 100733 - protein, 789 aa, Arabidopsis thaliana
  peptide (1)..(789): Ceres Seq. ID no. 13605984
MPSSFFFEDASDDELELIRNQEDSSEEDVKEGEAEEHEAGEDEDGEEEYEEEDDDEEEEDEKRKRDADAQSPWDFASYSSSVGEEHARRHTTSIDEKISKAIQHRPVPISINEEEEEEEEEEDASDAETDKQEEYLSEDDEAAEYKPEDATPKPFFSTVDGVSFHADTFMELNLSRPLLRACETLGYKKPTPIQAACIPLALTGRDLCASAITGSGKTAAFALPTLERLLFRPKRVFATRVLILTPTRELAVQIHSMIQNLAQFTDIKCGLIVGGLSVREQEVVLRSMPDIVVATPGRMIDHLRNSMSVDLDDLAVLILDEADRLLQTGFATEITELVRLCPKRRQTMLFSATMTEEVKELVKLSLNKPLRLSADPSARRPPGLTEEVVRIRRTREANQEAVLLSLCTRTFKSKVIIFSGTKQAAHRLKILFGLAGLKAAELHGNLTQAQRLDSLELFRKQEVDFLIATDVAARGLDIIGVQTVINYACPREIDSYVHRVGRTARAGREGYAVTFVTDSDRSLLKVIAKKVGSKLKSRVIPEQSIVKWSQIIDEMEDQYSAVISAERDERALRKAEMEFAKAENMLEHRDEIYARPKRTWFMTEKEKKLVAQAEKDSAGNPAGGELVSADRAEDLKMKEKRKREREKNLPRKKRRKLEAAREMLEDNEGEEEEEDEEGDEKRGRSRGKDKKKQETDKKGLTLKDLGYMRAKAVKAKQRAIDSGKMERPKPDKKQSRSKPRNQPRGEEMKDLFKSDMGEKKQGRGGAAAAAKPRTKSKNSFKSKARYKRR

SEQ ID NO: 100734 - protein, 620 aa, Arabidopsis thaliana
  peptide (1)..(620): Ceres Seq. ID no. 13605985
MELNLSRPLLRACETLGYKKPTPIQAACIPLALTGRDLCASAITGSGKTAAFALPTLERLLFRPKRVFATRVLILTPTRELAVQIHSMIQNLAQFTDIKCGLIVGGLSVREQEVVLRSMPDIVVATPGRMIDHLRNSMSVDLDDLAVLILDEADRLLQTGFATEITELVRLCPKRRQTMLFSATMTEEVKELVKLSLNKPLRLSADPSARRPPGLTEEVVRIRRTREANQEAVLLSLCTRTFKSKVIIFSGTKQAAHRLKILFGLAGLKAAELHGNLTQAQRLDSLELFRKQEVDFLIATDVAARGLDIIGVQTVINYACPREIDSYVHRVGRTARAGREGYAVTFVTDSDRSLLKVIAKKVGSKLKSRVIPEQSIVKWSQIIDEMEDQYSAVISAERDERALRKAEMEFAKAENMLEHRDEIYARPKRTWFMTEKEKKLVAQAEKDSAGNPAGGELVSADRAEDLKMKEKRKREREKNLPRKKRRKLEAAREMLEDNEGEEEEEDEEGDEKRGRSRGKDKKKQETDKKGLTLKDLGYMRAKAVKAKQRAIDSGKMERPKPDKKQSRSKPRNQPRGEEMKDLFKSDMGEKKQGRGGAAAAAKPRTKSKNSFKSKARYKRR

SEQ ID NO: 100735 - protein, 533 aa, Arabidopsis thaliana
  peptide (1)..(533): Ceres Seq. ID no. 13605986
MIQNLAQFTDIKCGLIVGGLSVREQEVVLRSMPDIVVATPGRMIDHLRNSMSVDLDDLAVLILDEADRLLQTGFATEITELVRLCPKRRQTMLFSATMTEEVKELVKLSLNKPLRLSADPSARRPPGLTEEVVRIRRTREANQEAVLLSLCTRTFKSKVIIFSGTKQAAHRLKILFGLAGLKAAELHGNLTQAQRLDSLELFRKQEVDFLIATDVAARGLDIIGVQTVINYACPREIDSYVHRVGRTARAGREGYAVTFVTDSDRSLLKVIAKKVGSKLKSRVIPEQSIVKWSQIIDEMEDQYSAVISAERDERALRKAEMEFAKAENMLEHRDEIYARPKRTWFMTEKEKKLVAQAEKDSAGNPAGGELVSADRAEDLKMKEKRKREREKNLPRKKRRKLEAAREMLEDNEGEEEEEDEEGDEKRGRSRGKDKKKQETDKKGLTLKDLGYMRAKAVKAKQRAIDSGKMERPKPDKKQSRSKPRNQPRGEEMKDLFKSDMGEKKQGRGGAAAAAKPRTKSKNSFKSKARYKRR

SEQ ID NO: 100736 - DNA, 1076 bp, Arabidopsis thaliana
  misc_feature (1)..(1076): Ceres Seq. ID no. 13605987
  misc_feature (1)..(1076): Ortholog of  Ceres SEQ ID NO 14302919 as cited in SEQ ID NO 20338
  misc_feature (1)..(1076): Ortholog of  Ceres SEQ ID NO 13595497 as cited in SEQ ID NO 51127
atcttctatctctcaaaagaaaagcagacaactttatttgcaaaaacagagtttttttttcttatcttgagaaagttcaacagaagatgatgttcgagaaagacgatctgggtctaagcttaggcttgaattttccaaagaaacagatcaatctcaaatcaaatccatctgtttctgttactccttcttcttcttcttttggattattcagaagatcttcatggaacgagagttttacttcttcagttccaaactcagattcgtcacaaaaagaaacaagaactttcatccgaggaatcgacgtgaacagaccaccgtctacagcggaatacggcgacgaagacgctggagtatcttcacctaacagtacagtctcaagctctacagggaaaagaagcgagagagaagaagacacagatccacaaggctcaagaggaatcagtgacgatgaagatggtgataactccaggaaaaagcttagactttccaaagatcaatctgctattcttgaagagaccttcaaagatcacagtactctcaatccgaagcagaagcaagcattggctaaacaattagggttacgagcaagacaagtggaagtttggtttcagaacagacgagcaagaacaaagctgaagcaaacggaggtagactgcgagttcttacggagatgctgcgagaatctaacggaagagaaccgtcggctacaaaaagaagtaacggaattgagagcacttaagctctctcctcagttctacatgcacatgagcccacccactactttgaccatgtgcccttcatgtgaacacgtgtcggtcccgccaccacaacctcaggctgctacgtcagcgcaccaccggtcgttgccggtcaatgcgtgggctcctgcgacgaggatatctcacggcttgacttttgacgctcttcgtcctaggtcctaagtctttttacttgcaaccaaagggcattttggtcgttttttaagtttcatggaccagatatgcatgtagttgttaacatgtatgtattttcttagaaagaaagaaaaacagattaatatttttctagcttaaacc

SEQ ID NO: 100737 - protein, 312 aa, Arabidopsis thaliana
  peptide (1)..(312): Ceres Seq. ID no. 13605988
LLSLKRKADNFICKNRVFFSYLEKVQQKMMFEKDDLGLSLGLNFPKKQINLKSNPSVSVTPSSSSFGLFRRSSWNESFTSSVPNSDSSQKETRTFIRGIDVNRPPSTAEYGDEDAGVSSPNSTVSSSTGKRSEREEDTDPQGSRGISDDEDGDNSRKKLRLSKDQSAILEETFKDHSTLNPKQKQALAKQLGLRARQVEVWFQNRRARTKLKQTEVDCEFLRRCCENLTEENRRLQKEVTELRALKLSPQFYMHMSPPTTLTMCPSCEHVSVPPPQPQAATSAHHRSLPVNAWAPATRISHGLTFDALRPRS

SEQ ID NO: 100738 - protein, 284 aa, Arabidopsis thaliana; identical to SEQ ID NO: 37759
  peptide (1)..(284): Ceres Seq. ID no. 13605989

SEQ ID NO: 100739 - protein, 283 aa, Arabidopsis thaliana; identical to SEQ ID NO: 37760
  peptide (1)..(283): Ceres Seq. ID no. 13605990

SEQ ID NO: 100740 - DNA, 2658 bp, Arabidopsis thaliana
  misc_feature (1)..(2658): Ceres Seq. ID no. 13606003
  misc_feature (1)..(2658): Ortholog of  Ceres SEQ ID NO 14314812 as cited in SEQ ID NO 52569
  misc_feature (1)..(2658): Ortholog of  Ceres SEQ ID NO 15168492 as cited in SEQ ID NO 58104
gaagagaatccgatgcgtagaagactatcttccgtgctaatcaacaatcagtgcatcgcgtcccaacgccattaccacacatctcgacctgagaaacccacaaagaaagccagcagccatgaaccaactcacaaattcaccaggaagccatgggaggaagtgccatttctcaccgatctcaaagaaatcgaagacccagaggaagctctttctctcttccaccaataccaggaaatgggtttccgacacgactacccatcttactcttctctcatctacaagcttgcaaagtcccgtaacttcgacgccgtcgaccaaattctccgccttgttcgctatcgaaacgtccggtgcagagaatccctcttcatgggattgattcagcattacgggaaagccggttcggtcgacaaagccatcgatgttttccacaaaatcacctcctttgattgtgttcgcacgattcagtctctcaacactctcatcaacgttctggtcgataacggcgagttggaaaaggccaaaagctttttcgacggggcaaaggatatgcgtttgcgtcccaattcggtgtctttcaatattttgatcaaaggatttcttgataaatgcgattgggaagctgcatgtaaggtgttcgacgaaatgcttgagatggaggtgcaaccgagtgttgtgacatacaatagcctgattggtttcttatgccgaaatgacgatatgggtaaggcgaagagcttgcttgaagatatgattaagaaaagaatacgtccgaatgctgtgacatttgggttgttaatgaaaggtttatgttgtaagggagagtacaatgaagcaaagaagttgatgttcgatatggagtatcgtgggtgtaaaccgggtctcgttaactacggaattttgatgagtgatcttgggaagagagggagaattgatgaggcaaagcttctactcggcgagatgaagaaaagacggataaaaccagatgttgtgatctataacattctggtaaaccatctttgcactgagtgtagagtccctgaggcttatagagtgctgacggaaatgcagatgaaagggtgtaaaccaaatgcagctacataccgtatgatgattgatgggttttgtcgtatcgaggattttgattcagggttgaatgttttgaatgcaatgcttgcaagcagacactgtcccacacctgcaacgtttgtatgtatggttgctgggctgattaaaggcggtaacttggaccatgcttgctttgtgttagaggtgatgggaaagaaaaacttaagttttgggtctggtgcttggcaaaatctactttctgatctctgcatcaaggatggaggagtatattgtgaggctttgtcagaagtaatttccatctaagcaatgacctttttaaaggctgcaaagtactcttcttcctgattttagctctcgccattacttttgtctcagctgctcggcttcttgatgaagaagaagatattgggttggtccctttgcctaccacgagtcctggtcctttaccaacagttggttttaggcccctttcccactgctaattcaggccctgcaactggtatcgcttcaggtacaggttcagcctcagggggtttaggttccttgggtaccaatactggccccgggcctctatcgaccactggttctagtcttttaccagttgctagttcgggtaccttgcctgttactggccccggtcctctaccaaccagttctggtctcttaccgggtgctagttcgggtaacttgcctggttcaggttcagggcctttgcctactgttggttcaggtgctgcagctacgggtctgggcgcaggtgcagggtcagtgattggtggttcagttcctgacaacactttggttttcttcatgcacgatatactcggtggctcaaacccgacagcgagggctgtgactggagtcgtcgcaaacgcagccctcagtggccaaattccattcgctaagcccaatggtgcaaacctccctgttagtaacggcgttccatcagacaataacaacaatggaatcctgaacaataacaacgtcccacttctcgtcgggcttggcggaaccacttccaacattctacagaacaatggaaacaacatgttgaacggtcttcccgtggctaacggcggccagctcccatcgggttcgtctcttcagatgctcatgtttgggacattgacggtgatggacaacgaactaaccgaaggacacgaactcgggtctggtctgctgggtaaagcccaaggcttctacgtggcaagtgcccttgatgggaccagccagactatggctttcacggctatgtttgagagcggtggatatgaagatagcatcagtttcttcggtgtgcatagaacagctgcatcggaatctcatcttggggtaatgggcggtactggtaagtatgtgaatgcgagaggcttcgcaattgtcaagacttttacgggttcctccgggacccagcagcagcagccgcaccagttcacagatgggctcgagactgttctggagtgcaccgtttatctttcttactagtttcttttccctcttctcttatcttttttgtctaccaagaaaacgtgaaaacctattaatttgacaaccaatcccttgttattc

SEQ ID NO: 100741 - protein, 463 aa, Arabidopsis thaliana; identical to SEQ ID NO: 76097
  peptide (1)..(463): Ceres Seq. ID no. 13606004

SEQ ID NO: 100742 - protein, 459 aa, Arabidopsis thaliana; identical to SEQ ID NO: 76098
  peptide (1)..(459): Ceres Seq. ID no. 13606005

SEQ ID NO: 100743 - protein, 385 aa, Arabidopsis thaliana; identical to SEQ ID NO: 76099
  peptide (1)..(385): Ceres Seq. ID no. 13606006

SEQ ID NO: 100744 - DNA, 591 bp, Arabidopsis thaliana
  misc_feature (1)..(591): Ceres Seq. ID no. 13606007
  misc_feature (1)..(591): Ortholog of  Ceres SEQ ID NO 12614814 as cited in SEQ ID NO 68816
atggcgaatgagagtaataatcttggactcgaaatcaccgaactacggctaggtcttcccggagatatcgtcgtctccggtgagtccatctccgggaagaagagggcttctccggaagtagagattgatttgaaatgtgaaccggcgaaaaagagtcaagttgtgggttggccaccggtttgttcgtaccggagaaagaacagtctcgaacggaccaaaagttcgtacgtgaaagtgagtgtagatggagctgcatttttaaggaagattgatttggaaatgtacaaatgttaccaagatcttgcttccgctctgcaaattctgttcggatgctatatcaattttgatgatacgttgaaggaaagtgaatgtgtaccaatatatgaagacaaagatggagattggatgcttgctggagatgttccttgggaaatgttccttggatcgtgcaagaggttaaggattatgaagagatcatgtaacagaggatgaatgatatttatagtcacatgtgaatgtgagtgagccttacagatatctaaatatacatttttgcagttactcaatatttctcttcggaagtctaagatt

SEQ ID NO: 100745 - protein, 163 aa, Arabidopsis thaliana
  peptide (1)..(163): Ceres Seq. ID no. 13606008
MANESNNLGLEITELRLGLPGDIVVSGESISGKKRASPEVEIDLKCEPAKKSQVVGWPPVCSYRRKNSLERTKSSYVKVSVDGAAFLRKIDLEMYKCYQDLASALQILFGCYINFDDTLKESECVPIYEDKDGDWMLAGDVPWEMFLGSCKRLRIMKRSCNRG

SEQ ID NO: 100746 - DNA, 1757 bp, Arabidopsis thaliana
  misc_feature (1)..(1757): Ceres Seq. ID no. 13606009
  misc_feature (1)..(1757): Ortholog of  Ceres SEQ ID NO 15178767 as cited in SEQ ID NO 55317
  misc_feature (1)..(1757): Ortholog of  Ceres SEQ ID NO 13657647 as cited in SEQ ID NO 66399
gtctccatcgctcgtttgtttcttcttcagccatatcggaaaaaacgatatccgacgagccattcggtgtttgttccgagaagctccgatcgatctgtgttagggtttttctttttccgccttatgaatctctctatcgcggtttcattagattcagtttaactcgagtgatgaaaccaatctccgtgctagagctctttgatcccgtggctggtaggatattacggcgtttgtagctctgtcgtcgtggatagagttagaacgacgaaatcagccttggtttcctaactgttatttggcatttcagtatctgaatttttgcaacaatgtctgagctaaaagagcgcctgcttcctccaagacctgcttcagctatgaacctcagagatgcttctgtgactcggccttctgcttctggaagaccaccccttcttggagttgatgtcttgggtctgaagaagcgtggacaaggcctacgctcttggattcgtgttgatacttctggtaatactcaggtcatggaggttgacaagttcactatgatgcgtaggtgtgacttacccgcccgtgatttaaggctgcttgatcccttattcgtgtatccctctactatcctaggccgagagaaggctattgttgtcaacttagagcagatccgttgtattattactgcagacgaagttctgcttctgaattcccttgacaactacgtgctgcgctatgttgttgagttgcagcagagactaaagactagtagtgtaggtgagatgtggcagcaggaaaattcccagttgagtaggaggaggagcaggagttttgacaatgcttttgagaattcatcccctgattatttacctttcgagtttagagctcttgaaatagcccttgaagctgcttgtacgtttctcgattcccaggcttcagagttggagattgaggcatacccgttattagatgagcttacctcaaagatcagtacactaaacttggagcgtgtgcgtagactaaagagcaggcttgtagcactgacaagaagagttcagaaggttcgggatgagatcgagcagctaatggatgatgatggagatatggcagaaatgtatctaacagagaagaagaggagaatggaaggatctatgtacggtgaccagtccttattgggttacaggtcaaatgatggtctatctgtttctgcaccggtgtctcctgtttcttctccacctgattcccgaagacttgataaaagcttgagcattgcgaggagtcggcatgacagtgcaaggagttctgaaggtgcagagaatatagaagagctagagatgttgctggaagcttactttgtcgtcattgatagtactctaaacaagttgacatcgttaaaggagtacattgatgacactgaagatttcattaacattcaactggataatgtgcggaatcagctgatccagttcgagttgcttctgacgactgcaacgtttgttgtagccatatttggggtcgttgctgggatctttgggatgaactttgagatagacttcttcaatcagccaggtgcattcagatgggtactcataattactggagtatgtggctttgtgatattttcggcattcgtctggttcttcaagtacagaagactcatgcctctataagaagagagacatgaatgtgctccccagaaagtagacatcaacttatattgttatgttgcttacagatattaatgatttgtttcctttacacaatggaatctt

SEQ ID NO: 100747 - protein, 442 aa, Arabidopsis thaliana; identical to SEQ ID NO: 76969
  peptide (1)..(442): Ceres Seq. ID no. 13606010

SEQ ID NO: 100748 - protein, 426 aa, Arabidopsis thaliana; identical to SEQ ID NO: 76970
  peptide (1)..(426): Ceres Seq. ID no. 13606011

SEQ ID NO: 100749 - protein, 378 aa, Arabidopsis thaliana; identical to SEQ ID NO: 76971
  peptide (1)..(378): Ceres Seq. ID no. 13606012

SEQ ID NO: 100750 - DNA, 2331 bp, Arabidopsis thaliana
  misc_feature (1)..(2331): Ceres Seq. ID no. 13606013
  misc_feature (1)..(2331): Ortholog of  Ceres SEQ ID NO 14303276 as cited in SEQ ID NO 1264
  misc_feature (1)..(2331): Ortholog of  Ceres SEQ ID NO 15170536 as cited in SEQ ID NO 52791
  misc_feature (1)..(2331): Ortholog of  Ceres SEQ ID NO 15171813 as cited in SEQ ID NO 57309
  misc_feature (1)..(2331): Ortholog of  Ceres SEQ ID NO 14314378 as cited in SEQ ID NO 57601
  misc_feature (1)..(2331): Ortholog of  Ceres SEQ ID NO 12465083 as cited in SEQ ID NO 68239
ggtacgtttgcgcgatttctccacctttccacaatcccctgggttgtgccacgaccttttttctcgaaatgtctcgttcctctcgtcggattcgtatatatagcttcttccatcgtttccgattcttcatcaaacagataaacaaacaaaagaaatcgaaaaacctcacttccaatttcattcaattactgaagcttttttttagcaacaatggcgacgaaatcagagaaagctattggtatcgatctcggcactacatacagttgtgtcggagtttggatgaatgatcgtgtggagatcattccgaacgatcagggaaaccgtacgacgccgtcgtacgtcgccttcactgatactgagcggctgatcggagacgcggcaaagaatcaagtggctttgaatcctcagaacactgtattcgatgcgaaacgtctcatcggaaggaagttctctgatccttctgttcagagtgacatactccactggccgttcaaggttgtttccggccccggtgagaagccgatgatagtcgtttcgtataagaatgaagagaagcagttttctcctgaggaaatatcttccatggtgttggtgaagatgaaggaagtcgctgaggctttcttaggtcgcacagttaaaaacgccgttgtaacggttccggcgtattttaacgattcgcagagacaggctacgaaggacgccggagctatctctgggcttaatgttttgaggataatcaatgagccgactgctgcagctatagcttatggtttggataagaagggtacgaaggccggtgagaagaacgttttgattttcgatctcggtggtggaacttttgatgtttcgctgttgacgattgaagaaggtgtctttgaagtgaaagctactgctggagatactcatcttggtggtgaagactttgacaacagacttgtgaaccatttcgttgcggagtttaggaggaaacacaagaaggatattgctgggaatgcgagagctcttaggaggctaaggacagcttgtgagagagcaaagagaacactttcgtccacggctcagacgactattgagattgattctctgcacgagggtattgacttctatgcgacgatatcacgtgcaaggtttgaggagatgaacatggatttgttcaggaaatgtatggatcctgtggagaaagttcttaaagacgccaagctcgacaagagcagtgtgcacgatgttgttctggttggagggtcgacgaggattccgaaaattcaacagcttttgcaagatttctttaatgggaaggagttatgcaagagcataaaccctgatgaagctgttgcctatggagctgcggttcaggctgcgattcttacaggtgaaggaagtgaaaaggtccaggatcttctgcttcttgatgttgctccgcttagccttggacttgagacagcaggtggggtcatgactgtgttaattccaagaaacacgacggttccttgtaagaaggagcaagtgttctctacgtatgcagacaatcaaccaggcgttctgatccaagtctacgaaggagaacgtgcaaggaccagagataacaaccttctcggaactttcgagctcaagggcattcctcctgctccacgtggggttcctcaaatcaatgtttgcttcgacattgacgcgaatgggatcttaaatgtgtcggctgaggataaaaccgctggtgtgaagaaccagatcacgatcaccaacgacaaaggaaggttgagtaaagaggagatagagaagatggtgcaagatgctgagaagtacaaggctgaggatgagcaagtgaagaagaaggtggaggccaagaattcgcttgagaactatgcttacaacatgagaaacactatcaaggatgagaaactcgcacagaaactaactcaagaggataagcagaagattgagaaggcgattgatgaaacaattgaatggatcgaaggaaaccagctggcggaagttgatgagtttgagtacaagttgaaagagttagaaggtatttgcaacccaatcatctcaaagatgtatcagggtggtgctgctgctggaggtatgccgacagatggtgatttcagtagctcaggtgctgctggaggtcccaagatcgaagaggtggattagagcgtgtttagtgtgttaagacgaaagagtggctttggaccattagcgagtcttttctttgtattgtgtcaaatagtgttgtgtactcataggtgttttgctagtgaacgatagttgtatgctttacatatttcagctgtttcagttgtttcgagtaataaagtgatatacttttttctc

SEQ ID NO: 100751 - protein, 646 aa, Arabidopsis thaliana
  peptide (1)..(646): Ceres Seq. ID no. 13606014
MATKSEKAIGIDLGTTYSCVGVWMNDRVEIIPNDQGNRTTPSYVAFTDTERLIGDAAKNQVALNPQNTVFDAKRLIGRKFSDPSVQSDILHWPFKVVSGPGEKPMIVVSYKNEEKQFSPEEISSMVLVKMKEVAEAFLGRTVKNAVVTVPAYFNDSQRQATKDAGAISGLNVLRIINEPTAAAIAYGLDKKGTKAGEKNVLIFDLGGGTFDVSLLTIEEGVFEVKATAGDTHLGGEDFDNRLVNHFVAEFRRKHKKDIAGNARALRRLRTACERAKRTLSSTAQTTIEIDSLHEGIDFYATISRARFEEMNMDLFRKCMDPVEKVLKDAKLDKSSVHDVVLVGGSTRIPKIQQLLQDFFNGKELCKSINPDEAVAYGAAVQAAILTGEGSEKVQDLLLLDVAPLSLGLETAGGVMTVLIPRNTTVPCKKEQVFSTYADNQPGVLIQVYEGERARTRDNNLLGTFELKGIPPAPRGVPQINVCFDIDANGILNVSAEDKTAGVKNQITITNDKGRLSKEEIEKMVQDAEKYKAEDEQVKKKVEAKNSLENYAYNMRNTIKDEKLAQKLTQEDKQKIEKAIDETIEWIEGNQLAEVDEFEYKLKELEGICNPIISKMYQGGAAAGGMPTDGDFSSSGAAGGPKIEEVD

SEQ ID NO: 100752 - protein, 623 aa, Arabidopsis thaliana
  peptide (1)..(623): Ceres Seq. ID no. 13606015
MNDRVEIIPNDQGNRTTPSYVAFTDTERLIGDAAKNQVALNPQNTVFDAKRLIGRKFSDPSVQSDILHWPFKVVSGPGEKPMIVVSYKNEEKQFSPEEISSMVLVKMKEVAEAFLGRTVKNAVVTVPAYFNDSQRQATKDAGAISGLNVLRIINEPTAAAIAYGLDKKGTKAGEKNVLIFDLGGGTFDVSLLTIEEGVFEVKATAGDTHLGGEDFDNRLVNHFVAEFRRKHKKDIAGNARALRRLRTACERAKRTLSSTAQTTIEIDSLHEGIDFYATISRARFEEMNMDLFRKCMDPVEKVLKDAKLDKSSVHDVVLVGGSTRIPKIQQLLQDFFNGKELCKSINPDEAVAYGAAVQAAILTGEGSEKVQDLLLLDVAPLSLGLETAGGVMTVLIPRNTTVPCKKEQVFSTYADNQPGVLIQVYEGERARTRDNNLLGTFELKGIPPAPRGVPQINVCFDIDANGILNVSAEDKTAGVKNQITITNDKGRLSKEEIEKMVQDAEKYKAEDEQVKKKVEAKNSLENYAYNMRNTIKDEKLAQKLTQEDKQKIEKAIDETIEWIEGNQLAEVDEFEYKLKELEGICNPIISKMYQGGAAAGGMPTDGDFSSSGAAGGPKIEEVD

SEQ ID NO: 100753 - protein, 542 aa, Arabidopsis thaliana
  peptide (1)..(542): Ceres Seq. ID no. 13606016
MIVVSYKNEEKQFSPEEISSMVLVKMKEVAEAFLGRTVKNAVVTVPAYFNDSQRQATKDAGAISGLNVLRIINEPTAAAIAYGLDKKGTKAGEKNVLIFDLGGGTFDVSLLTIEEGVFEVKATAGDTHLGGEDFDNRLVNHFVAEFRRKHKKDIAGNARALRRLRTACERAKRTLSSTAQTTIEIDSLHEGIDFYATISRARFEEMNMDLFRKCMDPVEKVLKDAKLDKSSVHDVVLVGGSTRIPKIQQLLQDFFNGKELCKSINPDEAVAYGAAVQAAILTGEGSEKVQDLLLLDVAPLSLGLETAGGVMTVLIPRNTTVPCKKEQVFSTYADNQPGVLIQVYEGERARTRDNNLLGTFELKGIPPAPRGVPQINVCFDIDANGILNVSAEDKTAGVKNQITITNDKGRLSKEEIEKMVQDAEKYKAEDEQVKKKVEAKNSLENYAYNMRNTIKDEKLAQKLTQEDKQKIEKAIDETIEWIEGNQLAEVDEFEYKLKELEGICNPIISKMYQGGAAAGGMPTDGDFSSSGAAGGPKIEEVD

SEQ ID NO: 100754 - DNA, 2552 bp, Arabidopsis thaliana
  misc_feature (1)..(2552): Ceres Seq. ID no. 13606021
  misc_feature (1)..(2552): Ortholog of  Ceres SEQ ID NO 13584744 as cited in SEQ ID NO 69137
acgcatcatccatcttatctcatttctgacattttcgtctatgcagagtcttgatttttgttttctcccttcattaaacaacattactagaatcaaaagatcagatagagctggcaagttgagagaacaagaacaagatcagtatgaagacagagactcacaaccgtcaatgcattccactagcgatctctgtcctatctctgttcatcaatggcgtctcatcagcaagacaacctccagatcggtgtaacagagtctgcggagaaatatcaattcctttcccgtttggcatcggtgggaaagattgctatctaaacccgtggtacgaggttgtctgtaacagcacaaactctgttccgttcctctcaaggatcaacagagaattggtgaacatctctctcaatggagttgtccacatcaaagctcccgtaacttcctccggctgttctacaggaacatctcagccacttacaccgccgcctttaaacgttgctggccaaggcagcccctatttcctcacggacaagaacctactcgtggcggttggttgcaaattcaaggctgttatggcgggtattacatcgcagatcaccagttgtgagtcgagttgtaacgagagaaacagtagcagccaagaaggaagaaacaaaatctgcaatggttataaatgttgccagacgaggataccagaagggcagccgcaagtaatcagtgtggatatagagatccctcaaggtaacaacacaacaggagaaggaggatgcagagttgcgtttttgacgagcgacaagtattcaagtttaaatgttacagagccagaaaagtttcatggtcatggatacgcggcggtcgagcttggatggttctttgatacttccgattctcgtgatacacaacccataagttgtaaaaatgcgtcagatacaacaccgtacacttccgatacgaggtgtagttgctcatacggctacttttctggattcagctatagggactgctactgtaactccccaggttataaagggaatccgttccttccaggtggttgtgtagacgtggatgaatgtaaactagatataggacgcaaccagtgtaaagatcaaagctgtgtgaatctgcccggttggtttgactgccagcccaagaaaccagagcagctcaagcgggtgattcaaggtgttcttataggttcagcactgttgcttttcgccttcggaatcttcgggttgtacaagttcgtacagaagcggaggaaactaatccgaatgaggaagttcttcagacgtaatggaggtatgttgttaaaacaacagttagctagaaaagaaggcaatgtagagatgtcaagaatattcagctcacatgagttggagaaagctactgataacttcaacaagaatagggttcttgggcaaggaggtcaaggtacagtgtataagggaatgctcgttgatggtagaatcgtcgcagtaaaaaggtcgaaagctgtggatgaagatagggtagaagagttcatcaatgaagttgttgttcttgcgcagatcaatcatagaaatattgttaaacttttggggtgttgtcttgaaacggaagttccagtcttagtttatgagtttgttccaaatggagacttatgcaagcgtcttcatgatgaatctgatgattacacaatgacatgggaggtgcgtcttcacattgctatagagattgcaggagcactttcttatttgcattctgctgcatctttccccatatatcatagagatatcaagactactaatatactcttagatgagagaaaccgagctaaggtgtcggatttcggaacttcaagatcagtaactatagatcaaactcacttgacaactcaagttgcaggcacttttggatatgtggatccagagtactttcaatcaagcaagtttacggaaaaaagtgatgtttatagttttggagttgtccttgtggagctcttaaccggagaaaaaccttcctcccgtgtccggtctgaagaaaacaggggccttgcagctcactttgtcgaagccgtgaaagagaacagagtgcttgacatagttgatgatcggatcaaagatgaatgcaacatggaccaagtaatgtcagtggcaaatctagctagaaggtgtttaaaccgaaaagggaagaagaggccaaacatgagagaggtttcaattgagctggagatgattcgttcatcacattatgattcaggaattcatatagaggacgacgatgaggaagatgatcaagccatggaactcaactttaacgacacttgggaggttggtgcgactgctccagcctccatgtttaacaatgcatcccccacgtctgatgctgagcctctggtgcctttacgaacatggtaatgatcaactcaaaacactgcatatgtatactctcatctgatgtaaactttcgataatgaatatttggttttcaccatgtaatataacacacaaattgcattatattttcaagaagaaaaataatgttttagtacaagaacaataaatggggcttcaaccttc

SEQ ID NO: 100755 - protein, 748 aa, Arabidopsis thaliana
  peptide (1)..(748): Ceres Seq. ID no. 13606022
MKTETHNRQCIPLAISVLSLFINGVSSARQPPDRCNRVCGEISIPFPFGIGGKDCYLNPWYEVVCNSTNSVPFLSRINRELVNISLNGVVHIKAPVTSSGCSTGTSQPLTPPPLNVAGQGSPYFLTDKNLLVAVGCKFKAVMAGITSQITSCESSCNERNSSSQEGRNKICNGYKCCQTRIPEGQPQVISVDIEIPQGNNTTGEGGCRVAFLTSDKYSSLNVTEPEKFHGHGYAAVELGWFFDTSDSRDTQPISCKNASDTTPYTSDTRCSCSYGYFSGFSYRDCYCNSPGYKGNPFLPGGCVDVDECKLDIGRNQCKDQSCVNLPGWFDCQPKKPEQLKRVIQGVLIGSALLLFAFGIFGLYKFVQKRRKLIRMRKFFRRNGGMLLKQQLARKEGNVEMSRIFSSHELEKATDNFNKNRVLGQGGQGTVYKGMLVDGRIVAVKRSKAVDEDRVEEFINEVVVLAQINHRNIVKLLGCCLETEVPVLVYEFVPNGDLCKRLHDESDDYTMTWEVRLHIAIEIAGALSYLHSAASFPIYHRDIKTTNILLDERNRAKVSDFGTSRSVTIDQTHLTTQVAGTFGYVDPEYFQSSKFTEKSDVYSFGVVLVELLTGEKPSSRVRSEENRGLAAHFVEAVKENRVLDIVDDRIKDECNMDQVMSVANLARRCLNRKGKKRPNMREVSIELEMIRSSHYDSGIHIEDDDEEDDQAMELNFNDTWEVGATAPASMFNNASPTSDAEPLVPLRTW

SEQ ID NO: 100756 - protein, 607 aa, Arabidopsis thaliana
  peptide (1)..(607): Ceres Seq. ID no. 13606023
MAGITSQITSCESSCNERNSSSQEGRNKICNGYKCCQTRIPEGQPQVISVDIEIPQGNNTTGEGGCRVAFLTSDKYSSLNVTEPEKFHGHGYAAVELGWFFDTSDSRDTQPISCKNASDTTPYTSDTRCSCSYGYFSGFSYRDCYCNSPGYKGNPFLPGGCVDVDECKLDIGRNQCKDQSCVNLPGWFDCQPKKPEQLKRVIQGVLIGSALLLFAFGIFGLYKFVQKRRKLIRMRKFFRRNGGMLLKQQLARKEGNVEMSRIFSSHELEKATDNFNKNRVLGQGGQGTVYKGMLVDGRIVAVKRSKAVDEDRVEEFINEVVVLAQINHRNIVKLLGCCLETEVPVLVYEFVPNGDLCKRLHDESDDYTMTWEVRLHIAIEIAGALSYLHSAASFPIYHRDIKTTNILLDERNRAKVSDFGTSRSVTIDQTHLTTQVAGTFGYVDPEYFQSSKFTEKSDVYSFGVVLVELLTGEKPSSRVRSEENRGLAAHFVEAVKENRVLDIVDDRIKDECNMDQVMSVANLARRCLNRKGKKRPNMREVSIELEMIRSSHYDSGIHIEDDDEEDDQAMELNFNDTWEVGATAPASMFNNASPTSDAEPLVPLRTW

SEQ ID NO: 100757 - protein, 374 aa, Arabidopsis thaliana
  peptide (1)..(374): Ceres Seq. ID no. 13606024
MRKFFRRNGGMLLKQQLARKEGNVEMSRIFSSHELEKATDNFNKNRVLGQGGQGTVYKGMLVDGRIVAVKRSKAVDEDRVEEFINEVVVLAQINHRNIVKLLGCCLETEVPVLVYEFVPNGDLCKRLHDESDDYTMTWEVRLHIAIEIAGALSYLHSAASFPIYHRDIKTTNILLDERNRAKVSDFGTSRSVTIDQTHLTTQVAGTFGYVDPEYFQSSKFTEKSDVYSFGVVLVELLTGEKPSSRVRSEENRGLAAHFVEAVKENRVLDIVDDRIKDECNMDQVMSVANLARRCLNRKGKKRPNMREVSIELEMIRSSHYDSGIHIEDDDEEDDQAMELNFNDTWEVGATAPASMFNNASPTSDAEPLVPLRTW

SEQ ID NO: 100758 - DNA, 778 bp, Arabidopsis thaliana
  misc_feature (1)..(778): Ceres Seq. ID no. 13606025
  misc_feature (1)..(778): Ortholog of  Ceres SEQ ID NO 13504224 as cited in SEQ ID NO 137
  misc_feature (1)..(778): Ortholog of  Ceres SEQ ID NO 12635820 as cited in SEQ ID NO 0
gtagtgtaacatagtatttgatttgtatactaaaataaatgtaaaatttatcgggctgttgtacctggcaagtacaccatatgtgtactctctcctcaatgctctcgtcataatctttccatgtcttcttctctctatatatattacttaactctttctcactctctctaattttaaatttatctatcattagtttaaaccgccggagaacaaaaaatgaagcatctcatccgccgcctctctagagtcgccgactcatcctccgaattctccatccgccgttccacctcctccttccgcaaccgtcgcggtcaccatcgtctccacgcgccgccgcctccgtggtcaatatgtccagctagaagagtcaacaccgtccccgctggtcacgtacctgtctacgtcggcgaggagatggagaggttcgtggttagcgcagagcttatgaaccacccgatcttcgttggtttgctaaaccgatccgctcaagaatacggttacgctcagaaaggagttcttcatatcccttgccacgtcatcgtgtttgagcgcgtggtggaaacgctccggttgggagggtttgaagggtccggtgatctagagaatcttgtggcttcgttgctctccggtgatgagttgatacctgaaactacagagtagcttttgaagaagaatccaaatcggcgatttgatattttctctgttttctctgttttctttcaattttccgtttttttactttctcgattttgtaaacatataattatatatacaccag

SEQ ID NO: 100759 - protein, 147 aa, Arabidopsis thaliana
  peptide (1)..(147): Ceres Seq. ID no. 13606026
MKHLIRRLSRVADSSSEFSIRRSTSSFRNRRGHHRLHAPPPPWSICPARRVNTVPAGHVPVYVGEEMERFVVSAELMNHPIFVGLLNRSAQEYGYAQKGVLHIPCHVIVFERVVETLRLGGFEGSGDLENLVASLLSGDELIPETTE

SEQ ID NO: 100760 - protein, 81 aa, Arabidopsis thaliana
  peptide (1)..(81): Ceres Seq. ID no. 13606027
MERFVVSAELMNHPIFVGLLNRSAQEYGYAQKGVLHIPCHVIVFERVVETLRLGGFEGSGDLENLVASLLSGDELIPETTE

SEQ ID NO: 100761 - DNA, 1349 bp, Arabidopsis thaliana
  misc_feature (1)..(1349): Ceres Seq. ID no. 13606028
  misc_feature (1)..(1349): Ortholog of  Ceres SEQ ID NO 12636774 as cited in SEQ ID NO 372
  misc_feature (1)..(1349): Ortholog of  Ceres SEQ ID NO 13582350 as cited in SEQ ID NO 56734
  misc_feature (1)..(1349): Ortholog of  Ceres SEQ ID NO 12582113 as cited in SEQ ID NO 58349
  misc_feature (1)..(1349): Ortholog of  Ceres SEQ ID NO 15175861 as cited in SEQ ID NO 59381
  misc_feature (1)..(1349): Ortholog of  Ceres SEQ ID NO 12615466 as cited in SEQ ID NO 62761
  misc_feature (1)..(1349): Ortholog of  Ceres SEQ ID NO 14314080 as cited in SEQ ID NO 63105
  misc_feature (1)..(1349): Ortholog of  Ceres SEQ ID NO 13597295 as cited in SEQ ID NO 63743
  misc_feature (1)..(1349): Ortholog of  Ceres SEQ ID NO 12617090 as cited in SEQ ID NO 64005
  misc_feature (1)..(1349): Ortholog of  Ceres SEQ ID NO 15226458 as cited in SEQ ID NO 64042
  misc_feature (1)..(1349): Ortholog of  Ceres SEQ ID NO 13597439 as cited in SEQ ID NO 64081
  misc_feature (1)..(1349): Ortholog of  Ceres SEQ ID NO 13597233 as cited in SEQ ID NO 64370
  misc_feature (1)..(1349): Ortholog of  Ceres SEQ ID NO 13598327 as cited in SEQ ID NO 68040
  misc_feature (1)..(1349): Ortholog of  Ceres SEQ ID NO 13599438 as cited in SEQ ID NO 0
attcattatatgcacaaataataggttagatttggcttttagctttgcctacatctctttttttcttgtttcatccaaggagaagaaagcccccatggaagccaaagaagaaaccccgtggagctctattttagttccttctgttcaggagatggtgaaggataagatgatcacgaccgttcctcccagatatgttcggtatgatcaagacaaaactgaagtcgtcgtccatgattctggcctcatatccgagatccccatcatcgacatgaatcggttgtgttcttctaccgccgtggactctgaggttgagaaactcgactttgcttgcaaagaatatggatttttccagcttgtaaaccatggaatagacccaagtttcttggacaaaataaagtcagagattcaagatttcttcaaccttcccatggaagaaaaaaagaagttgtggcagacaccagcggtgatggaagggtttggacaagcttttgtggtttcagaagatcagaaactcgactgggcagatttattcttccttataatgcaacctgttcaattacgcaagcgtcacttgttccccaagctacctcttccctttagggatacgttagatatgtattccactcgagtaaagagtatagctaagatcttactagcgaaaatggcgaaagccttgcagatcaagccagaggaggtagaagaaatatttggtgatgatatgatgcagagtatgaggatgaactactatcccccgtgtccacaacctaatctggttacgggtctaattccgcattccgatgcagtcgggctcaccatacttttgcaggtgaatgaagttgacggtctccaaatcaagaaaaatggcaagtggttttttgtcaaacctctccaaaatgctttcattgtcaatgttggggacgtgttagagatcataacgaacgggacataccgaagcatcgagcaccgggcaatggtgaacttggagaaagagaggctctccattgcgacatttcacaacacgggaatggataaagaaattggtccggcgagaagccttgttcaaagacaagaggctgcaaagtttagaagcctgaaaactaaagactacttgaatggcttgttttcccgtgaactcaaaggaaaggcttatcttgatgctatgagaattgaagggaagtgatatcttgtttcccaagaaattctgttttctccaactggtcactgtcgtgttcatattctgtttttccttctctcttatgtctttggttcaaatctgttaaagaaaaaaacgcctgtgaataatacttaataagctcgttcgtcttcgtcaacatacaaaaatatcaact

SEQ ID NO: 100762 - protein, 392 aa, Arabidopsis thaliana
  peptide (1)..(392): Ceres Seq. ID no. 13606029
FIICTNNRLDLAFSFAYISFFLVSSKEKKAPMEAKEETPWSSILVPSVQEMVKDKMITTVPPRYVRYDQDKTEVVVHDSGLISEIPIIDMNRLCSSTAVDSEVEKLDFACKEYGFFQLVNHGIDPSFLDKIKSEIQDFFNLPMEEKKKLWQTPAVMEGFGQAFVVSEDQKLDWADLFFLIMQPVQLRKRHLFPKLPLPFRDTLDMYSTRVKSIAKILLAKMAKALQIKPEEVEEIFGDDMMQSMRMNYYPPCPQPNLVTGLIPHSDAVGLTILLQVNEVDGLQIKKNGKWFFVKPLQNAFIVNVGDVLEIITNGTYRSIEHRAMVNLEKERLSIATFHNTGMDKEIGPARSLVQRQEAAKFRSLKTKDYLNGLFSRELKGKAYLDAMRIEGK

SEQ ID NO: 100763 - protein, 361 aa, Arabidopsis thaliana
  peptide (1)..(361): Ceres Seq. ID no. 13606030
MEAKEETPWSSILVPSVQEMVKDKMITTVPPRYVRYDQDKTEVVVHDSGLISEIPIIDMNRLCSSTAVDSEVEKLDFACKEYGFFQLVNHGIDPSFLDKIKSEIQDFFNLPMEEKKKLWQTPAVMEGFGQAFVVSEDQKLDWADLFFLIMQPVQLRKRHLFPKLPLPFRDTLDMYSTRVKSIAKILLAKMAKALQIKPEEVEEIFGDDMMQSMRMNYYPPCPQPNLVTGLIPHSDAVGLTILLQVNEVDGLQIKKNGKWFFVKPLQNAFIVNVGDVLEIITNGTYRSIEHRAMVNLEKERLSIATFHNTGMDKEIGPARSLVQRQEAAKFRSLKTKDYLNGLFSRELKGKAYLDAMRIEGK

SEQ ID NO: 100764 - protein, 342 aa, Arabidopsis thaliana
  peptide (1)..(342): Ceres Seq. ID no. 13606031
MVKDKMITTVPPRYVRYDQDKTEVVVHDSGLISEIPIIDMNRLCSSTAVDSEVEKLDFACKEYGFFQLVNHGIDPSFLDKIKSEIQDFFNLPMEEKKKLWQTPAVMEGFGQAFVVSEDQKLDWADLFFLIMQPVQLRKRHLFPKLPLPFRDTLDMYSTRVKSIAKILLAKMAKALQIKPEEVEEIFGDDMMQSMRMNYYPPCPQPNLVTGLIPHSDAVGLTILLQVNEVDGLQIKKNGKWFFVKPLQNAFIVNVGDVLEIITNGTYRSIEHRAMVNLEKERLSIATFHNTGMDKEIGPARSLVQRQEAAKFRSLKTKDYLNGLFSRELKGKAYLDAMRIEGK

SEQ ID NO: 100765 - DNA, 1396 bp, Arabidopsis thaliana
  misc_feature (1)..(1396): Ceres Seq. ID no. 13606032
  misc_feature (1)..(1396): Ortholog of  Ceres SEQ ID NO 12636774 as cited in SEQ ID NO 372
  misc_feature (1)..(1396): Ortholog of  Ceres SEQ ID NO 13582350 as cited in SEQ ID NO 56734
  misc_feature (1)..(1396): Ortholog of  Ceres SEQ ID NO 12476493 as cited in SEQ ID NO 58163
  misc_feature (1)..(1396): Ortholog of  Ceres SEQ ID NO 12582113 as cited in SEQ ID NO 58349
  misc_feature (1)..(1396): Ortholog of  Ceres SEQ ID NO 14310807 as cited in SEQ ID NO 58696
  misc_feature (1)..(1396): Ortholog of  Ceres SEQ ID NO 15175861 as cited in SEQ ID NO 59381
  misc_feature (1)..(1396): Ortholog of  Ceres SEQ ID NO 12615466 as cited in SEQ ID NO 62761
  misc_feature (1)..(1396): Ortholog of  Ceres SEQ ID NO 14314080 as cited in SEQ ID NO 63105
  misc_feature (1)..(1396): Ortholog of  Ceres SEQ ID NO 13597295 as cited in SEQ ID NO 63743
  misc_feature (1)..(1396): Ortholog of  Ceres SEQ ID NO 12617090 as cited in SEQ ID NO 64005
  misc_feature (1)..(1396): Ortholog of  Ceres SEQ ID NO 13597439 as cited in SEQ ID NO 64081
  misc_feature (1)..(1396): Ortholog of  Ceres SEQ ID NO 13597233 as cited in SEQ ID NO 64370
  misc_feature (1)..(1396): Ortholog of  Ceres SEQ ID NO 13598327 as cited in SEQ ID NO 68040
  misc_feature (1)..(1396): Ortholog of  Ceres SEQ ID NO 13599438 as cited in SEQ ID NO 0
aattcggcacgagccaaacttttgtttcgtccaggaaagaagccgacatggaagcaaaaggggcagcacagtggagctctatcctagttccatccgttcaagagatggttaaggagaagacgatcacgaccgttcctcctaggtacgtccggtctgatcaagacaaaactgaagtcgatgatgattttgatgtgaaaattgagatcccaatcatcgatatgaagcgtttgtgttcttcaaccaccatggattctgaggttgagaaactcgacttcgcttgcaaagagtggggatttttccagcttgtaaaccatggaatagactcaagtttcttggacaaagtaaagtcagagattcaagatttcttcaaccttcccatggaagaaaagaagaagttctggcagcgaccagatgagatagaaggtttcggacaagcttttgtggtttcagaagatcagaaactagattgggcagacttgttcttccataccgtgcaaccagttgaattacgcaagcctcacttgttccccaagctacctcttccctttagagatacactggagatgtattcttctgaagtgcagagcgtagctaagatcttaatagcgaaaatggcaagagccctagagatcaaaccagaggaactggaaaagttgtttgatgatgttgattcggttcaaagtatgaggatgaattactacccaccatgcccacaaccagatcaggttattggtctaaccccgcattctgattcggtcggactcactgtactgatgcaagtgaatgacgttgaaggtctccaaatcaagaaagatgggaaatgggttcctgttaaacccctcccaaatgctttcattgtcaatattggagacgtcttagagatcataactaatgggacataccgaagcatagagcatcgcggagttgtgaattcagagaaagagaggctctctattgcaacgtttcacaatgtgggaatgtataaagaagttggtcctgcaaaaagcctagttgaaagacaaaaggttgcaagattcaaaaggctgaccatgaaagagtataacgatggtttgttctctcgtactctcgacggaaaagcttatctagatgctttgagaatctaaagagagcaatgccttgtcgcccactactctgtttctctgttttcttgatttatgcaataaaacaatctctataatcttatcttcattgtctctctatttgcttcatttcgttaaagacaaaaatctcctgtagagaatgcttctacgtattgctacaataagacaataagtttgttcttagcaaaaaaaaggacaataagtttgttaaagtttcttgacacgttcgttgttgctcaaagatatacctaataatatgatcacatgattcacat

SEQ ID NO: 100766 - protein, 373 aa, Arabidopsis thaliana
  peptide (1)..(373): Ceres Seq. ID no. 13606033
FGTSQTFVSSRKEADMEAKGAAQWSSILVPSVQEMVKEKTITTVPPRYVRSDQDKTEVDDDFDVKIEIPIIDMKRLCSSTTMDSEVEKLDFACKEWGFFQLVNHGIDSSFLDKVKSEIQDFFNLPMEEKKKFWQRPDEIEGFGQAFVVSEDQKLDWADLFFHTVQPVELRKPHLFPKLPLPFRDTLEMYSSEVQSVAKILIAKMARALEIKPEELEKLFDDVDSVQSMRMNYYPPCPQPDQVIGLTPHSDSVGLTVLMQVNDVEGLQIKKDGKWVPVKPLPNAFIVNIGDVLEIITNGTYRSIEHRGVVNSEKERLSIATFHNVGMYKEVGPAKSLVERQKVARFKRLTMKEYNDGLFSRTLDGKAYLDALRI

SEQ ID NO: 100767 - protein, 358 aa, Arabidopsis thaliana
  peptide (1)..(358): Ceres Seq. ID no. 13606034
MEAKGAAQWSSILVPSVQEMVKEKTITTVPPRYVRSDQDKTEVDDDFDVKIEIPIIDMKRLCSSTTMDSEVEKLDFACKEWGFFQLVNHGIDSSFLDKVKSEIQDFFNLPMEEKKKFWQRPDEIEGFGQAFVVSEDQKLDWADLFFHTVQPVELRKPHLFPKLPLPFRDTLEMYSSEVQSVAKILIAKMARALEIKPEELEKLFDDVDSVQSMRMNYYPPCPQPDQVIGLTPHSDSVGLTVLMQVNDVEGLQIKKDGKWVPVKPLPNAFIVNIGDVLEIITNGTYRSIEHRGVVNSEKERLSIATFHNVGMYKEVGPAKSLVERQKVARFKRLTMKEYNDGLFSRTLDGKAYLDALRI

SEQ ID NO: 100768 - protein, 339 aa, Arabidopsis thaliana
  peptide (1)..(339): Ceres Seq. ID no. 13606035
MVKEKTITTVPPRYVRSDQDKTEVDDDFDVKIEIPIIDMKRLCSSTTMDSEVEKLDFACKEWGFFQLVNHGIDSSFLDKVKSEIQDFFNLPMEEKKKFWQRPDEIEGFGQAFVVSEDQKLDWADLFFHTVQPVELRKPHLFPKLPLPFRDTLEMYSSEVQSVAKILIAKMARALEIKPEELEKLFDDVDSVQSMRMNYYPPCPQPDQVIGLTPHSDSVGLTVLMQVNDVEGLQIKKDGKWVPVKPLPNAFIVNIGDVLEIITNGTYRSIEHRGVVNSEKERLSIATFHNVGMYKEVGPAKSLVERQKVARFKRLTMKEYNDGLFSRTLDGKAYLDALRI

SEQ ID NO: 100769 - DNA, 1372 bp, Arabidopsis thaliana
  misc_feature (1)..(1372): Ceres Seq. ID no. 13606036
  misc_feature (1)..(1372): Ortholog of  Ceres SEQ ID NO 13596803 as cited in SEQ ID NO 62267
atgatgatgtcatgtcggaatatagacttgggtacgagtgttcttgatcattcttgtagctcttcttcaacaagtcgtcgattcttgtttggcaattcttcgaagaccgtttgtatgattggtggcagaagctgtgttggaaatttggtatttctccggcgagatttggctacttgcagagctgttccggctaaatccaaggagaattctctggtcaacggtattggtcaagatcaaacagtgatgctcaatctgaggcaagagtcacgaaagccaatatctttggaaactctgtttgaggtcgtagctgatgatttgcagaggttgaacgacaatcttttatcgattgttggtgcagaaaatccggttttgatatctgctgctgagcaaatcttcagcgctggtggcaagaggatgagaccgggtttggtattccttgtatcacgagccactgcggaattagcaggcttaaaggaacttacagtagaacatcggcgtttaggtgagatcattgagatgattcacaccgcaagtttgatacacgatgatgtgttagacgaaagtgatatgcgaagaggaagggaaacggttcacgagctattcggaacaagagtagctgtattagctggggatttcatgtttgctcaagcatcatggtacttagcaaatctcgaaaaccttgaagtcattaagctcataagtcaggtgatcaaagattttgcaagcggtgagataaagcaagcatcgagtttattcgattgtgatgtcaagcttgatgactacatgctaaagagttactacaagacagcttcattagtagctgcaagcaccaaaggagcagcaattttcagtaaagtcgaaagcaaggtcgcagagcaaatgtatcagttcgggaagaatctcggtttatcttttcaagtagttgatgacattctggacttcactcagtccacagagcagttaggtaagcctgcagctaatgacctagccaaaggtaacataacggcgccagtgatcttcgcgctagagaatgagccaaggctaagagagatcattgagtctgagttttgtgagcctggatcgcttgaagaagcgattgaaatagttagaaatcgcggtgggatcaagaaagctcaagaattagcaaaggagaaagctgaacttgcgttaaagaatttgaattgtcttcctaggagtggtttcagatcggctcttgaggatatggtaatgtttaatcttgaaaggattgattagtttcaaagggtatttggcagaggaaactgtaacaacactctttacttgttcaaaacttcaaacacagatttttttttttactgtatgtcataatggagtaataaacaaaaattcatgc

SEQ ID NO: 100770 - protein, 417 aa, Arabidopsis thaliana
  peptide (1)..(417): Ceres Seq. ID no. 13606037
MMMSCRNIDLGTSVLDHSCSSSSTSRRFLFGNSSKTVCMIGGRSCVGNLVFLRRDLATCRAVPAKSKENSLVNGIGQDQTVMLNLRQESRKPISLETLFEVVADDLQRLNDNLLSIVGAENPVLISAAEQIFSAGGKRMRPGLVFLVSRATAELAGLKELTVEHRRLGEIIEMIHTASLIHDDVLDESDMRRGRETVHELFGTRVAVLAGDFMFAQASWYLANLENLEVIKLISQVIKDFASGEIKQASSLFDCDVKLDDYMLKSYYKTASLVAASTKGAAIFSKVESKVAEQMYQFGKNLGLSFQVVDDILDFTQSTEQLGKPAANDLAKGNITAPVIFALENEPRLREIIESEFCEPGSLEEAIEIVRNRGGIKKAQELAKEKAELALKNLNCLPRSGFRSALEDMVMFNLERID

SEQ ID NO: 100771 - protein, 416 aa, Arabidopsis thaliana
  peptide (1)..(416): Ceres Seq. ID no. 13606038
MMSCRNIDLGTSVLDHSCSSSSTSRRFLFGNSSKTVCMIGGRSCVGNLVFLRRDLATCRAVPAKSKENSLVNGIGQDQTVMLNLRQESRKPISLETLFEVVADDLQRLNDNLLSIVGAENPVLISAAEQIFSAGGKRMRPGLVFLVSRATAELAGLKELTVEHRRLGEIIEMIHTASLIHDDVLDESDMRRGRETVHELFGTRVAVLAGDFMFAQASWYLANLENLEVIKLISQVIKDFASGEIKQASSLFDCDVKLDDYMLKSYYKTASLVAASTKGAAIFSKVESKVAEQMYQFGKNLGLSFQVVDDILDFTQSTEQLGKPAANDLAKGNITAPVIFALENEPRLREIIESEFCEPGSLEEAIEIVRNRGGIKKAQELAKEKAELALKNLNCLPRSGFRSALEDMVMFNLERID

SEQ ID NO: 100772 - protein, 415 aa, Arabidopsis thaliana
  peptide (1)..(415): Ceres Seq. ID no. 13606039
MSCRNIDLGTSVLDHSCSSSSTSRRFLFGNSSKTVCMIGGRSCVGNLVFLRRDLATCRAVPAKSKENSLVNGIGQDQTVMLNLRQESRKPISLETLFEVVADDLQRLNDNLLSIVGAENPVLISAAEQIFSAGGKRMRPGLVFLVSRATAELAGLKELTVEHRRLGEIIEMIHTASLIHDDVLDESDMRRGRETVHELFGTRVAVLAGDFMFAQASWYLANLENLEVIKLISQVIKDFASGEIKQASSLFDCDVKLDDYMLKSYYKTASLVAASTKGAAIFSKVESKVAEQMYQFGKNLGLSFQVVDDILDFTQSTEQLGKPAANDLAKGNITAPVIFALENEPRLREIIESEFCEPGSLEEAIEIVRNRGGIKKAQELAKEKAELALKNLNCLPRSGFRSALEDMVMFNLERID

SEQ ID NO: 100773 - DNA, 673 bp, Arabidopsis thaliana
  misc_feature (1)..(673): Ceres Seq. ID no. 13606048
  misc_feature (1)..(673): Ortholog of  Ceres SEQ ID NO 13655262 as cited in SEQ ID NO 62944
ctactagattaactattatacaatcaagcttcgtctccgcaagaacaagactcaattacgtctccaagacaaatcattctgggttcgcttgtcgttctctttcaaaacccagaaacttgagtctctctgtttattctatgggttcttctagttcttctccgaaaccagacaacgtccaagaggctgagaagaatgagtttgcttctctaagtgaaaatgaatggaagaaacggctaacaccagaacagtactacatcactagacagaagggcacagagagagctttcactggggagtattggaactcaaagacccctggagtatataattgtgtatgttgcgacacacctctatttgattcatcaacaaagtttgatagtggaacagggtggccatcttactaccaaccaattggaaacaatgtgaagacaaagctagacctctctatcatcttcatgcctagacaagaagttgtctgtgctgtttgtaacgcccatcttggtcatgtctttgacgacggtccacgcccaaccggaaaacgatattgcctcaacagtgctgctctgaaacttaacgcattggagaaaacaagagattgagagtttctggtacaaggatttgttcatattacataatatactgtatcattatatccactgtatttcctcgtatt

SEQ ID NO: 100774 - protein, 198 aa, Arabidopsis thaliana; identical to SEQ ID NO: 26728
  peptide (1)..(198): Ceres Seq. ID no. 13606049

SEQ ID NO: 100775 - protein, 153 aa, Arabidopsis thaliana; identical to SEQ ID NO: 26729
  peptide (1)..(153): Ceres Seq. ID no. 13606050

SEQ ID NO: 100776 - DNA, 1646 bp, Arabidopsis thaliana
  misc_feature (1)..(1646): Ceres Seq. ID no. 13606051
  misc_feature (1)..(1646): Ortholog of  Ceres SEQ ID NO 14314312 as cited in SEQ ID NO 57283
tatattcaatattcctaacgaaaaaatggccaaagcataaataccttatagcgatatttgagtatttaccataaaaccattcgaatactgtcacggttctaaatttctaatattgttcttttgttattaaaggaaagagtgaagggtgttttcgtcatttaacatatccatcgggtcaataacggagattacctatccggtgaccttatcccctcgccggtgagcgaatctcagatccaaaattttgcaaaatcctcagatcgtcttaccttctccgaatcgatcgatttttcatggaggacgacgacgagattcagtcaattccatctccgggagattcttccctttcaccacaagctcctccttctccgccgattttgccaacaaacgacgtgacggtggccgtcgtgaagaaaccacaaccggggctttcttctcaatctccgtccatgaacgctttagcgttagtggttcatactccttctgtaaccggtggtggtggtagcggaaacagaaacggacgaggaggaggaggaggaagcggtggtggtggaggaggaagagatgattgttggagcgaagaagctacaaaggttctaatcgaagcttggggagatcgattctctgaaccaggtaaaggaactttgaagcaacaacattggaaagaagtagctgagattgtgaacaagagtcgtcaatgcaaataccctaaaactgatattcagtgtaagaacagaattgatacggtgaagaagaagtataagcaagagaaagctaagattgcttctggtgatggacctagtaaatgggttttcttcaagaagcttgagagtttgattggtggtactacaacattcattgcttcttcaaaagcttcagagaaggctcctatgggaggagctcttgggaatagccgttcgagtatgtttaaacggcaaactaaaggtaatcagattgtgcagcaacaacaagagaagagaggctctgattcgatgcggtggcattttaggaaacgtagtgcttctgagactgagtctgagtctgatcctgaacctgaggcttctcctgaggaatctgctgagagtctcccacctttgcaaccgattcaaccgctttcgtttcatatgccaaagcggttgaaggtggataagagtggaggtggagggagtggagttggagatgtggcgagggcgatacttggatttacggaagcttatgagaaggcggaaactgctaagcttaagttaatggcggaactggaaaaggagaggatgaaatttgctaaagagatggagttgcagagaatgcagttcttgaaaactcaattggagataacacagaacaatcaagaagaggaagagaggagcaggcagcgaggagaaaggaggatcgttgatgatgatgatgatcgcaatggcaagaataacggcaatgtaagtagctgacaattgaacacacaaatgttcctatgatatttgctatgataagctggattttaggttttgatgttgttgttgttgttattgttactgccttgtgggatgtgtaaatgtagagaagttatgactctgattatcatcatgttgttgttattgttatccatcttcttgtcttaaacatgggcaaattaaaaagctttgaacttg

SEQ ID NO: 100777 - protein, 383 aa, Arabidopsis thaliana; identical to SEQ ID NO: 40903
  peptide (1)..(383): Ceres Seq. ID no. 13606052

SEQ ID NO: 100778 - protein, 331 aa, Arabidopsis thaliana; identical to SEQ ID NO: 40904
  peptide (1)..(331): Ceres Seq. ID no. 13606053

SEQ ID NO: 100779 - DNA, 1427 bp, Arabidopsis thaliana
  misc_feature (1)..(1427): Ceres Seq. ID no. 13606054
  misc_feature (1)..(1427): Ortholog of  Ceres SEQ ID NO 13582301 as cited in SEQ ID NO 56509
gtaataatattcttttaaaaaaatagaaacgttggtcacgaggcctcatcaatgcttttgataccttccttcaccgcaaattctaacgaaccaccaccgtcgaagctttctctttccgatctttcaatggcgattctcaaatctcacttcttcttactcttccctcttcttcttctccactttcacactgtctcctttgctcagacgctctttgtgttcggagatggtctttacgacgccggaaacaaacagtttctctctcagaaccgagttgacgcaagctttcctccttatggagtcactgtaggacaagccaccggacggtggtccgatggttctatcgttcctgattatcttgctaaattcatgggaattcctaaaatctctccgattctcctaaccacggcggatttttctcacggagctaatttcgccatcgccgacgctaccgttcttggctctcctccggagacgatgactttgtcacaacaagtgaagaaattctcggaaaacaagaataagtggacaaatcaaacacgttctgaagctatctacttgatctacattggttctgatgattacttgagctatgctaagagtaatccaagtccatcagatactcagaaacaagcttttgttgatcaagtcatcactaccataaaagcagaaataaaggtggtttacgggtctggcggaaggaaattcgcattccagaacttggcaccgttaggttgcttaccggccgtgaaacaagcaagcggaaatgttcaagaatgtgtgaaattgccttcggaaatggctgctttgcataacaagaaacttttgcagctcttggttgaactatcaagagaactaaatggtttccagtactcgttttacgacttctttagctcgatccaaaacagagttatcaagtctaagacttatacattcgagacaggaaacgctgcttgttgtggaactggctctatcaacgggagtaattgctcagctaaaaatgtatgcgccaagcctgaagagtatatcttctttgatggtaagcatttgacgcaagaagccaaccttcaggtcgggcatttgatgtggggagcagatccggaagtgattggaccgaacaatatcagggagcttatggtccttcctctagacattacagtcatcttagctggtatacaagaagctatggctgccatgagaccgagacagagcaacattgagagtctctatgatatcaagaagatggagtcagagatggataatcattggctttatcaagttgacaaagctatctcctttatgatataagattgtggttacagtttgatttaagcgagagagtttaagagctagtgtaacaaagaactagcaagaaaactgaaacatccatttttcttgtttagtaataaaacaatcaaccttattaagtc

SEQ ID NO: 100780 - protein, 417 aa, Arabidopsis thaliana; identical to SEQ ID NO: 25250
  peptide (1)..(417): Ceres Seq. ID no. 13606055

SEQ ID NO: 100781 - protein, 392 aa, Arabidopsis thaliana; identical to SEQ ID NO: 25251
  peptide (1)..(392): Ceres Seq. ID no. 13606056

SEQ ID NO: 100782 - protein, 312 aa, Arabidopsis thaliana; identical to SEQ ID NO: 25252
  peptide (1)..(312): Ceres Seq. ID no. 13606057

SEQ ID NO: 100783 - DNA, 1635 bp, Arabidopsis thaliana
  misc_feature (1)..(1635): Ceres Seq. ID no. 13606058
  misc_feature (1)..(1635): Ortholog of  Ceres SEQ ID NO 12618197 as cited in SEQ ID NO 64478
gtttacatttactgttgttaaggccgagagatagatagaaaaaaacatctgtgcgattttgccgcctctccctaaaatctttggagctccttcgtagttagccggaggtgaagtacaataaaagaaagaagaaagtccaagtgtctcttctcatctcttttctccagtagataatggaggggagattggctaatatgtggaggttgactgttaacgaaagtaaattcgtggaaactgcgttgcaatctgagctcagagtagatggtcgtggcctttatgattatcgcaagcttactattaagtttggcaaagaatatggtagctcggaagttcaacttggtcagactcatgtaatgggtttcgtgactgctcagttggtacaaccttacaaagacagacctaatgaagggtctctctcgatcttcacggaattttctccaatggctgatccgtcttttgagcctggtcgtcctggcgaatctgcagtggagttgggacgcattatcgatcgtggtctaagagaaagccgtgcagtagatacagagtcactctgcgttctagctggaaagatggtttggtctgttcgcattgaccttcatatcttggacaatggagggaacttagttgatgctgcaaatattgctgctttagcagctctcatgacatttaggagacccgactgcactgtaggaggagagaatggtcaagaagtgatcatacatccactagaggaaagggaaccacttccattgataatacatcatctcccaatagccttcacgtttggattttttaataaaggcaacattgtggtgatggacccaacttatgttgaagaagcagttatgtgtgggagaatgactgtgacagttaatgccaatggcgatatatgcgcaatccaaaaaccgggggaagaaggcgtgaaccagagtgtaatccttcattgcctgcgtcttgcttcttcaagagctgctgcaacaacaaagatcattagagaagaagttgaagcatataactgtgagagaagcttacagaaggtgaagcgacatcccactttggctaaatctgaagtttctggacctactgtagctgtgaaggaggaacataggaagtcctcagatcaggaaagagctgcagagatatctcgagaacatgttgaaagactaaagctctctacggaggaagtaagaagcagtaaggaagaagaagctgccaatttcaaaggcggtccctcaaattgggacccttactcagaagctatggatgttgattcactgaaagtttctcttgcttcaagaggggatcccgttactaagtcatcgagcacgaagaaaatgaacggctctggaaatgcgcagaaggttggtgttgagatttcagttgaggaagtaaccggagaattagggaagaaggatacaaaacacaaggatggagaaatgacacttaaagatgctgtcaaacctaaaaagaagcggaaaaacaaaagctgagttaaagcattttcccgatcactcgtacttttcttcttcccttgaaactcaagactatagacggtttatggtcaattgtatctgaaaaaagtcaaaagttttgttaaattttgtttcataagatgaggcccatgattaaaaaccc

SEQ ID NO: 100784 - protein, 438 aa, Arabidopsis thaliana
  peptide (1)..(438): Ceres Seq. ID no. 13606059
MEGRLANMWRLTVNESKFVETALQSELRVDGRGLYDYRKLTIKFGKEYGSSEVQLGQTHVMGFVTAQLVQPYKDRPNEGSLSIFTEFSPMADPSFEPGRPGESAVELGRIIDRGLRESRAVDTESLCVLAGKMVWSVRIDLHILDNGGNLVDAANIAALAALMTFRRPDCTVGGENGQEVIIHPLEEREPLPLIIHHLPIAFTFGFFNKGNIVVMDPTYVEEAVMCGRMTVTVNANGDICAIQKPGEEGVNQSVILHCLRLASSRAAATTKIIREEVEAYNCERSLQKVKRHPTLAKSEVSGPTVAVKEEHRKSSDQERAAEISREHVERLKLSTEEVRSSKEEEAANFKGGPSNWDPYSEAMDVDSLKVSLASRGDPVTKSSSTKKMNGSGNAQKVGVEISVEEVTGELGKKDTKHKDGEMTLKDAVKPKKKRKNKS

SEQ ID NO: 100785 - protein, 431 aa, Arabidopsis thaliana
  peptide (1)..(431): Ceres Seq. ID no. 13606060
MWRLTVNESKFVETALQSELRVDGRGLYDYRKLTIKFGKEYGSSEVQLGQTHVMGFVTAQLVQPYKDRPNEGSLSIFTEFSPMADPSFEPGRPGESAVELGRIIDRGLRESRAVDTESLCVLAGKMVWSVRIDLHILDNGGNLVDAANIAALAALMTFRRPDCTVGGENGQEVIIHPLEEREPLPLIIHHLPIAFTFGFFNKGNIVVMDPTYVEEAVMCGRMTVTVNANGDICAIQKPGEEGVNQSVILHCLRLASSRAAATTKIIREEVEAYNCERSLQKVKRHPTLAKSEVSGPTVAVKEEHRKSSDQERAAEISREHVERLKLSTEEVRSSKEEEAANFKGGPSNWDPYSEAMDVDSLKVSLASRGDPVTKSSSTKKMNGSGNAQKVGVEISVEEVTGELGKKDTKHKDGEMTLKDAVKPKKKRKNKS

SEQ ID NO: 100786 - protein, 378 aa, Arabidopsis thaliana
  peptide (1)..(378): Ceres Seq. ID no. 13606061
MGFVTAQLVQPYKDRPNEGSLSIFTEFSPMADPSFEPGRPGESAVELGRIIDRGLRESRAVDTESLCVLAGKMVWSVRIDLHILDNGGNLVDAANIAALAALMTFRRPDCTVGGENGQEVIIHPLEEREPLPLIIHHLPIAFTFGFFNKGNIVVMDPTYVEEAVMCGRMTVTVNANGDICAIQKPGEEGVNQSVILHCLRLASSRAAATTKIIREEVEAYNCERSLQKVKRHPTLAKSEVSGPTVAVKEEHRKSSDQERAAEISREHVERLKLSTEEVRSSKEEEAANFKGGPSNWDPYSEAMDVDSLKVSLASRGDPVTKSSSTKKMNGSGNAQKVGVEISVEEVTGELGKKDTKHKDGEMTLKDAVKPKKKRKNKS

SEQ ID NO: 100787 - DNA, 2002 bp, Arabidopsis thaliana
  misc_feature (1)..(2002): Ceres Seq. ID no. 13606070
  misc_feature (1)..(2002): Ortholog of  Ceres SEQ ID NO 12616225 as cited in SEQ ID NO 68930
gtgtgcattcgtttcttccaaatgcatccaaagcaaagcaccattaaaatccttcaaagcaaaaaccttctctcaagtttttttgactgttattaactcttaggttggtcaatcagaatcaagtctttttcgtttcccaattcgatttggattttgttttcttcttcttcttcttcttcttctcgagattgcgtattttgagcgatgcgggaagtggaaacaacggcaatcacagcagctcctccacaattctctcaaatgtttcagaaattagccatggccgtcaagaccaagacctacgagttcttcaccgaagacgataatgagagaaccgatgctgagggtttctctcttctcgattcctccgaggattttatcaccgatcagaaagtcgtcgttcttaaacccgataagcctcttcttagtgcttcttctccgggatctcctattgaatctccggtgaacgatgttcagacgaagaatttgggtgtggtaagtgttgttaaacctaatcaaaagaagctttctcaggttaggaaattggatacacagatgggattgagtttgatttcttctgttttcgctactgcttcgtcttttgaagcttcgtatcttcaattgcaagctgctcacgcgccgtttgttgaggaaaatgtcaaggctgctgatagagctctcgtatctaacctccagaaattgtctgatttgaagcagttttataggaattatcgccaaagtttggattttgagtctgatttagctattgggtcttgcttagaatctcgtgttcaggagaatcagagcaagcttagagctttggaaaccgtctcaaatcgtttacaagctgagatggatgcaaaggatttgcaggtttggagtctgaggaacaaattaggtgagattcagaaatctacttccaagttgtctaagagattgtcttcaaattcatcgttggatgttctgttatcggttagggtttttgagtctctgttgtatgatgcctttaaagctactcagaaattcactaagattctgattgagttgatggaaaaagctgggtgggatttggatttagtggctaagtctgttcatcctgaggtagattatgctaaggagagacataaccggtatgcattgttgtcgtatgtttgcttggggatgtttcgtggttttgatggagaaggatttgatctaaatgagaatgattatgaagagtctgagagaagttctgtagattcttccttgagggaattgatgcaacatgtatcgagtaatccgatggagcttcttgatagagataaagattgtgcattctctagattttgcgataagaagtatcacgagctgattcatccgaacatggcatcttcgatattcagtaacatggatgaaaacgaagctgtgttgagttcttggagatctttgagcacattctatgaatcgtttgtcacgatggctagctcgatttggacccttcacaagttagccttgtcctttgatcctgcagttgagattttccaagttgaaagcggagtggaattttcgattgttttcatggagaatgtcttaaaaagaaaacaagataagaagttttcgatgagtcctactcgagccaaagtaggattcacagtggttcccgggtttaaaatcgggtgcaccgtgattcagtgtcaagtttaccttaccggcggctccaaaatgtaaatgaaagagaccgatggttaagccggcgctcaagtttcttttcacaaagctgcttcaagaacttggcagctcacgaagactatatgagttataacttttttaccttcttccttttctgtgattaattgtgttcctttaagtctgatttgagttcttgatttcgttttaaagtgtacagaaggttctaaagctatggtgatttttttctttgtttgaattgcaatgaattcaattgtttctctttatcgtagtaagatgtaacagattgattatcaaaatatagtcagtttttcacaat

SEQ ID NO: 100788 - protein, 499 aa, Arabidopsis thaliana
  peptide (1)..(499): Ceres Seq. ID no. 13606071
MREVETTAITAAPPQFSQMFQKLAMAVKTKTYEFFTEDDNERTDAEGFSLLDSSEDFITDQKVVVLKPDKPLLSASSPGSPIESPVNDVQTKNLGVVSVVKPNQKKLSQVRKLDTQMGLSLISSVFATASSFEASYLQLQAAHAPFVEENVKAADRALVSNLQKLSDLKQFYRNYRQSLDFESDLAIGSCLESRVQENQSKLRALETVSNRLQAEMDAKDLQVWSLRNKLGEIQKSTSKLSKRLSSNSSLDVLLSVRVFESLLYDAFKATQKFTKILIELMEKAGWDLDLVAKSVHPEVDYAKERHNRYALLSYVCLGMFRGFDGEGFDLNENDYEESERSSVDSSLRELMQHVSSNPMELLDRDKDCAFSRFCDKKYHELIHPNMASSIFSNMDENEAVLSSWRSLSTFYESFVTMASSIWTLHKLALSFDPAVEIFQVESGVEFSIVFMENVLKRKQDKKFSMSPTRAKVGFTVVPGFKIGCTVIQCQVYLTGGSKM

SEQ ID NO: 100789 - protein, 481 aa, Arabidopsis thaliana
  peptide (1)..(481): Ceres Seq. ID no. 13606072
MFQKLAMAVKTKTYEFFTEDDNERTDAEGFSLLDSSEDFITDQKVVVLKPDKPLLSASSPGSPIESPVNDVQTKNLGVVSVVKPNQKKLSQVRKLDTQMGLSLISSVFATASSFEASYLQLQAAHAPFVEENVKAADRALVSNLQKLSDLKQFYRNYRQSLDFESDLAIGSCLESRVQENQSKLRALETVSNRLQAEMDAKDLQVWSLRNKLGEIQKSTSKLSKRLSSNSSLDVLLSVRVFESLLYDAFKATQKFTKILIELMEKAGWDLDLVAKSVHPEVDYAKERHNRYALLSYVCLGMFRGFDGEGFDLNENDYEESERSSVDSSLRELMQHVSSNPMELLDRDKDCAFSRFCDKKYHELIHPNMASSIFSNMDENEAVLSSWRSLSTFYESFVTMASSIWTLHKLALSFDPAVEIFQVESGVEFSIVFMENVLKRKQDKKFSMSPTRAKVGFTVVPGFKIGCTVIQCQVYLTGGSKM

SEQ ID NO: 100790 - protein, 475 aa, Arabidopsis thaliana
  peptide (1)..(475): Ceres Seq. ID no. 13606073
MAVKTKTYEFFTEDDNERTDAEGFSLLDSSEDFITDQKVVVLKPDKPLLSASSPGSPIESPVNDVQTKNLGVVSVVKPNQKKLSQVRKLDTQMGLSLISSVFATASSFEASYLQLQAAHAPFVEENVKAADRALVSNLQKLSDLKQFYRNYRQSLDFESDLAIGSCLESRVQENQSKLRALETVSNRLQAEMDAKDLQVWSLRNKLGEIQKSTSKLSKRLSSNSSLDVLLSVRVFESLLYDAFKATQKFTKILIELMEKAGWDLDLVAKSVHPEVDYAKERHNRYALLSYVCLGMFRGFDGEGFDLNENDYEESERSSVDSSLRELMQHVSSNPMELLDRDKDCAFSRFCDKKYHELIHPNMASSIFSNMDENEAVLSSWRSLSTFYESFVTMASSIWTLHKLALSFDPAVEIFQVESGVEFSIVFMENVLKRKQDKKFSMSPTRAKVGFTVVPGFKIGCTVIQCQVYLTGGSKM

SEQ ID NO: 100791 - DNA, 1468 bp, Arabidopsis thaliana
  misc_feature (1)..(1468): Ceres Seq. ID no. 13606078
  misc_feature (1)..(1468): Ortholog of  Ceres SEQ ID NO 14311721 as cited in SEQ ID NO 51363
atctttacaaaaccgattacttttgtcggaatctgacgtcagcatacctgctaccacttccagagttcaatcgatcttcgcctcgttgaaacgttttccctcttcgattatcaacagtgtctccactcgtatcatcaccgcctccaactaattttgccatctctctcgttgttccaatttgattctactagtgagctccgatttaatttagggttttgaaagatgtcagctttgaaaaattacggcttgatctccattgattctgccctccattttcctcgatcaaatcaattgcagagctataagaggaatgcaaaatgggtctctccaatagcagctgttgtacctaacttccatcttcctatgcgcagtctcgaggataaaaacaggacaaacacagacgacataaggtcccttagagtgatcacagccattaagacaccgtatttacctgatggaagattcgacctccaagcatacgatgacttagtcaacacgcagatagaaaacggtgctgaaggtgtgattgttggtggtacaactggtgaaggccaattgatgagctgggatgagcacataatgcttatcggccatactgtaaattgttttgggggaaggatcaaagtcattggaaacactggaagtaactcgactagggaagctattcatgccactgagcaaggattcgccatgggaatgcacggggcactgcacattaacccttactatggaaaaacatccattgaaggcatgaatgcgcattttcaaaccgttcttcatatgggaccgactattatatacaacgtgccaggtcgaacgtgccaggatatacctccccaggttatctttaaactctctcagaaccctaatatggctggggttaaggaatgcgttggtaataaccgagttgaagagtatactgagaagggaattgtcgtttggagtggaaatgatgatcagtgccatgattctagatgggatcacggtgccactggagtgatatcggttactagcaatttagttccgggtttgatgaggaagttgatgtttgaaggtagaaactcagcgttgaacgcaaagcttcttcctttaatggattggctattccaagaaccgaatcccattggtgtaaacactgctttggctcagttaggagttgcgaggccggtttttcggttaccttatgtgccattgcctctgtccaaaaggattgagttcgttaaactggtgaaggaaatcggaagggagcattttgtaggagacagagatgttcaggtacttgatgatgatgacttcatcttaatcggtcgatattagagtctcttccctgaagattggttgtgtttatactttcttcgttcagttgttagttatttagctgatgagaaactcacagatggatcaagacttctacttgttgtaatgtttggtctgttacttttggtgatgaatctaatggcttttgctt

SEQ ID NO: 100792 - protein, 364 aa, Arabidopsis thaliana
  peptide (1)..(364): Ceres Seq. ID no. 13606079
MSALKNYGLISIDSALHFPRSNQLQSYKRNAKWVSPIAAVVPNFHLPMRSLEDKNRTNTDDIRSLRVITAIKTPYLPDGRFDLQAYDDLVNTQIENGAEGVIVGGTTGEGQLMSWDEHIMLIGHTVNCFGGRIKVIGNTGSNSTREAIHATEQGFAMGMHGALHINPYYGKTSIEGMNAHFQTVLHMGPTIIYNVPGRTCQDIPPQVIFKLSQNPNMAGVKECVGNNRVEEYTEKGIVVWSGNDDQCHDSRWDHGATGVISVTSNLVPGLMRKLMFEGRNSALNAKLLPLMDWLFQEPNPIGVNTALAQLGVARPVFRLPYVPLPLSKRIEFVKLVKEIGREHFVGDRDVQVLDDDDFILIGRY

SEQ ID NO: 100793 - protein, 317 aa, Arabidopsis thaliana; identical to SEQ ID NO: 24236
  peptide (1)..(317): Ceres Seq. ID no. 13606080

SEQ ID NO: 100794 - protein, 252 aa, Arabidopsis thaliana; identical to SEQ ID NO: 24237
  peptide (1)..(252): Ceres Seq. ID no. 13606081

SEQ ID NO: 100795 - DNA, 1784 bp, Arabidopsis thaliana
  misc_feature (1)..(1784): Ceres Seq. ID no. 13606082
  misc_feature (1)..(1784): Ortholog of  Ceres SEQ ID NO 12608463 as cited in SEQ ID NO 60238
gttatcttcatacttttgtgttgcgtttctgttgattctccttttatgtatcctctcggctctctcgttaatcttttattacataaactcgtgcatcaacataaacacaaaacagaagcatgaagatgaataacaacgacggccaacataataaaacggtgacatttcctcgaaaaagcatcgtgaaggctactgttttcatcgtcgttctattcatttcagctgctatcttagacttactgggctatctcgatttcaatgcttttgcaggtttaaagctaacaacaaagacaaaagaaccaaatccttacggatgcgacttcgtacagaaccaatcaagtcaaactcctatctcacaaaaccgcaaatcgagattaaaccccaacaacagttcaaaatcatccacgtgtccttcttatttccgttggatccatgaagatctacggccatggaaacaaacggggataactagagggatgatcgaagaagcgagtagaacggcgcattttagattggtgatccgtaacgggaaggcgtacgttaagagatataagaagtcaatacaaacaagagatgaatttactctgtggggaatcttacagttgttacggtggtaccctggtaaattacctgatctcgagctaatgttcgacgctgatgatcgtcccgtcgtccgatcagttgactttattggtcaacagaaggaaccacctccagttttccgttactgttcagatgacgcaagcttggacattgtcttccctgattggtccttttggggctgggctgaagtgaacgtaaaaccatgggggaaatcgttggaggcaataaaagaagggaacagtatgacgcaatggaaggaccgcgtggcgtacgcttattggagaggtaatccttatgttgatcctggaagaggagatcttctcaagtgtaatgctacagaacatgaagagtggaatactcgtctctatattcaggattgggataaagaaacaaaagaaggattcaagaactcaaatctagagaaccagtgcactcatagatacaagatatatatagaaggatgggcatggtcggttagcgagaaatacataatggcatgtgactcaatgacattatatgtaaaaccaagattctacgatttctacatacgaggaatgatgccattacaacattattggccaatcagagacgattccaagtgtacttctctcaaattcgccgtacattggggcaatacacacgaggacaaggctcgtgagataggagaggtaggaagtagatttataagagaggaggtgaatatgcagtatgtgtatgactatatgtttcatttactcaaagagtatgcaacactcttgaaatttaagccggagattccgttagatgcagaggagatcacgccggatagtatggggtgtcccgcgacggaaaggtggagagattttaaggcggagtcaatgattatatctcctagtgaagagtctccttgtgagatgcttcctccttatgatcctctagctttaaaagaggttcttgagagaaaagctaatttaactcgtcaggttgagttgtgggaaaaccaatactttcaaaatcttaccaacaaaccttaaattgttttgttttttccttcttcgttgacgagatcaaccgcaaccaaatagttcagtcgtgggaggatcaatactctcttgatttgacttataaaccttgattttttttttctatcatcattaaccatttgtcgaatatacttttcaaagtatactttgtttatggcc

SEQ ID NO: 100796 - protein, 498 aa, Arabidopsis thaliana
  peptide (1)..(498): Ceres Seq. ID no. 13606083
MKMNNNDGQHNKTVTFPRKSIVKATVFIVVLFISAAILDLLGYLDFNAFAGLKLTTKTKEPNPYGCDFVQNQSSQTPISQNRKSRLNPNNSSKSSTCPSYFRWIHEDLRPWKQTGITRGMIEEASRTAHFRLVIRNGKAYVKRYKKSIQTRDEFTLWGILQLLRWYPGKLPDLELMFDADDRPVVRSVDFIGQQKEPPPVFRYCSDDASLDIVFPDWSFWGWAEVNVKPWGKSLEAIKEGNSMTQWKDRVAYAYWRGNPYVDPGRGDLLKCNATEHEEWNTRLYIQDWDKETKEGFKNSNLENQCTHRYKIYIEGWAWSVSEKYIMACDSMTLYVKPRFYDFYIRGMMPLQHYWPIRDDSKCTSLKFAVHWGNTHEDKAREIGEVGSRFIREEVNMQYVYDYMFHLLKEYATLLKFKPEIPLDAEEITPDSMGCPATERWRDFKAESMIISPSEESPCEMLPPYDPLALKEVLERKANLTRQVELWENQYFQNLTNKP

SEQ ID NO: 100797 - protein, 496 aa, Arabidopsis thaliana
  peptide (1)..(496): Ceres Seq. ID no. 13606084
MNNNDGQHNKTVTFPRKSIVKATVFIVVLFISAAILDLLGYLDFNAFAGLKLTTKTKEPNPYGCDFVQNQSSQTPISQNRKSRLNPNNSSKSSTCPSYFRWIHEDLRPWKQTGITRGMIEEASRTAHFRLVIRNGKAYVKRYKKSIQTRDEFTLWGILQLLRWYPGKLPDLELMFDADDRPVVRSVDFIGQQKEPPPVFRYCSDDASLDIVFPDWSFWGWAEVNVKPWGKSLEAIKEGNSMTQWKDRVAYAYWRGNPYVDPGRGDLLKCNATEHEEWNTRLYIQDWDKETKEGFKNSNLENQCTHRYKIYIEGWAWSVSEKYIMACDSMTLYVKPRFYDFYIRGMMPLQHYWPIRDDSKCTSLKFAVHWGNTHEDKAREIGEVGSRFIREEVNMQYVYDYMFHLLKEYATLLKFKPEIPLDAEEITPDSMGCPATERWRDFKAESMIISPSEESPCEMLPPYDPLALKEVLERKANLTRQVELWENQYFQNLTNKP

SEQ ID NO: 100798 - protein, 379 aa, Arabidopsis thaliana
  peptide (1)..(379): Ceres Seq. ID no. 13606085
MIEEASRTAHFRLVIRNGKAYVKRYKKSIQTRDEFTLWGILQLLRWYPGKLPDLELMFDADDRPVVRSVDFIGQQKEPPPVFRYCSDDASLDIVFPDWSFWGWAEVNVKPWGKSLEAIKEGNSMTQWKDRVAYAYWRGNPYVDPGRGDLLKCNATEHEEWNTRLYIQDWDKETKEGFKNSNLENQCTHRYKIYIEGWAWSVSEKYIMACDSMTLYVKPRFYDFYIRGMMPLQHYWPIRDDSKCTSLKFAVHWGNTHEDKAREIGEVGSRFIREEVNMQYVYDYMFHLLKEYATLLKFKPEIPLDAEEITPDSMGCPATERWRDFKAESMIISPSEESPCEMLPPYDPLALKEVLERKANLTRQVELWENQYFQNLTNKP

SEQ ID NO: 100799 - DNA, 1278 bp, Arabidopsis thaliana
  misc_feature (1)..(1278): Ceres Seq. ID no. 13606090
  misc_feature (1)..(1278): Ortholog of  Ceres SEQ ID NO 15176016 as cited in SEQ ID NO 56593
gattgtcttcttcttcgccgggaagctcacaaacggaatatactctactgttccttgcgacgtgccctgaaggattttgtagaatcaattcacaatggcgtgtatagtagaggatccacaacgtgcaggtcaatcaaatgagacacaaattgcacttataagcggagttcctgatgatatctcaaaatcctgcttagctagagttccaagagaatatcacatggcaatgaaatgtgtttcaaggagatggagagattttgtgtgcagtgatgaaatgtgcgactatcgaaacgagtttaacttggctgaatcttggatttacgcgttgtgccgcgacatatctggcggtgtcttcttacacatgctgaatccgttctcgtccagaaggtcatggaaaagaatcaatgattatccatatatcccaatgagagaaggcatgggttttgcagtattgggtaagagactgtttgtgttgggtggatgtggttggttagaagatgctactgatgagatttattgctatgatgctgctatgaacacttggtttgacgtagtacctcctctttcaactaaaagatgctactttgcttgtgaaacgctggatggaaaaattattgcaattggtgggttaggattgaatccaaacgctaaacgaacttgggacatctatgatcctttgaccagaacctgcaaatcttgttctgatgtgaatattgtccctgaaatggaagattcatttgtaatggatggaaggatttatattcggggtggtgttggaggatcttccactgcagtctatagtgcatctagcgggatttgggaacgtatggatgatgatatggcatcaggatggcgaggtccagcagttgttgtggcaggtgatctctatgttttggatcagacttttggagctaagctaacaatgtggtgcaaggatacgagaatgtggattcatatcgggaagctatctcaattggtgatgaagcagccttgtcggcttgtatctattgggaatagtatctttgtgattggtaaggattgctctactgtggtaattgatgttgagaatgtgaggaagaataagatgaatggagtaatggtgtgttcttctataccaaagacttgggatgatgatatagatgttattagctgtaaatctgtagccatataatgtctagctctctctacttttctcttggctcaaaattcttcgtccttgtaaacaacatatgctgtttctgttgttcatgtaaattcacaagcttgtctgaatcacac

SEQ ID NO: 100800 - protein, 358 aa, Arabidopsis thaliana
  peptide (1)..(358): Ceres Seq. ID no. 13606091
MACIVEDPQRAGQSNETQIALISGVPDDISKSCLARVPREYHMAMKCVSRRWRDFVCSDEMCDYRNEFNLAESWIYALCRDISGGVFLHMLNPFSSRRSWKRINDYPYIPMREGMGFAVLGKRLFVLGGCGWLEDATDEIYCYDAAMNTWFDVVPPLSTKRCYFACETLDGKIIAIGGLGLNPNAKRTWDIYDPLTRTCKSCSDVNIVPEMEDSFVMDGRIYIRGGVGGSSTAVYSASSGIWERMDDDMASGWRGPAVVVAGDLYVLDQTFGAKLTMWCKDTRMWIHIGKLSQLVMKQPCRLVSIGNSIFVIGKDCSTVVIDVENVRKNKMNGVMVCSSIPKTWDDDIDVISCKSVAI

SEQ ID NO: 100801 - protein, 316 aa, Arabidopsis thaliana
  peptide (1)..(316): Ceres Seq. ID no. 13606092
MAMKCVSRRWRDFVCSDEMCDYRNEFNLAESWIYALCRDISGGVFLHMLNPFSSRRSWKRINDYPYIPMREGMGFAVLGKRLFVLGGCGWLEDATDEIYCYDAAMNTWFDVVPPLSTKRCYFACETLDGKIIAIGGLGLNPNAKRTWDIYDPLTRTCKSCSDVNIVPEMEDSFVMDGRIYIRGGVGGSSTAVYSASSGIWERMDDDMASGWRGPAVVVAGDLYVLDQTFGAKLTMWCKDTRMWIHIGKLSQLVMKQPCRLVSIGNSIFVIGKDCSTVVIDVENVRKNKMNGVMVCSSIPKTWDDDIDVISCKSVAI

SEQ ID NO: 100802 - protein, 314 aa, Arabidopsis thaliana
  peptide (1)..(314): Ceres Seq. ID no. 13606093
MKCVSRRWRDFVCSDEMCDYRNEFNLAESWIYALCRDISGGVFLHMLNPFSSRRSWKRINDYPYIPMREGMGFAVLGKRLFVLGGCGWLEDATDEIYCYDAAMNTWFDVVPPLSTKRCYFACETLDGKIIAIGGLGLNPNAKRTWDIYDPLTRTCKSCSDVNIVPEMEDSFVMDGRIYIRGGVGGSSTAVYSASSGIWERMDDDMASGWRGPAVVVAGDLYVLDQTFGAKLTMWCKDTRMWIHIGKLSQLVMKQPCRLVSIGNSIFVIGKDCSTVVIDVENVRKNKMNGVMVCSSIPKTWDDDIDVISCKSVAI

SEQ ID NO: 100803 - DNA, 2870 bp, Arabidopsis thaliana
  misc_feature (1)..(2870): Ceres Seq. ID no. 13606098
  misc_feature (1)..(2870): Ortholog of  Ceres SEQ ID NO 14306410 as cited in SEQ ID NO 53870
aaaaaaaaaaattctctcttgtcttcctcttaagatgaaagaatcataaaaggaacccaaagaaaagcaaaaacataaccatggctgctccaagatcaagaagatgctctctttctctcttaactcttttctccatcactcttattcttatttctgtttcactctttgtctccacaaaaccagctaataagcctttcctcgattacagaaaccagttttctatttccatctctatctcttctcctcttgaacaaaacacaacaaacactagttttgtctcagcctctcctcctttgtcccctcttggtcagagcaacacaacaaacactattcttgcttcttcttcttcttcttcctctttttctgatcaccaaaaccaaaataagtctccaagtcctacaagtaaaaaaattgttatcaggaaaagaagtgggttagacaaaatagaatcagatttagcaaaagcaagagcagcaattaagaaggcagcttctacacaaaattatgtcagctctctctataaaaatccagccgcctttcatcagttgagttttgcaattcttcttcttcttctttttttaaccatttgaggtaaaaaaaaagatttcttcttttattaaacagtaatttaatactagtacagtatttgacagttcctagatttttagtcaaatatgatagcgctgacaatttttcacatggattttgctgttttttcaaactatttgacatcgatttcatcaaagaattcagcatttaattacggttacaataaagacaaattaaacaaatacgcaacgtacacatagagttttaacggctcctgtgagatgcctctttctaagcaaaagtttactcttctttttgtttgtttattttcatatccgagattttgcagtacataatattggaattgagcttttgaggtttcaattgaactaaaaagaagttttaatgtattcaactacttttctactaaaagagtttgtttattctcatggcttcttttttataacataattagtttaaaagctaagattaaaaaaggttttaatcattaactatgtgttggaaaacaaaattaaagaaagcttttgaactttttgctaatcatatttaatttatttttttaatcaaaattatcaaattaggattttttttaatagtccttcttctcctttttaattgattttttagaaaacaaaacacacagattaagaaaacatattaaaactgattataaatgtattaatttttaggatttacattttactataattttaaattaatgatatttaattatttgttttgaagtttaaaatttatcaataaataactaataaatagtaaatagtaaatctaaaaaatcaattgtttgaaacaaattgttttctaaaaaattaattaataaggaacagagagaatatacaaataaaatattgagatgtttcttttttgtttaaagtattgagatgtttgttcattagaatagaagactattcgattctttcaaaacaagtaaacaagtaggagatagaatgaatatttaaactccaatacgaacgtggcgtagctcacctcagtgatattattacttgctttgtaataaataaaacattgatgtcatactcgtgtatgcacaaaatatcaggagtcacacggagatgatgaatcgttttaaggtgtggacatacacagagggagaggtcccattgttccatgacggccctgtgaatgacatttacggcatagaaggacaattcatggacgaaatgtgcgtggacggaccgaagagtagaagccgttttcgggcagatcgacccgagaatgctcatgttttcttcataccatttagcgtcgccaaggtcatccacttcgtctacaagcccatcacctctgtcgaagggttttcgcgggctcgcctacaccgccttatagaggattatgttgatgtagttgctactaagcatccatattggaaccgaagccaaggaggcgaccatttcatggtatcatgccatgactgggcaccagacgtgattgatgggaatccaaagttgtttgaaaaattcattaggggactttgcaatgctaacacctcggaaggtttccgacctaacgtggacgtatccattccggagatctaccttcctaaaggtaaattgggtccgtcttttctcgggaaatcaccgcgagttcgatctatactcgcatttttcgctggaagaagtcacggtgaaatccgaaaaatcttatttcaacattggaaagaaatggacaatgaagtccaagtctatgatcgtcttccgccaggaaaagactatacaaaaactatgggaatgagtaagttttgtctgtgtccgagtggttgggaggtcgctagcccgagggaggtcgaggcgatatatgctggttgtgtaccagtgatcatatcggataattattcattaccattcagtgatgtgctgaattgggattccttctccatacaaatccctgtttctaggataaaagagatcaaaaccattctacaaagtgtctctctcgtaagatacttgaagatgtataagagagttttagaagtgaagcagcatttcgtgttgaatcgtccagctaaaccctacgatgtgatgcatatgatgcttcattcgatctggttaagacgacttaatcttaggcttggtacatagtatacaattttttgttatgttgcaaataaatattaagtgtctaagttcatatgagttactagctttgtattctttccataaatttgcatagttctctcttgtaaaaaaatatacaacaacaaacacaatatcaaagatttccttattaataagagaaacaaagcatttgttatttttgtt

SEQ ID NO: 100804 - protein, 341 aa, Arabidopsis thaliana
  peptide (1)..(341): Ceres Seq. ID no. 13606099
MMNRFKVWTYTEGEVPLFHDGPVNDIYGIEGQFMDEMCVDGPKSRSRFRADRPENAHVFFIPFSVAKVIHFVYKPITSVEGFSRARLHRLIEDYVDVVATKHPYWNRSQGGDHFMVSCHDWAPDVIDGNPKLFEKFIRGLCNANTSEGFRPNVDVSIPEIYLPKGKLGPSFLGKSPRVRSILAFFAGRSHGEIRKILFQHWKEMDNEVQVYDRLPPGKDYTKTMGMSKFCLCPSGWEVASPREVEAIYAGCVPVIISDNYSLPFSDVLNWDSFSIQIPVSRIKEIKTILQSVSLVRYLKMYKRVLEVKQHFVLNRPAKPYDVMHMMLHSIWLRRLNLRLGT

SEQ ID NO: 100805 - protein, 340 aa, Arabidopsis thaliana
  peptide (1)..(340): Ceres Seq. ID no. 13606100
MNRFKVWTYTEGEVPLFHDGPVNDIYGIEGQFMDEMCVDGPKSRSRFRADRPENAHVFFIPFSVAKVIHFVYKPITSVEGFSRARLHRLIEDYVDVVATKHPYWNRSQGGDHFMVSCHDWAPDVIDGNPKLFEKFIRGLCNANTSEGFRPNVDVSIPEIYLPKGKLGPSFLGKSPRVRSILAFFAGRSHGEIRKILFQHWKEMDNEVQVYDRLPPGKDYTKTMGMSKFCLCPSGWEVASPREVEAIYAGCVPVIISDNYSLPFSDVLNWDSFSIQIPVSRIKEIKTILQSVSLVRYLKMYKRVLEVKQHFVLNRPAKPYDVMHMMLHSIWLRRLNLRLGT

SEQ ID NO: 100806 - protein, 308 aa, Arabidopsis thaliana
  peptide (1)..(308): Ceres Seq. ID no. 13606101
MDEMCVDGPKSRSRFRADRPENAHVFFIPFSVAKVIHFVYKPITSVEGFSRARLHRLIEDYVDVVATKHPYWNRSQGGDHFMVSCHDWAPDVIDGNPKLFEKFIRGLCNANTSEGFRPNVDVSIPEIYLPKGKLGPSFLGKSPRVRSILAFFAGRSHGEIRKILFQHWKEMDNEVQVYDRLPPGKDYTKTMGMSKFCLCPSGWEVASPREVEAIYAGCVPVIISDNYSLPFSDVLNWDSFSIQIPVSRIKEIKTILQSVSLVRYLKMYKRVLEVKQHFVLNRPAKPYDVMHMMLHSIWLRRLNLRLGT

SEQ ID NO: 100807 - DNA, 1373 bp, Arabidopsis thaliana
  misc_feature (1)..(1373): Ceres Seq. ID no. 13606112
  misc_feature (1)..(1373): Ortholog of  Ceres SEQ ID NO 14311477 as cited in SEQ ID NO 51390
  misc_feature (1)..(1373): Ortholog of  Ceres SEQ ID NO 14302840 as cited in SEQ ID NO 62295
  misc_feature (1)..(1373): Ortholog of  Ceres SEQ ID NO 13596892 as cited in SEQ ID NO 62900
atagcctcactaaacatctcttgttattttcgaaagtgaagagaaaaatggtggatctattgaactcggtgatgaacctggtggcgcctccagcgaccatggtggtgatggcctttgcatggccattactgtctttcattagcttctccgaacgggcttacaactcttatttcgccaccgaaaatatggaagataaagtagttgtcatcaccggagcttcatcggccattggagagcaaatagcatatgaatatgcaaaaagaggagcgaatttggtgttggtggcgaggagagagcagagactgagagttgtgagtaataaggctaaacagattggagccaaccatgtgatcatcatcgctgctgatgtcatcaaagaagatgactgccgccgttttatcacccaagccgtcaactattacggccgcgtggatcatctagtgaatacagcgagtcttggacacactttttactttgaggaagtgagtgacacgactgtgtttccacatttgctggacataaacttctgggggaatgtttatccgacatacgtagcgttgccataccttcaccagacgaatggccgaatagtcgtgaatgcatcggttgaaaactggttgcctctaccacggatgagtctttattctgctgcaaaagcagcattagtcaacttctatgagacgctgcgtttcgagctaaatggagacgttggtataactatcgcgactcacgggtggattggcagtgagatgagtggaggaaagttcatgctagaagaaggtgctgagatgcaatggaaggaagagagagaagtacctgcaaatggtggaccgctagaggaatttgcaaagatgattgtggcaggagcttgtaggggagatgcatatgtgaagtttccaaactggtacgatgtctttctcctctatcgagtcttcacaccgaatgtactgagatggacattcaagttgttactgtctactgagggtacacgtagaagctcccttgttggggtcgggtcaggtatgcctgtggatgaatcctcttcacaaatgaaacttatgcttgaaggaggaccacctcgagttcctgcaagcccacctaggtataccgcaagcccacctcattataccgcaagcccaccacggtatcctgcaagcccacctcggtatcctgcgagcccacctcggttttcacagtttaatatccaagagttgtaataaaaactggatggaggaacaagaggtgaggtcggtttggtgtgtagagtgtagagtgaacttgagctttagaactttctctgaccaagtgaaccacaaaaaaagaaaagcaatgtaaaggacatcgagtcaagaataataccggatgatacagcc

SEQ ID NO: 100808 - protein, 404 aa, Arabidopsis thaliana
  peptide (1)..(404): Ceres Seq. ID no. 13606113
SLTKHLLLFSKVKRKMVDLLNSVMNLVAPPATMVVMAFAWPLLSFISFSERAYNSYFATENMEDKVVVITGASSAIGEQIAYEYAKRGANLVLVARREQRLRVVSNKAKQIGANHVIIIAADVIKEDDCRRFITQAVNYYGRVDHLVNTASLGHTFYFEEVSDTTVFPHLLDINFWGNVYPTYVALPYLHQTNGRIVVNASVENWLPLPRMSLYSAAKAALVNFYETLRFELNGDVGITIATHGWIGSEMSGGKFMLEEGAEMQWKEEREVPANGGPLEEFAKMIVAGACRGDAYVKFPNWYDVFLLYRVFTPNVLRWTFKLLLSTEGTRRSSLVGVGSGMPVDESSSQMKLMLEGGPPRVPASPPRYTASPPHYTASPPRYPASPPRYPASPPRFSQFNIQEL

SEQ ID NO: 100809 - protein, 389 aa, Arabidopsis thaliana
  peptide (1)..(389): Ceres Seq. ID no. 13606114
MVDLLNSVMNLVAPPATMVVMAFAWPLLSFISFSERAYNSYFATENMEDKVVVITGASSAIGEQIAYEYAKRGANLVLVARREQRLRVVSNKAKQIGANHVIIIAADVIKEDDCRRFITQAVNYYGRVDHLVNTASLGHTFYFEEVSDTTVFPHLLDINFWGNVYPTYVALPYLHQTNGRIVVNASVENWLPLPRMSLYSAAKAALVNFYETLRFELNGDVGITIATHGWIGSEMSGGKFMLEEGAEMQWKEEREVPANGGPLEEFAKMIVAGACRGDAYVKFPNWYDVFLLYRVFTPNVLRWTFKLLLSTEGTRRSSLVGVGSGMPVDESSSQMKLMLEGGPPRVPASPPRYTASPPHYTASPPRYPASPPRYPASPPRFSQFNIQEL

SEQ ID NO: 100810 - protein, 381 aa, Arabidopsis thaliana
  peptide (1)..(381): Ceres Seq. ID no. 13606115
MNLVAPPATMVVMAFAWPLLSFISFSERAYNSYFATENMEDKVVVITGASSAIGEQIAYEYAKRGANLVLVARREQRLRVVSNKAKQIGANHVIIIAADVIKEDDCRRFITQAVNYYGRVDHLVNTASLGHTFYFEEVSDTTVFPHLLDINFWGNVYPTYVALPYLHQTNGRIVVNASVENWLPLPRMSLYSAAKAALVNFYETLRFELNGDVGITIATHGWIGSEMSGGKFMLEEGAEMQWKEEREVPANGGPLEEFAKMIVAGACRGDAYVKFPNWYDVFLLYRVFTPNVLRWTFKLLLSTEGTRRSSLVGVGSGMPVDESSSQMKLMLEGGPPRVPASPPRYTASPPHYTASPPRYPASPPRYPASPPRFSQFNIQEL

SEQ ID NO: 100811 - DNA, 1259 bp, Arabidopsis thaliana
  misc_feature (1)..(1259): Ceres Seq. ID no. 13606118
  misc_feature (1)..(1259): Ortholog of  Ceres SEQ ID NO 12636774 as cited in SEQ ID NO 372
  misc_feature (1)..(1259): Ortholog of  Ceres SEQ ID NO 15174842 as cited in SEQ ID NO 53054
  misc_feature (1)..(1259): Ortholog of  Ceres SEQ ID NO 13582350 as cited in SEQ ID NO 56734
  misc_feature (1)..(1259): Ortholog of  Ceres SEQ ID NO 12476493 as cited in SEQ ID NO 58163
  misc_feature (1)..(1259): Ortholog of  Ceres SEQ ID NO 13596470 as cited in SEQ ID NO 62158
  misc_feature (1)..(1259): Ortholog of  Ceres SEQ ID NO 12578315 as cited in SEQ ID NO 62451
  misc_feature (1)..(1259): Ortholog of  Ceres SEQ ID NO 12615466 as cited in SEQ ID NO 62761
  misc_feature (1)..(1259): Ortholog of  Ceres SEQ ID NO 12615907 as cited in SEQ ID NO 62860
  misc_feature (1)..(1259): Ortholog of  Ceres SEQ ID NO 13597295 as cited in SEQ ID NO 63743
  misc_feature (1)..(1259): Ortholog of  Ceres SEQ ID NO 12617090 as cited in SEQ ID NO 64005
  misc_feature (1)..(1259): Ortholog of  Ceres SEQ ID NO 13597439 as cited in SEQ ID NO 64081
  misc_feature (1)..(1259): Ortholog of  Ceres SEQ ID NO 13597233 as cited in SEQ ID NO 64370
attatcgctctcacttcagattttaaaccaatcatggcagcatcaaaactcctcgtatccgacatcgcctctgtcgttgatcacgtcccttcaaactacgtcagaccagtctctgaccgtccaaaaatgtccgaggttcaaacttccggcgactctattcctctaatcgatctccacgacctccatggacctaatcgagctgacattatcaatcagtttgctcatgcatgctcttcttgtggcttcttccagatcaagaaccatggagtaccagaagaaacgatcaaaaaaatgatgaatgcggcaagagagtttttccggcaatcagagagcgaaagagtgaagcattactcagcagataccaaaaagacaacgagactctccacaagtttcaacgtttccaaagagaaagtctctaactggagagacttccttcgactccattgctaccctatcgaagatttcatcaatgaatggccctcaacaccgatctctttcagagaagtcacagccgaatacgctacaagcgttagagccttggttctgacacttcttgaggcaatctcagagagcttaggtcttgcgaaagaccgtgtaagcaatacaataggcaaacatggtcaacacatggctattaactactatccccggtgtcctcaaccagagctaacttacggacttccggggcataaagatgcaaacttgatcactgttcttcttcaagatgaagtctctggtttacaggtgtttaaagatggtaaatggatcgctgttaatcctgttcccaacactttcatagtcaaccttggtgaccaaatgcaggttataagcaatgaaaaatacaagagtgttcttcacagagcggttgtgaacagcgacatggagcggatatcgataccgacattctactgtccttctgaagatgctgtgattagtccagcacaagagctgatcaatgaggaagaagactctcctgctatttacagaaactttacatatgctgaatattttgaaaagttttgggacacagcatttgatactgagagctgtattgactcgttcaaagcatccaccgcctaagatagtgtactatcgaatcaatcatccgtcatgactaggccggtccttagttcttgattggaactcaaatacccatttgtgttgccatttcaagatcagtatagttttctttaatgaacaaatctgcctgagaagtaaaacaaactgttcttgcaacattttgaaatcattatgttttt

SEQ ID NO: 100812 - protein, 359 aa, Arabidopsis thaliana
  peptide (1)..(359): Ceres Seq. ID no. 13606119
IIALTSDFKPIMAASKLLVSDIASVVDHVPSNYVRPVSDRPKMSEVQTSGDSIPLIDLHDLHGPNRADIINQFAHACSSCGFFQIKNHGVPEETIKKMMNAAREFFRQSESERVKHYSADTKKTTRLSTSFNVSKEKVSNWRDFLRLHCYPIEDFINEWPSTPISFREVTAEYATSVRALVLTLLEAISESLGLAKDRVSNTIGKHGQHMAINYYPRCPQPELTYGLPGHKDANLITVLLQDEVSGLQVFKDGKWIAVNPVPNTFIVNLGDQMQVISNEKYKSVLHRAVVNSDMERISIPTFYCPSEDAVISPAQELINEEEDSPAIYRNFTYAEYFEKFWDTAFDTESCIDSFKASTA

SEQ ID NO: 100813 - protein, 348 aa, Arabidopsis thaliana
  peptide (1)..(348): Ceres Seq. ID no. 13606120
MAASKLLVSDIASVVDHVPSNYVRPVSDRPKMSEVQTSGDSIPLIDLHDLHGPNRADIINQFAHACSSCGFFQIKNHGVPEETIKKMMNAAREFFRQSESERVKHYSADTKKTTRLSTSFNVSKEKVSNWRDFLRLHCYPIEDFINEWPSTPISFREVTAEYATSVRALVLTLLEAISESLGLAKDRVSNTIGKHGQHMAINYYPRCPQPELTYGLPGHKDANLITVLLQDEVSGLQVFKDGKWIAVNPVPNTFIVNLGDQMQVISNEKYKSVLHRAVVNSDMERISIPTFYCPSEDAVISPAQELINEEEDSPAIYRNFTYAEYFEKFWDTAFDTESCIDSFKASTA

SEQ ID NO: 100814 - protein, 317 aa, Arabidopsis thaliana
  peptide (1)..(317): Ceres Seq. ID no. 13606121
MSEVQTSGDSIPLIDLHDLHGPNRADIINQFAHACSSCGFFQIKNHGVPEETIKKMMNAAREFFRQSESERVKHYSADTKKTTRLSTSFNVSKEKVSNWRDFLRLHCYPIEDFINEWPSTPISFREVTAEYATSVRALVLTLLEAISESLGLAKDRVSNTIGKHGQHMAINYYPRCPQPELTYGLPGHKDANLITVLLQDEVSGLQVFKDGKWIAVNPVPNTFIVNLGDQMQVISNEKYKSVLHRAVVNSDMERISIPTFYCPSEDAVISPAQELINEEEDSPAIYRNFTYAEYFEKFWDTAFDTESCIDSFKASTA

SEQ ID NO: 100815 - DNA, 1355 bp, Arabidopsis thaliana
  misc_feature (1)..(1355): Ceres Seq. ID no. 13606133
  misc_feature (1)..(1355): Ortholog of  Ceres SEQ ID NO 13596039 as cited in SEQ ID NO 62117
acaattcagatttcaatttctcaaaatcttaaaaactttctctcaattctctctaccgtgatcaagatgcagatctttgttaagactctcaccggaaagacaatcaccctcgaggtggaaagctccgacaccatcgacaacgttaaggccaagatccaggataaggagggcattcctccggatcagcagaggcttattttcgccggcaagcagctagaggatggccgtacgttggctgattacaatatccagaaggaatccaccctccacttggtcctcaggctccgtggtggtatgcagattttcgttaaaaccctaacgggaaagacgattactcttgaggtggagagttctgacaccatcgacaacgtcaaggccaagatccaagacaaagagggtattcctccggaccagcagaggctgatcttcgccggaaagcagttggaggatggcagaactcttgctgactacaatatccagaaggagtccacccttcatcttgttctcaggctccgtggtggtatgcagattttcgttaagacgttgactgggaaaactatcactttggaggtggagagttctgacaccattgataacgtgaaagccaagatccaggacaaagagggtatcccaccggaccagcagagattgatcttcgccggaaagcaacttgaagatggaagaactttggctgactacaacattcagaaggagtccacacttcacttggtcttgcgtctgcgtggaggtatgcagatcttcgtgaagactctcaccggaaagactatcactttggaggtagagagctctgacaccattgacaacgtgaaggccaagatccaggataaggaaggaatccctccggaccagcagaggttgatctttgccggaaaacaattggaggatggtcgtactttggcggattacaacatccagaaggagtcgacccttcacttggtgttgcgtctgcgtggaggtatgcagatcttcgtcaagactttgaccggaaagaccatcacccttgaagtggaaagctccgacaccattgacaacgtcaaggccaagatccaggacaaggaggtattcctccggaccagcagcgtctcatcttcgctggaaagcagcttgaggatggacgtactttggccgactacaacatccagaaggagtctactcttcacttggtcctgcgtcttcgtggtggtttctaaatctcgtctctgttatgcttaagaagttcaatgtttcgtttcatgtaaaactttggtggtttgtgttttggggccttgtataatccctgatgaataagtgttctactatgtttccgttcctgttatctctttctttctaatgac

SEQ ID NO: 100816 - protein, 410 aa, Arabidopsis thaliana
  peptide (1)..(410): Ceres Seq. ID no. 13606134
TIQISISQNLKNFLSILSTVIKMQIFVKTLTGKTITLEVESSDTIDNVKAKIQDKEGIPPDQQRLIFAGKQLEDGRTLADYNIQKESTLHLVLRLRGGMQIFVKTLTGKTITLEVESSDTIDNVKAKIQDKEGIPPDQQRLIFAGKQLEDGRTLADYNIQKESTLHLVLRLRGGMQIFVKTLTGKTITLEVESSDTIDNVKAKIQDKEGIPPDQQRLIFAGKQLEDGRTLADYNIQKESTLHLVLRLRGGMQIFVKTLTGKTITLEVESSDTIDNVKAKIQDKEGIPPDQQRLIFAGKQLEDGRTLADYNIQKESTLHLVLRLRGGMQIFVKTLTGKTITLEVESSDTIDNVKAKIQDKEVFLRTSSVSSSLESSLRMDVLWPTTTSRRSLLFTWSCVFVVVSKSRLCYA

SEQ ID NO: 100817 - protein, 388 aa, Arabidopsis thaliana
  peptide (1)..(388): Ceres Seq. ID no. 13606135
MQIFVKTLTGKTITLEVESSDTIDNVKAKIQDKEGIPPDQQRLIFAGKQLEDGRTLADYNIQKESTLHLVLRLRGGMQIFVKTLTGKTITLEVESSDTIDNVKAKIQDKEGIPPDQQRLIFAGKQLEDGRTLADYNIQKESTLHLVLRLRGGMQIFVKTLTGKTITLEVESSDTIDNVKAKIQDKEGIPPDQQRLIFAGKQLEDGRTLADYNIQKESTLHLVLRLRGGMQIFVKTLTGKTITLEVESSDTIDNVKAKIQDKEGIPPDQQRLIFAGKQLEDGRTLADYNIQKESTLHLVLRLRGGMQIFVKTLTGKTITLEVESSDTIDNVKAKIQDKEVFLRTSSVSSSLESSLRMDVLWPTTTSRRSLLFTWSCVFVVVSKSRLCYA

SEQ ID NO: 100818 - protein, 312 aa, Arabidopsis thaliana
  peptide (1)..(312): Ceres Seq. ID no. 13606136
MQIFVKTLTGKTITLEVESSDTIDNVKAKIQDKEGIPPDQQRLIFAGKQLEDGRTLADYNIQKESTLHLVLRLRGGMQIFVKTLTGKTITLEVESSDTIDNVKAKIQDKEGIPPDQQRLIFAGKQLEDGRTLADYNIQKESTLHLVLRLRGGMQIFVKTLTGKTITLEVESSDTIDNVKAKIQDKEGIPPDQQRLIFAGKQLEDGRTLADYNIQKESTLHLVLRLRGGMQIFVKTLTGKTITLEVESSDTIDNVKAKIQDKEVFLRTSSVSSSLESSLRMDVLWPTTTSRRSLLFTWSCVFVVVSKSRLCYA

SEQ ID NO: 100819 - DNA, 3027 bp, Arabidopsis thaliana
  misc_feature (1)..(3027): Ceres Seq. ID no. 13606137
  misc_feature (1)..(3027): Ortholog of  Ceres SEQ ID NO 12586556 as cited in SEQ ID NO 64667
  misc_feature (1)..(3027): Ortholog of  Ceres SEQ ID NO 13660894 as cited in SEQ ID NO 67475
atggcttctgttttgcttccattgccacaagtatttgttttgtttgattatcgcaggagccgtaaagagtcaagctttccccgcgccgtctacaattccaattccatttcttctaattcaaccaatgccaatcatttccttcgccggatttctaacttctgtgaaaccggagacctcgacaagtcctttcgaactgtccaagaattcgttggcgatgacgagagctcgtccgatgcgtttcttcttgtccgagaagctcttgggcttctcttacaagcttctgggaagagaaaagacattgaaatgggaagaaagatccaccagctggtttctgggtcgacccggttaaggaatgatgacgttctctgtactcgtattatcaccatgtacgctatgtgtggctctcctgatgattctcggtttgtgtttgatgccttgcggagtaagaatctcttccagtggaatgctgttatcagctcttactcaagaaacgagctttacgatgaagtattagagacgtttatcgagatgatctcaacgactgatcttttaccggatcatttcacttatccatgtgtgattaaggcttgtgctgggatgtctgatgttgggatcgggcttgcggttcatgggttggtggtgaagaccggattggtggaagatgtttttgtgggtaatgcattggtgtctttctatggaactcatggttttgttactgatgccttgcaactgttcgatataatgcctgagagaaatttggtttcctggaactccatgattcgagtgttctcggataatggtttctcagaagaaagcttcttgcttcttggagaaatgatggaggaaaatggtgatggtgcgtttatgccggatgttgctacacttgttactgtgttgccggtttgtgcaagagaaagagaaatagggttgggaaaaggtgttcatgggtgggcggtgaaattgaggttggacaaggaactagtccttaacaatgccttaatggacatgtactccaaatgcggttgcattactaatgcacaaatgatctttaagatgaacaataacaagaatgtggtttcttggaacacaatggtaggaggtttttcagcagagggtgatacacatgggacgtttgatgttctgagacagatgctggcaggaggcgaagatgtcaaagcggacgaggtaaccattctaaatgcagtgcctgtttgtttccatgaatcattcttaccgagtttaaaggaacttcattgttactccttaaaacaagagtttgtatacaatgagttagtagccaatgcctttgtggcttcttatgcaaagtgtggctcactgagttatgcccagcgtgtgtttcatggtataaggagtaaaacagtgaactcttggaatgctttgattggcggccatgctcagagcaatgatccgagattgtccttggatgctcatttgcagatgaaaatttctggattgctacctgatagttttactgtctgtagtcttctttcagcttgttctaaactaaaatccctgcggttgggaaaggaagtgcatgggtttataatccgaaattggttagaaagagatttgtttgtttatttatcagtactctcattatacattcattgtggggagctatgcactgtacaagcattatttgatgcaatggaagataaaagcttagtatcttggaatactgtaatcaccggttaccttcagaatggatttcctgatagagctttgggcgtctttagacaaatggttttgtatggaatccagctttgtgggatttctatgatgcctgtgtttggtgcgtgttcgctgctaccttctcttcgactggggagagaagcgcatgcttatgctttgaagcacctcctggaggacgatgcgtttattgcatgttctttaattgatatgtatgccaagaatggttctataacacaatcatctaaggttttcaatggcttgaaggagaaaagcacggcatcttggaatgccatgataatgggatatggaatacatggcctagcaaaagaggctataaaactctttgaagagatgcaaagaacaggtcataaccctgatgacctaactttcttaggtgttctaacggcttgcaaccatagtggtctgatccatgaagggctgagatatctggatcaaatgaagtcttcttttgggctaaagccaaatttaaagcattatgcttgtgtcattgacatgttaggccgagctgggcaactagacaaggctctaagggttgttgcagaagagatgtctgaggaagctgacgttggaatttggaagtctctgctcagctcatgcagaatccatcaaaatctggaaatgggagagaaagttgctgctaagttattcgaattagaaccagaaaagcctgagaattatgttctgctttccaacttatatgcaggattggggaaatgggaagacgtgagaaaagtgagacagagaatgaacgagatgagtttacgaaaggatgctggatgctcttggatcgaactaaacaggaaggtatttagctttgttgtcggtgaaagattcttagatggttttgaggaaatcaaaagtctttggagtatattggagatgaagatatcgaagatgggatacagaccagacacaatgtcagtacaacatgatctaagtgaagaggagaagattgaacagttaaggggacacagcgagaagcttgcccttacctacgggttgattaaaacttcagaaggaacaactattagagtttacaagaacctaaggatctgtgtggactgtcacaatgcagcaaagttgatctccaaggtcatggaaagggaaatagttgtgagggacaacaaaaggtttcatcatttcaagaatggggtttgttcttgtggagattactggtaagtaggactgtaataaaattggtgaaaacagatgcattagtaatagtagctcttagtaaattcagtattgtgtgtatttatgttcaggcgagacaaacatcaatgttaatatgtt

SEQ ID NO: 100820 - protein, 970 aa, Arabidopsis thaliana
  peptide (1)..(970): Ceres Seq. ID no. 13606138
MASVLLPLPQVFVLFDYRRSRKESSFPRAVYNSNSISSNSTNANHFLRRISNFCETGDLDKSFRTVQEFVGDDESSSDAFLLVREALGLLLQASGKRKDIEMGRKIHQLVSGSTRLRNDDVLCTRIITMYAMCGSPDDSRFVFDALRSKNLFQWNAVISSYSRNELYDEVLETFIEMISTTDLLPDHFTYPCVIKACAGMSDVGIGLAVHGLVVKTGLVEDVFVGNALVSFYGTHGFVTDALQLFDIMPERNLVSWNSMIRVFSDNGFSEESFLLLGEMMEENGDGAFMPDVATLVTVLPVCAREREIGLGKGVHGWAVKLRLDKELVLNNALMDMYSKCGCITNAQMIFKMNNNKNVVSWNTMVGGFSAEGDTHGTFDVLRQMLAGGEDVKADEVTILNAVPVCFHESFLPSLKELHCYSLKQEFVYNELVANAFVASYAKCGSLSYAQRVFHGIRSKTVNSWNALIGGHAQSNDPRLSLDAHLQMKISGLLPDSFTVCSLLSACSKLKSLRLGKEVHGFIIRNWLERDLFVYLSVLSLYIHCGELCTVQALFDAMEDKSLVSWNTVITGYLQNGFPDRALGVFRQMVLYGIQLCGISMMPVFGACSLLPSLRLGREAHAYALKHLLEDDAFIACSLIDMYAKNGSITQSSKVFNGLKEKSTASWNAMIMGYGIHGLAKEAIKLFEEMQRTGHNPDDLTFLGVLTACNHSGLIHEGLRYLDQMKSSFGLKPNLKHYACVIDMLGRAGQLDKALRVVAEEMSEEADVGIWKSLLSSCRIHQNLEMGEKVAAKLFELEPEKPENYVLLSNLYAGLGKWEDVRKVRQRMNEMSLRKDAGCSWIELNRKVFSFVVGERFLDGFEEIKSLWSILEMKISKMGYRPDTMSVQHDLSEEEKIEQLRGHSEKLALTYGLIKTSEGTTIRVYKNLRICVDCHNAAKLISKVMEREIVVRDNKRFHHFKNGVCSCGDYW

SEQ ID NO: 100821 - protein, 869 aa, Arabidopsis thaliana
  peptide (1)..(869): Ceres Seq. ID no. 13606139
MGRKIHQLVSGSTRLRNDDVLCTRIITMYAMCGSPDDSRFVFDALRSKNLFQWNAVISSYSRNELYDEVLETFIEMISTTDLLPDHFTYPCVIKACAGMSDVGIGLAVHGLVVKTGLVEDVFVGNALVSFYGTHGFVTDALQLFDIMPERNLVSWNSMIRVFSDNGFSEESFLLLGEMMEENGDGAFMPDVATLVTVLPVCAREREIGLGKGVHGWAVKLRLDKELVLNNALMDMYSKCGCITNAQMIFKMNNNKNVVSWNTMVGGFSAEGDTHGTFDVLRQMLAGGEDVKADEVTILNAVPVCFHESFLPSLKELHCYSLKQEFVYNELVANAFVASYAKCGSLSYAQRVFHGIRSKTVNSWNALIGGHAQSNDPRLSLDAHLQMKISGLLPDSFTVCSLLSACSKLKSLRLGKEVHGFIIRNWLERDLFVYLSVLSLYIHCGELCTVQALFDAMEDKSLVSWNTVITGYLQNGFPDRALGVFRQMVLYGIQLCGISMMPVFGACSLLPSLRLGREAHAYALKHLLEDDAFIACSLIDMYAKNGSITQSSKVFNGLKEKSTASWNAMIMGYGIHGLAKEAIKLFEEMQRTGHNPDDLTFLGVLTACNHSGLIHEGLRYLDQMKSSFGLKPNLKHYACVIDMLGRAGQLDKALRVVAEEMSEEADVGIWKSLLSSCRIHQNLEMGEKVAAKLFELEPEKPENYVLLSNLYAGLGKWEDVRKVRQRMNEMSLRKDAGCSWIELNRKVFSFVVGERFLDGFEEIKSLWSILEMKISKMGYRPDTMSVQHDLSEEEKIEQLRGHSEKLALTYGLIKTSEGTTIRVYKNLRICVDCHNAAKLISKVMEREIVVRDNKRFHHFKNGVCSCGDYW

SEQ ID NO: 100822 - protein, 842 aa, Arabidopsis thaliana
  peptide (1)..(842): Ceres Seq. ID no. 13606140
MYAMCGSPDDSRFVFDALRSKNLFQWNAVISSYSRNELYDEVLETFIEMISTTDLLPDHFTYPCVIKACAGMSDVGIGLAVHGLVVKTGLVEDVFVGNALVSFYGTHGFVTDALQLFDIMPERNLVSWNSMIRVFSDNGFSEESFLLLGEMMEENGDGAFMPDVATLVTVLPVCAREREIGLGKGVHGWAVKLRLDKELVLNNALMDMYSKCGCITNAQMIFKMNNNKNVVSWNTMVGGFSAEGDTHGTFDVLRQMLAGGEDVKADEVTILNAVPVCFHESFLPSLKELHCYSLKQEFVYNELVANAFVASYAKCGSLSYAQRVFHGIRSKTVNSWNALIGGHAQSNDPRLSLDAHLQMKISGLLPDSFTVCSLLSACSKLKSLRLGKEVHGFIIRNWLERDLFVYLSVLSLYIHCGELCTVQALFDAMEDKSLVSWNTVITGYLQNGFPDRALGVFRQMVLYGIQLCGISMMPVFGACSLLPSLRLGREAHAYALKHLLEDDAFIACSLIDMYAKNGSITQSSKVFNGLKEKSTASWNAMIMGYGIHGLAKEAIKLFEEMQRTGHNPDDLTFLGVLTACNHSGLIHEGLRYLDQMKSSFGLKPNLKHYACVIDMLGRAGQLDKALRVVAEEMSEEADVGIWKSLLSSCRIHQNLEMGEKVAAKLFELEPEKPENYVLLSNLYAGLGKWEDVRKVRQRMNEMSLRKDAGCSWIELNRKVFSFVVGERFLDGFEEIKSLWSILEMKISKMGYRPDTMSVQHDLSEEEKIEQLRGHSEKLALTYGLIKTSEGTTIRVYKNLRICVDCHNAAKLISKVMEREIVVRDNKRFHHFKNGVCSCGDYW

SEQ ID NO: 100823 - DNA, 1106 bp, Arabidopsis thaliana
  misc_feature (1)..(1106): Ceres Seq. ID no. 13606141
  misc_feature (1)..(1106): Ortholog of  Ceres SEQ ID NO 13504028 as cited in SEQ ID NO 56107
attcgaacaattaccgacacacaaaaagtttgaagagaaaaacaaaaaatgttgtcgagattgttcaaggcaggtgaaaaggttttgtcgaatctcgttagcaagaaagacatttacatggcgtcgaggaatcaggagaaatctcccaaagtgcaagagctttacgacctctgcaaagagactttcactggcaaagctccttctcctgcttccatggctatccaaaagctatgctctgtgttggactcagttagtcctgcagatgttgggcttgaagaggtatctcaagacgatgatcgaggctatggagtttctggggttagccgtttcaatagagtaggacgatgggcacaaccgataacattcttagacattcatgaatgtgatacttttacaatgtgtattttctgcttcccaacgtcttcagtgatcccattgcatgatcatccagagatggctgtgtttagtaaaatcctctatggatcacttcatgttaaagcttacgattgggtcgaacctccatgtattatcacacaagataaaggcgtccccggttctcttccagcaaggttggcgaaattggtgagtgacaaagttataacgcctcagtctgagataccggcgttgtacccaaagactggaggcaatctccattgcttcactgcgttgactccatgtgctgtgctcgacattctctcacctccttacaaagaaagtgttggcaggagttgcagttactacatggactatccgttttccactttcgcattggagaacggaatgaagaaggtggatgaaggaaaggaagacgaatacgcatggcttgtacagattgacacgcccgatgatcttcacatgcgtcccggatcatatactggtccaactatcagagtctagatatttgtggtttgttttgtagcaaagtagagcaactcttgtaacattccaagataagtttctggagaagatatcaatacgatttcagattaaagatgaactctttgtttagtccatgtccacttctcagttctcacacgcattcaagcaaatgaaactgcggaaaactacaaatagatcggcaatgagaaatgttaagatttcatttc

SEQ ID NO: 100824 - protein, 282 aa, Arabidopsis thaliana [sequence omitted]

SEQ ID NO: 100825 - protein, 259 aa, Arabidopsis thaliana
  peptide (1)..(259): Ceres Seq. ID no. 13606143
MASRNQEKSPKVQELYDLCKETFTGKAPSPASMAIQKLCSVLDSVSPADVGLEEVSQDDDRGYGVSGVSRFNRVGRWAQPITFLDIHECDTFTMCIFCFPTSSVIPLHDHPEMAVFSKILYGSLHVKAYDWVEPPCIITQDKGVPGSLPARLAKLVSDKVITPQSEIPALYPKTGGNLHCFTALTPCAVLDILSPPYKESVGRSCSYYMDYPFSTFALENGMKKVDEGKEDEYAWLVQIDTPDDLHMRPGSYTGPTIRV

SEQ ID NO: 100826 - protein, 227 aa, Arabidopsis thaliana
  peptide (1)..(227): Ceres Seq. ID no. 13606144
MAIQKLCSVLDSVSPADVGLEEVSQDDDRGYGVSGVSRFNRVGRWAQPITFLDIHECDTFTMCIFCFPTSSVIPLHDHPEMAVFSKILYGSLHVKAYDWVEPPCIITQDKGVPGSLPARLAKLVSDKVITPQSEIPALYPKTGGNLHCFTALTPCAVLDILSPPYKESVGRSCSYYMDYPFSTFALENGMKKVDEGKEDEYAWLVQIDTPDDLHMRPGSYTGPTIRV

SEQ ID NO: 100827 - DNA, 1579 bp, Arabidopsis thaliana
  misc_feature (1)..(1579): Ceres Seq. ID no. 13606145
  misc_feature (1)..(1579): Ortholog of  Ceres SEQ ID NO 12611159 as cited in SEQ ID NO 59821
aagaaaacagagcaactagatctctcttctcctctgctcgttcaatgttataacgatctcgagtatcacaaaagaacaagatgtctattcgaagaatctaccgatgtctgaattctttaatcaaaagatcttgtgctcaatctctatgatcatacgccccatttcacactttgtttcacctctcagtttttttttttgtgtttttttgtccctctttgtttcacttgagaacaaccccctttgaactcgatcaagaaagctaagtttgaagaatcaagaatggtgcggacaccgtgttgcaaagctgaactagggttaaagaaaggagcttggactcccgaggaagatcagaagcttctctcttaccttaaccgccacggtgaaggtggatggcgaactctccccgaaaaagctggactcaagagatgcggcaaaagctgcagactgagatgggccaattatcttagacctgacatcaaaagaggagagttcactgaagacgaagaacgttcaatcatctctcttcacgcccttcacggcaacaaatggtctgctatagctcgtggactaccaggaagaaccgataacgagatcaagaactactggaacactcatatcaaaaaacgtttgatcaagaaaggtattgatccagttacacacaagggcataacctccggtaccgacaaatcagaaaacctcccggagaaacaaaatgttaatctgacaactagtgaccatgatcttgataatgacaaggcgaagaagaacaacaagaattttggattatcatcggctagtttcttgaacaaagtagctaataggttcggaaagagaatcaatcagagtgttctgtctgagattatcggaagtggaggcccacttgcttctactagtcacactactaatactacaactacaagtgtttccgttgactctgaatcagttaagtcaacgagttcttccttcgcaccaacctcgaatcttctctgccatgggaccgttgcaacaacaccagtttcatcgaactttgacgttgatggtaacgttaatctgacgtgttcttcgtccacgttctctgattcctccgttaacaatcctctaatgtactgcgataatttcgttggtaataacaacgttgatgatgaggatactatcgggttctccacatttctgaatgatgaagatttcatgatgttggaggagtcttgtgttgaaaacactgcgttcatgaaagaacttacgaggtttcttcacgaggatgaaaacgacgtcgttgatgtgacgccggtctatgaacgtcaagacttgtttgacgaaattgataactattttggatgagtgaaactcataatcgatgaatcccacgtgaccatgtcaatatgatgtctatggatatgttaccttgatgatgttgatggtaataataataaataatgatggtgatgatgaccatgcatgaatcatgaatgtagttcgtgttgtcacatatgcttgtgtttttgtgttttttttttttggtctgaagtgtgttgtttcgttgtaaatggattataaatggtgatgtaataattataatgtt

SEQ ID NO: 100828 - protein, 352 aa, Arabidopsis thaliana
  peptide (1)..(352): Ceres Seq. ID no. 13606146
MVRTPCCKAELGLKKGAWTPEEDQKLLSYLNRHGEGGWRTLPEKAGLKRCGKSCRLRWANYLRPDIKRGEFTEDEERSIISLHALHGNKWSAIARGLPGRTDNEIKNYWNTHIKKRLIKKGIDPVTHKGITSGTDKSENLPEKQNVNLTTSDHDLDNDKAKKNNKNFGLSSASFLNKVANRFGKRINQSVLSEIIGSGGPLASTSHTTNTTTTSVSVDSESVKSTSSSFAPTSNLLCHGTVATTPVSSNFDVDGNVNLTCSSSTFSDSSVNNPLMYCDNFVGNNNVDDEDTIGFSTFLNDEDFMMLEESCVENTAFMKELTRFLHEDENDVVDVTPVYERQDLFDEIDNYFG

SEQ ID NO: 100829 - DNA, 636 bp, Arabidopsis thaliana
  misc_feature (1)..(636): Ceres Seq. ID no. 13606157
  misc_feature (1)..(636): Ortholog of  Ceres SEQ ID NO 12556889 as cited in SEQ ID NO 125
  misc_feature (1)..(636): Ortholog of  Ceres SEQ ID NO 15172982 as cited in SEQ ID NO 51725
  misc_feature (1)..(636): Ortholog of  Ceres SEQ ID NO 13598188 as cited in SEQ ID NO 61498
cagaataaaaatctatttcttgtgtttgtgttgtatttacttaaaaaaataaaggagatcagtttgggagaaagcagcaaagaagaaaaatggcagcaacatttgcaacaccatcgacggtgataggcctcggaggatcatccatcaccaccaaacccttctcttcatcctttttaaaaccaacattaagcgccaagaaccctttgagactcgccggtgcatcgggaggaagagtcacttgctttgagaggaactggttgaggagagatttgaacgtggtaggatttgggctgatcggatggctagctccgtcgagcattccagcgataaatgggaagagcctgacgggtctcttcttcgatagcatcggaactgagctcgctcacttcccgactcctccagctctcacttcacagttctggttgtggttggttacgtggcacttaggcctcttcctctgcctcactttcggacaaatcggattcaagggcaggactgaagattacttctaaggataactattcttgttttcgtttgtactatatgctctctcttggttatgtgtaatattatcaatcaaaacaaagctttctttgctatttgatgtttcattctatatctcgacaagtctttctt

SEQ ID NO: 100830 - protein, 140 aa, Arabidopsis thaliana; identical to SEQ ID NO: 22821
  peptide (1)..(140): Ceres Seq. ID no. 13606158

SEQ ID NO: 100831 - DNA, 1444 bp, Arabidopsis thaliana
  misc_feature (1)..(1444): Ceres Seq. ID no. 13606170
  misc_feature (1)..(1444): Ortholog of  Ceres SEQ ID NO 13597407 as cited in SEQ ID NO 64106
aagaatcaaagaaagaagatggaatctgaaagactcgaatcacatcttctgaataagcaagaagaagaagcttcttccttcacttctggtcttcttctcagcacatccgtcgttgtcgctggatccttctgttatggctgcgcctccaaaatcatggaagaactgggactttccgttgcagattattcgtttttcacttcggtaatgacattaggaggaatgattaccgccgtgttcagcggtaaaatctctgctctcgttggtcgtcgacagacaatgtggatctcagatgtttgctgtatttttggttggctcgctgtagcgtttgcacatgatattataatgcttaatactggacgactcttcttggggtttggggttggtctcattagttatgtggttcctgtgtatatagcagaaattacacccaaaacatttcgtggaggattttcttattccaatcagcttctacaatgtcttgggatttcactcatgttcttcaccggaaactttttccattggcgaacattagctcttttaagtgcaatcccaagtgctttccaagtgatatgtttattttttattcctgaatctcctagatggctggcgatgtatggtcaagatcaagagcttgaagtttcgttgaaaaaactaaggggagaaaatagtgatattctaaaggaagctgctgaaatcagagaaacagtggaaatatccagaaaagagtctcaaagtggaataagagacttgttccatatcggaaacgcacattcgttaatcattggattgggtttaatgctcttgcaacaattttgtgggagtgcggcgataagtgcttatgctgctcgaattttcgacaaagccggttttccaagcgacataggaacaaccatcctcgcagtgattctgataccgcaatctatagttgtcatgttaaccgttgaccgatggggacgccgaccacttcttatgatttcttctatcggaatgtgcatatgctcattttttattggcctttcatactaccttcagaagaatggtgaatttcagaagttatgttccgttatgttaatcgtcggtttagtgggttatgtctcatcctttggcattggcctaggtggattaccatgggttataatgtctgagatatttccggtgaatgtgaaaatcaccgccggtagccttgtaacgatgtcaaattggttttttaattggattatcatctatagttttaatttcatgatacagtggagcgcttccggaacatatttcatattttctggagtttctctggtgacgatcgtattcatatggacattggtgcctgagacgaaaggccgaacactcgaagagattcaaacatcattagtccgactttcgtaaaatctaagtatggattatacgtaatgttaagtctcttgaatagtctttttaaccgtatatt

SEQ ID NO: 100832 - protein, 460 aa, Arabidopsis thaliana
  peptide (1)..(460): Ceres Seq. ID no. 13606171
KNQRKKMESERLESHLLNKQEEEASSFTSGLLLSTSVVVAGSFCYGCASKIMEELGLSVADYSFFTSVMTLGGMITAVFSGKISALVGRRQTMWISDVCCIFGWLAVAFAHDIIMLNTGRLFLGFGVGLISYVVPVYIAEITPKTFRGGFSYSNQLLQCLGISLMFFTGNFFHWRTLALLSAIPSAFQVICLFFIPESPRWLAMYGQDQELEVSLKKLRGENSDILKEAAEIRETVEISRKESQSGIRDLFHIGNAHSLIIGLGLMLLQQFCGSAAISAYAARIFDKAGFPSDIGTTILAVILIPQSIVVMLTVDRWGRRPLLMISSIGMCICSFFIGLSYYLQKNGEFQKLCSVMLIVGLVGYVSSFGIGLGGLPWVIMSEIFPVNVKITAGSLVTMSNWFFNWIIIYSFNFMIQWSASGTYFIFSGVSLVTIVFIWTLVPETKGRTLEEIQTSLVRLS

SEQ ID NO: 100833 - protein, 454 aa, Arabidopsis thaliana
  peptide (1)..(454): Ceres Seq. ID no. 13606172
MESERLESHLLNKQEEEASSFTSGLLLSTSVVVAGSFCYGCASKIMEELGLSVADYSFFTSVMTLGGMITAVFSGKISALVGRRQTMWISDVCCIFGWLAVAFAHDIIMLNTGRLFLGFGVGLISYVVPVYIAEITPKTFRGGFSYSNQLLQCLGISLMFFTGNFFHWRTLALLSAIPSAFQVICLFFIPESPRWLAMYGQDQELEVSLKKLRGENSDILKEAAEIRETVEISRKESQSGIRDLFHIGNAHSLIIGLGLMLLQQFCGSAAISAYAARIFDKAGFPSDIGTTILAVILIPQSIVVMLTVDRWGRRPLLMISSIGMCICSFFIGLSYYLQKNGEFQKLCSVMLIVGLVGYVSSFGIGLGGLPWVIMSEIFPVNVKITAGSLVTMSNWFFNWIIIYSFNFMIQWSASGTYFIFSGVSLVTIVFIWTLVPETKGRTLEEIQTSLVRLS

SEQ ID NO: 100834 - protein, 409 aa, Arabidopsis thaliana
  peptide (1)..(409): Ceres Seq. ID no. 13606173
MEELGLSVADYSFFTSVMTLGGMITAVFSGKISALVGRRQTMWISDVCCIFGWLAVAFAHDIIMLNTGRLFLGFGVGLISYVVPVYIAEITPKTFRGGFSYSNQLLQCLGISLMFFTGNFFHWRTLALLSAIPSAFQVICLFFIPESPRWLAMYGQDQELEVSLKKLRGENSDILKEAAEIRETVEISRKESQSGIRDLFHIGNAHSLIIGLGLMLLQQFCGSAAISAYAARIFDKAGFPSDIGTTILAVILIPQSIVVMLTVDRWGRRPLLMISSIGMCICSFFIGLSYYLQKNGEFQKLCSVMLIVGLVGYVSSFGIGLGGLPWVIMSEIFPVNVKITAGSLVTMSNWFFNWIIIYSFNFMIQWSASGTYFIFSGVSLVTIVFIWTLVPETKGRTLEEIQTSLVRLS

SEQ ID NO: 100835 - DNA, 1817 bp, Arabidopsis thaliana
  misc_feature (1)..(1817): Ceres Seq. ID no. 13606174
  misc_feature (1)..(1817): Ortholog of  Ceres SEQ ID NO 13597407 as cited in SEQ ID NO 64106
aaaagattggggaagctgacctctgcctttcctcctccattaatcaaggaatataaatcagctttaaactcagtcctcttatggaagacaaaaaagcaaatatttattcgtaaatataacttcagaaccctttcaacaaaactctctctgttctttctccgtggagaagttaaagatgacgatgtcggagaactcaagaaacttggaagctggtttgctactgaggaagaaccaaaacgacatcaacgaatgtcgtatcactgctgttgtacttttcagtactttcgtttctgtttgtggctctttctgcttcggttgtgcggcaggttattcatcagttgctcaaacagggatcataaatgatttaggtctctctgttgcacaatactccatgtttggttcaatcatgacttttggaggaatgattggtgccatcttcagcgggaaagttgcagatctcatgggtcgaaaagggactatgtggtttgctcaaattttctgcatcttcggttgggttgcagtagcattagcaaaagactccatgtggcttgatattggaagactatccacaggatttgcagttggtttattaagctatgtgataccagtttacattgcagaaataacaccaaaacatgttcgaggagcgtttgtatttgctaatcagctgatgcagagttgtggattgtctttattctacgtcattggaaattttgttcattggcgtaacttggccttaatcggtctcattccatgtgcgttgcaagttgtgactttgttctttattccagagtcccctagactactgggaaaatggggacatgaaaaagaatgtagagcttcattgcaaagtcttcgcggagatgatgcagatatctctgaagaagccaacactatcaaagaaaccatgatcttgtttgatgaaggaccaaaatcgcgggttatggatttgtttcagagaagatatgctccatctgttgttattggtgtgggactaatgcttctacaacaactctctggaagctcaggacttatgtactatgtcggtagcgtatttgataaaggagggtttccaagcagcattggctcaatgattcttgcagtgatcatgataccaaaagctctattgggtctgattttggttgagaaaatgggacgaagaccacttctattggcctctaccggtggaatgtgctttttcagcttgctcctcagtttttccttctgctttcggtcatatggcatgcttgatgagctcactccgattttcacatgtatcggtgtagtgggtttcatctcttcatttgccgtaggcatgggaggcttaccatggatcatcatgtctgagatattcccaatgaatgttaaagtttctgctgggactctggttaccttagccaactggtcctttggttggattgttgctttcgcctacaacttcatgctagagtggaacgcatcaggaacgttcttgatcttctttactatatgtggtgcgggtatagtctttatttatgcgatggtacccgaaactaaaggaagaacattggaagatatacaagcttctcttacagattttctacaatgagatcaagtttgacttgtttaaagttattcattttttcttagattacaattggggggaggtttatagttttttgttgtaattgttacctcatttgatgtgcaattgagaaagagatcacttgaacataaggtttagatatctctctgtctcagtaaattagcccaatgtatgtatagtatagtcccagttttacacccaaaaaaaagaaatataaaattgaactttaagg

SEQ ID NO: 100836 - protein, 470 aa, Arabidopsis thaliana; identical to SEQ ID NO: 29899
  peptide (1)..(470): Ceres Seq. ID no. 13606175

SEQ ID NO: 100837 - protein, 468 aa, Arabidopsis thaliana; identical to SEQ ID NO: 29900
  peptide (1)..(468): Ceres Seq. ID no. 13606176

SEQ ID NO: 100838 - protein, 398 aa, Arabidopsis thaliana; identical to SEQ ID NO: 29901
  peptide (1)..(398): Ceres Seq. ID no. 13606177

SEQ ID NO: 100839 - DNA, 1595 bp, Arabidopsis thaliana
  misc_feature (1)..(1595): Ceres Seq. ID no. 13606178
  misc_feature (1)..(1595): Ortholog of  Ceres SEQ ID NO 12586556 as cited in SEQ ID NO 64667
  misc_feature (1)..(1595): Ortholog of  Ceres SEQ ID NO 13660894 as cited in SEQ ID NO 67475
atggaaatcgagcgtaagctgctgcgtcttctccacggccacaatactcgaacccgtttacccgaaatccacgcccatcttctgcgtcacttccttcatggttccaatctccttctcgcccacttcatctctatctgcggatccctcagcaactctgattacgccaaccgcgtcttctctcatatccaaaaccctaacgttctggtcttcaacgccatgatcaaatgctattcgcttgtcggtccgcctctagaatctttatctttcttctcttccatgaaaagccggggaatttgggctgacgagtatacttacgcgcctttgctcaaatcctgttcgtctctttctgatttgcgatttgggaaatgcgttcatggtgagcttataagaactgggttccaccgtcttgggaaaattaggattggggtggtggagctttatacttccggtgggagaatgggtgatgcacagaaagtgttcgacgaaatgtctgagagaaacgttgtcgtctggaatcttatgattcgcgggttctgtgactccggggacgttgaaagaggtcttcatttgttcaaacagatgagcgaaagaagcattgtgtcgtggaattcgatgatatctagcttgtctaaatgtggtagagatcgtgaggctttggagcttttctgcgaaatgattgatcaaggttttgaccctgatgaggcgactgtggttacagtcttgccaatttctgcatctctaggagtgttggataccggaaaatggattcattctaccgcagaatccagtggtttgtttaaagatttcatcaccgtgggaaacgctttggtagatttctactgcaaaagcggcgacttggaggcagcaacggctatatttagaaaaatgcagcgtagaaacgttgtttcatggaacacattgatatcgggatcagccgtaaacggaaagggagaatttgggatagacttgtttgatgctatgatagaggaagggaaagtagctccaaatgaagcgacatttttgggggttttggcatgttgctcatacacaggtcaggtggagagaggagaggaattgtttggtttgatgatggaaagattcaaacttgaggcgagaaccgagcattacggtgccatggtagatctaatgagtagaagtgggagaatcacagaggcgtttaagtttctaaaaaatatgcccgtaaacgcaaatgcggcaatgtgggggtcgctgctcagtgcttgtcgtagccacggagatgtaaagctagcagaagttgcagcaatggagttagtgaagattgagccagggaattcggggaattatgtgttgttatctaatttgtatgcagaggaagggagatggcaagatgtggagaaggtacgaacgttgatgaaaaagaaccgccttagaaagtctactggccaaagcaccatttgcgatgtttcagtctgagaagtagctggtttttgtcaatagaggccagacttattgctaaatacggtaatcaagttcatttgtaagcacatttgtatttttctggctcggtgaaaatgcggccaccaggtttgattagtttctaatgaattgattag

SEQ ID NO: 100840 - protein, 484 aa, Arabidopsis thaliana
  peptide (1)..(484): Ceres Seq. ID no. 13606179
MEIERKLLRLLHGHNTRTRLPEIHAHLLRHFLHGSNLLLAHFISICGSLSNSDYANRVFSHIQNPNVLVFNAMIKCYSLVGPPLESLSFFSSMKSRGIWADEYTYAPLLKSCSSLSDLRFGKCVHGELIRTGFHRLGKIRIGVVELYTSGGRMGDAQKVFDEMSERNVVVWNLMIRGFCDSGDVERGLHLFKQMSERSIVSWNSMISSLSKCGRDREALELFCEMIDQGFDPDEATVVTVLPISASLGVLDTGKWIHSTAESSGLFKDFITVGNALVDFYCKSGDLEAATAIFRKMQRRNVVSWNTLISGSAVNGKGEFGIDLFDAMIEEGKVAPNEATFLGVLACCSYTGQVERGEELFGLMMERFKLEARTEHYGAMVDLMSRSGRITEAFKFLKNMPVNANAAMWGSLLSACRSHGDVKLAEVAAMELVKIEPGNSGNYVLLSNLYAEEGRWQDVEKVRTLMKKNRLRKSTGQSTICDVSV

SEQ ID NO: 100841 - protein, 412 aa, Arabidopsis thaliana
  peptide (1)..(412): Ceres Seq. ID no. 13606180
MIKCYSLVGPPLESLSFFSSMKSRGIWADEYTYAPLLKSCSSLSDLRFGKCVHGELIRTGFHRLGKIRIGVVELYTSGGRMGDAQKVFDEMSERNVVVWNLMIRGFCDSGDVERGLHLFKQMSERSIVSWNSMISSLSKCGRDREALELFCEMIDQGFDPDEATVVTVLPISASLGVLDTGKWIHSTAESSGLFKDFITVGNALVDFYCKSGDLEAATAIFRKMQRRNVVSWNTLISGSAVNGKGEFGIDLFDAMIEEGKVAPNEATFLGVLACCSYTGQVERGEELFGLMMERFKLEARTEHYGAMVDLMSRSGRITEAFKFLKNMPVNANAAMWGSLLSACRSHGDVKLAEVAAMELVKIEPGNSGNYVLLSNLYAEEGRWQDVEKVRTLMKKNRLRKSTGQSTICDVSV

SEQ ID NO: 100842 - protein, 392 aa, Arabidopsis thaliana
  peptide (1)..(392): Ceres Seq. ID no. 13606181
MKSRGIWADEYTYAPLLKSCSSLSDLRFGKCVHGELIRTGFHRLGKIRIGVVELYTSGGRMGDAQKVFDEMSERNVVVWNLMIRGFCDSGDVERGLHLFKQMSERSIVSWNSMISSLSKCGRDREALELFCEMIDQGFDPDEATVVTVLPISASLGVLDTGKWIHSTAESSGLFKDFITVGNALVDFYCKSGDLEAATAIFRKMQRRNVVSWNTLISGSAVNGKGEFGIDLFDAMIEEGKVAPNEATFLGVLACCSYTGQVERGEELFGLMMERFKLEARTEHYGAMVDLMSRSGRITEAFKFLKNMPVNANAAMWGSLLSACRSHGDVKLAEVAAMELVKIEPGNSGNYVLLSNLYAEEGRWQDVEKVRTLMKKNRLRKSTGQSTICDVSV

SEQ ID NO: 100843 - DNA, 1213 bp, Arabidopsis thaliana
  misc_feature (1)..(1213): Ceres Seq. ID no. 13606182
  misc_feature (1)..(1213): Ortholog of  Ceres SEQ ID NO 14302306 as cited in SEQ ID NO 62834
  misc_feature (1)..(1213): Ortholog of  Ceres SEQ ID NO 14303305 as cited in SEQ ID NO 0
acaccacccgagaacacacgattattctccaaagagaaagagaaaaatcaataacctcatagtgtcgacatgggttgccaagacgaacaattggtgcaaacaatatgcgatctctacgaaaagatctcaaagcttgagagtctaaaaccatccgaagatgtcaacattctcttcaagcagctcgtttccacatgcataccaccaaaccctaacatcgatgtcaccaagatgtgtgacagagtccaagagattcgacttaatctcatcaagatttgtggtctagccgaaggtcacttagaaaaccatttctcttcgatcttgacctcttaccaagacaacccacttcatcatttaaacattttcccttattacaacaactatttgaaactcggaaagctcgagttcgacctcctcgaacaaaacctaaatggctttgtcccaaagagtgtggctttcattggatctggtcctcttcctctcacttccatcgttcttgcttcattccatctcaaagacacaatctttcacaactttgacatcgacccatcagcgaactcactcgcttctcttctggtttcctctgatccagacatctctcaacgcatgttcttccacaccgttgatataatggacgtgacagagagcttaaagagctttgatgtcgtgtttctagctgctcttgttggaatgaacaaagaggagaaagttaaagtgatcgagcatctgcagaaacacatggctcctggtgctgtgctcatgcttaggagtgctcatggtccgagagcgtttctttatccgatcgttgagccgtgtgatcttcaggggttcgaggttttgtctatttatcacccaacagatgatgttatcaactccgtggtgatctctaaaaagcatccagttgtttcaattgggaatgttggtggtcctaattcatgcttgctcaagccttgcaactgttccaagacccacgcgaaaatgaacaagaacatgatgatcgaggagttcggagctagggaggaacagttgtcttaaggaggacgtttcttgtttcctaattctctatcttatggaagcttcctaattatgatttgtgtctttgtgttgtgtgttggtgtcttttctcaattgttctttgtttgttttatttttctttctatattcctagaaatggatttgtttcgcgcgacactgttgggctgaaacagaacacgat

SEQ ID NO: 100844 - protein, 320 aa, Arabidopsis thaliana; identical to SEQ ID NO: 23804
  peptide (1)..(320): Ceres Seq. ID no. 13606183

SEQ ID NO: 100845 - protein, 267 aa, Arabidopsis thaliana; identical to SEQ ID NO: 23805
  peptide (1)..(267): Ceres Seq. ID no. 13606184

SEQ ID NO: 100846 - DNA, 951 bp, Arabidopsis thaliana
  misc_feature (1)..(951): Ceres Seq. ID no. 13606185
  misc_feature (1)..(951): Ortholog of  Ceres SEQ ID NO 12578688 as cited in SEQ ID NO 27
gagagagagagagaaagagagactctcagaatctgaagaagaagaagagattgttgtttttgccttttatcatcggtttctttgaatctctggttttaaatcggatttaatggtggagtctctgttcccgagcatcgaaaacacaggtgaatcgtctcgaagaaagaagccgaggatatcagagacggcggaggcggagatagaggcacgacgtgtcaacgaagaaagcttgaagagatggaaaacgaatcgtgtgcaacagatctacgcttgtaagctcgtcgaagctttacgccgagttcgtcagagatcttccaccaccagcaacaacgagaccgataaactcgtctccggcgcggcgagggagatacgtgatacggcggatcgagttctagctgcgtccgctcgtggtacgactcggtggagcagagcgattttagcgagtcgcgtccgagcgaagctgaagaaacatagaaaggcgaaaaagtcaacgggaaattgtaaatcgagaaaaggtctcacggagacgaatcggattaagttaccggcggttgagagaaaactgaagattcttggccgtttggttcctggttgccggaaagtctctgtaccgaatcttttagatgaagcgaccgattacatcgcagcgttagagatgcaggttcgagccatggaggctctcgccgaacttttaaccgcagccgcaccacggacgacgttgaccggaacttaacggcggcagttagtttgtcagttgttaattagcttttcttttacctttttacccctttattttggcttcaagtgttttttttttctcgtcgacgcgattttaatttattaaattcatgtattttatttgtatacatcatcacttctttttttttgtatccattttgatctttctttgttttttcgttagataatcaaagttatctaaacaataacaac

SEQ ID NO: 100847 - protein, 207 aa, Arabidopsis thaliana
  peptide (1)..(207): Ceres Seq. ID no. 13606186
MVESLFPSIENTGESSRRKKPRISETAEAEIEARRVNEESLKRWKTNRVQQIYACKLVEALRRVRQRSSTTSNNETDKLVSGAAREIRDTADRVLAASARGTTRWSRAILASRVRAKLKKHRKAKKSTGNCKSRKGLTETNRIKLPAVERKLKILGRLVPGCRKVSVPNLLDEATDYIAALEMQVRAMEALAELLTAAAPRTTLTGT

SEQ ID NO: 100848 - DNA, 1564 bp, Arabidopsis thaliana
  misc_feature (1)..(1564): Ceres Seq. ID no. 13606187
  misc_feature (1)..(1564): Ortholog of  Ceres SEQ ID NO 15170461 as cited in SEQ ID NO 52853
  misc_feature (1)..(1564): Ortholog of  Ceres SEQ ID NO 13595351 as cited in SEQ ID NO 55934
  misc_feature (1)..(1564): Ortholog of  Ceres SEQ ID NO 13595513 as cited in SEQ ID NO 56663
  misc_feature (1)..(1564): Ortholog of  Ceres SEQ ID NO 13639645 as cited in SEQ ID NO 57488
ataaatgtgtgtatatatacatctttggctataaatataaggtcgaaccaaaataaaatatagatttggggaaactaataaatgatatagagaatccacctctctcccttatttttttttcttggtttcttgacctattattattgattagtaatagtgagagaggcatattttggagatacacataaacacataaattggaagaataaaataaaagagagtgagagatggctaaatcagatatgttgccgttcttggcgatggtgttggtgcaaatcggctacgcaggcatgaacattacgtcgaagatggctatggaggccggtatgaagccactcatcctggtcgcttatcgtcagatatttgccactatcgccacttttccggtcgcattttttctcgaacggaagacaagaccgaagatcacacttaggattcttgtccaagtcttcttctgctccattactggtgcgactggaaaccaagtgctatatttcgtaggacttcagaattcatctccgaccattgcttgtgccttaactaatctcttaccagcggtcactttcctcctcgccgcaatattcagacaagaaaccgtggggatcaagaaggcatcaggacaagccaaagtgatagggacgctagtatgtgtgatcggagccatggttctctccttctaccatggtcacaccatcggcattggagaatccaagatccattgggcctacgctgaaaacatcacgaaacatggttccagttctggccattctaatttcttcttgggaccttttcttattatggctgctgccgtttcttgggccgcttggttcattatccagacgaagatgagtgaaacatttgcagcaccgtacacgagcacactactaatgtgtttgatgggaagtatccaatgtggagccattgctttgatctccgatcatacaatctctgattggtctctcagctctcctctccgcttcatatccgccctttatgccggagtggtggcgtctgcgttagctttctgcctaatgtcatgggctatgcagaggaaaggtcctctgtacgtctctgttttcagccctttacttctcgtagttgtcgccattttcagctgggctcttcttgaagagaaactctacaccggcacgtttatgggatcagcacttgtggttattggtctctatggcgtattgtgggggaaagacagagaggtgagtgagaaggaagaagaaagggagaaggtgaaacaacaaaaccataaagtcaagagtgaaagtaatgaagatattgaatcgagattaccggtagcaagtagtggaaatggttccacaaggtctacatcgccttaaaatggtgattgcttcttcatcatatataagtatgagctatggaagaaccttttgggatttcttgttatctaagttactgcaactaaattggattttcggagtgtttaattttgtatcccattttgaggctaatgatggagtgttgatttgtgtgttcatcctatggacaacaaatatcacctgtttgatctctatatatattcagtattctt

SEQ ID NO: 100849 - protein, 374 aa, Arabidopsis thaliana; identical to SEQ ID NO: 25010
  peptide (1)..(374): Ceres Seq. ID no. 13606188

SEQ ID NO: 100850 - protein, 369 aa, Arabidopsis thaliana; identical to SEQ ID NO: 25011
  peptide (1)..(369): Ceres Seq. ID no. 13606189

SEQ ID NO: 100851 - protein, 363 aa, Arabidopsis thaliana; identical to SEQ ID NO: 25012
  peptide (1)..(363): Ceres Seq. ID no. 13606190

SEQ ID NO: 100852 - DNA, 1129 bp, Arabidopsis thaliana
  misc_feature (1)..(1129): Ceres Seq. ID no. 13606191
  misc_feature (1)..(1129): Ortholog of  Ceres SEQ ID NO 15177031 as cited in SEQ ID NO 60171
  misc_feature (1)..(1129): Ortholog of  Ceres SEQ ID NO 12617197 as cited in SEQ ID NO 63406
  misc_feature (1)..(1129): Ortholog of  Ceres SEQ ID NO 13597804 as cited in SEQ ID NO 64182
  misc_feature (1)..(1129): Ortholog of  Ceres SEQ ID NO 15179788 as cited in SEQ ID NO 64818
  misc_feature (1)..(1129): Ortholog of  Ceres SEQ ID NO 14301622 as cited in SEQ ID NO 65156
  misc_feature (1)..(1129): Ortholog of  Ceres SEQ ID NO 13598565 as cited in SEQ ID NO 65250
  misc_feature (1)..(1129): Ortholog of  Ceres SEQ ID NO 13598597 as cited in SEQ ID NO 65496
  misc_feature (1)..(1129): Ortholog of  Ceres SEQ ID NO 13596284 as cited in SEQ ID NO 68273
aaaacaattattttcagacacagagagactcagacaggagatatgaactgcggaggaaaggtggtctgcgttaccggagcttccggctacatagcgtcttggattgtcaagcttttgctcctccgtggctacaccgtcaatgccactgttcgagatccaaaggacaagaagaaaacagaacatcttcttgcactagacggtgcaaaagaaagactcaaattgttcaaagcagatcttttggaagaatcttcttttgatcaagctatcgatggttgtgatgctgtcttccacactgcttctccagttctattcactgtcacagatcctcagactgagctgattgatccagccttaaagggtactattaacgtccttaatacatgcaaacaagtttcttctgtcaagagggtcattctgacatcttccacggctgcggttctctctcgtcagcctcctattgggccaaacgacctggtggacgagactttcttctccgatccaagtctatgcagggagacaaagaattggtattcactctccaagattttggccgagaatgcagcgtggcaatttgccaaagacaatggaatcgacatggttgtgttgaatcctggatttatttgcggaccactcttgcaaccaactcttaacatgtcggtagagctaattgtggatttcataaatggtaagaaccctttcaataaaagatactacaggttctcggacgtaagagatgtcgccttggttcatatcaaagcgttggagactccttcagccaatggcagatacatcatcgatggtccaaatatgagtgtaaacgacattatagacattcttcggaagctgttcccagatttgtctattgctgatacgaatgaagaaagtgagatgaatgagatgatatgccaagtgtgtgtggagaaagtgaaaaatttgggagtagagttcactcctatgaaatcaagccttagagacactattgttagcctcaaggagaaatgtcttttatgattctgttcgtatatttgtaactattatgtgtatttttattttgttagtattactaattcaagtggtttaagttgttgagactctttaaaatctaagcattttataaacaataatatat

SEQ ID NO: 100853 - protein, 336 aa, Arabidopsis thaliana
  peptide (1)..(336): Ceres Seq. ID no. 13606192
KTIIFRHRETQTGDMNCGGKVVCVTGASGYIASWIVKLLLLRGYTVNATVRDPKDKKKTEHLLALDGAKERLKLFKADLLEESSFDQAIDGCDAVFHTASPVLFTVTDPQTELIDPALKGTINVLNTCKQVSSVKRVILTSSTAAVLSRQPPIGPNDLVDETFFSDPSLCRETKNWYSLSKILAENAAWQFAKDNGIDMVVLNPGFICGPLLQPTLNMSVELIVDFINGKNPFNKRYYRFSDVRDVALVHIKALETPSANGRYIIDGPNMSVNDIIDILRKLFPDLSIADTNEESEMNEMICQVCVEKVKNLGVEFTPMKSSLRDTIVSLKEKCLL

SEQ ID NO: 100854 - protein, 322 aa, Arabidopsis thaliana; identical to SEQ ID NO: 22010
  peptide (1)..(322): Ceres Seq. ID no. 13606193

SEQ ID NO: 100855 - DNA, 2402 bp, Arabidopsis thaliana
  misc_feature (1)..(2402): Ceres Seq. ID no. 13606194
  misc_feature (1)..(2402): Ortholog of  Ceres SEQ ID NO 13657677 as cited in SEQ ID NO 66119
gtggccgtctttttcaaaaccttagacgatgagtatcatgctatcaatttcccggcgccggaactcttatattctgctcaaccattctcgattcctccgtcgtttttcatatgatgttgacccacggccggaaatcaaattggagagccaggaatttgtagtagtcaaatttgtgaaaactcttcaaaaaaccccgcaacatgattgggcgtcgagcgagtcgctaagtgcgcttgtcgtatcttcttcttctgcttctcctttagtattctcgcaaatcacgcggcggctaggatcgtattctctagcaatctcgttcttcgagtacctggatgcgaagtctcagtctctgaaacgccgtgaagaatctctctccttggcgcttcagtcggtcattgaattcgccggtagtgaaccggacccgcgtgataaacttctccgtctctacgagatcgccaaagagaagaacattcctcttactgtcgttgccactaatcttctgatccgatggtttgggcgtatgggtatggtgaatcagtcggttcttgtatacgaaagactcgattcgaatatgaaaaactcgcaggttcgtaatgttgtggtagacgtcttgctaagaaatggacttgtggatgatgccttcaaggtgctcgacgaaatgcttcagaaagaatctgtttttcctcctaatagaatcacagcggatattgtgttacacgaggtttggaagggaaggcttttgacagaagaaaagataattgctttgatttcaagatttagctctcatggtgtctccccaaactctgtttggttgactcggtttatatcaagtctatgcaaaaatgctcgcgccaatgctgcttgggatattttgagcgacctgatgaagaacaaaaccccacttgaagctcctcccttcaatgcgcttttgtcttgcttaggaaggaatatggacattagtagaatgaatgatttagtcttgaagatggatgaggtgaaaatccggcctgatgttgtgactttagggattcttattaacactttatgcaaatcaagaagggtagatgaagctctcgaagtttttgaaaaaatgcgtggaaagagaactgatgatggaaatgtgattaaagctgattcgattcattttaatactctcattgacgggctctgcaaggtggggaggttgaaagaagcagaggagttattggtaaggatgaaactggaagagagatgtgcgcccaatgcagttacttacaattgcttgattgatgggtattgcagagctggaaagcttgagacggctaaagaagtcgtttctcggatgaaagaggacgagattaaacctaatgtggtaactgttaatacaatcgttggtgggatgtgcaggcaccatggattgaacatggcggttgtattctttatggatatggaaaaggaaggcgtgaaagggaatgtggttacttatatgacattgattcatgcttgttgcagcgtcagtaatgtagagaaggctatgtattggtatgaaaaaatgttggaagctggttgttctcctgatgcaaagatctattatgctttgatctctggattgtgccaagttagacgggatcatgacgccattagagtggtggagaaactgaaagaaggagggttttctcttgacttattggcttacaacatgcttattgggttgttttgtgataagaataatacagagaaagtctatgagatgctaaccgatatggaaaaagaagggaagaaacctgattccatcacttacaacactctgatttcgtttttcggtaaacacaaggacttcgagagtgttgagagaatgatggagcagatgagagaagacgggttagacccgactgtcacgacatatggagcggtgattgacgcttattgctcagtcggcgaattagacgaagcattgaagctctttaaggacatgggtttgcactcaaaggtcaatccgaacactgtaatatacaacattctcataaacgcattttctaagctggggaatttcgggcaagcgctctctctgaaagaggaaatgaagatgaagatggtgagacctaatgttgaaacttacaatgccttgtttaagtgtcttaacgagaaaacccaaggagagacattacttaaactgatggatgagatggtcgaacagtcttgtgaaccaaatcagatcacaatggagattctaatggagcgtctctcaggttctgatgagttagttaagctgaggaagtttatgcaaggctactctgttgcttcgccgaccgagaaagcttcacctttcgatgtctttagcttgggataatgttcgtttagatacagtaaccattactataatgtttttaataatttcttgattatgcattttatataattac

SEQ ID NO: 100856 - protein, 766 aa, Arabidopsis thaliana
  peptide (1)..(766): Ceres Seq. ID no. 13606195
MSIMLSISRRRNSYILLNHSRFLRRFSYDVDPRPEIKLESQEFVVVKFVKTLQKTPQHDWASSESLSALVVSSSSASPLVFSQITRRLGSYSLAISFFEYLDAKSQSLKRREESLSLALQSVIEFAGSEPDPRDKLLRLYEIAKEKNIPLTVVATNLLIRWFGRMGMVNQSVLVYERLDSNMKNSQVRNVVVDVLLRNGLVDDAFKVLDEMLQKESVFPPNRITADIVLHEVWKGRLLTEEKIIALISRFSSHGVSPNSVWLTRFISSLCKNARANAAWDILSDLMKNKTPLEAPPFNALLSCLGRNMDISRMNDLVLKMDEVKIRPDVVTLGILINTLCKSRRVDEALEVFEKMRGKRTDDGNVIKADSIHFNTLIDGLCKVGRLKEAEELLVRMKLEERCAPNAVTYNCLIDGYCRAGKLETAKEVVSRMKEDEIKPNVVTVNTIVGGMCRHHGLNMAVVFFMDMEKEGVKGNVVTYMTLIHACCSVSNVEKAMYWYEKMLEAGCSPDAKIYYALISGLCQVRRDHDAIRVVEKLKEGGFSLDLLAYNMLIGLFCDKNNTEKVYEMLTDMEKEGKKPDSITYNTLISFFGKHKDFESVERMMEQMREDGLDPTVTTYGAVIDAYCSVGELDEALKLFKDMGLHSKVNPNTVIYNILINAFSKLGNFGQALSLKEEMKMKMVRPNVETYNALFKCLNEKTQGETLLKLMDEMVEQSCEPNQITMEILMERLSGSDELVKLRKFMQGYSVASPTEKASPFDVFSLG

SEQ ID NO: 100857 - protein, 763 aa, Arabidopsis thaliana
  peptide (1)..(763): Ceres Seq. ID no. 13606196
MLSISRRRNSYILLNHSRFLRRFSYDVDPRPEIKLESQEFVVVKFVKTLQKTPQHDWASSESLSALVVSSSSASPLVFSQITRRLGSYSLAISFFEYLDAKSQSLKRREESLSLALQSVIEFAGSEPDPRDKLLRLYEIAKEKNIPLTVVATNLLIRWFGRMGMVNQSVLVYERLDSNMKNSQVRNVVVDVLLRNGLVDDAFKVLDEMLQKESVFPPNRITADIVLHEVWKGRLLTEEKIIALISRFSSHGVSPNSVWLTRFISSLCKNARANAAWDILSDLMKNKTPLEAPPFNALLSCLGRNMDISRMNDLVLKMDEVKIRPDVVTLGILINTLCKSRRVDEALEVFEKMRGKRTDDGNVIKADSIHFNTLIDGLCKVGRLKEAEELLVRMKLEERCAPNAVTYNCLIDGYCRAGKLETAKEVVSRMKEDEIKPNVVTVNTIVGGMCRHHGLNMAVVFFMDMEKEGVKGNVVTYMTLIHACCSVSNVEKAMYWYEKMLEAGCSPDAKIYYALISGLCQVRRDHDAIRVVEKLKEGGFSLDLLAYNMLIGLFCDKNNTEKVYEMLTDMEKEGKKPDSITYNTLISFFGKHKDFESVERMMEQMREDGLDPTVTTYGAVIDAYCSVGELDEALKLFKDMGLHSKVNPNTVIYNILINAFSKLGNFGQALSLKEEMKMKMVRPNVETYNALFKCLNEKTQGETLLKLMDEMVEQSCEPNQITMEILMERLSGSDELVKLRKFMQGYSVASPTEKASPFDVFSLG

SEQ ID NO: 100858 - protein, 602 aa, Arabidopsis thaliana
  peptide (1)..(602): Ceres Seq. ID no. 13606197
MGMVNQSVLVYERLDSNMKNSQVRNVVVDVLLRNGLVDDAFKVLDEMLQKESVFPPNRITADIVLHEVWKGRLLTEEKIIALISRFSSHGVSPNSVWLTRFISSLCKNARANAAWDILSDLMKNKTPLEAPPFNALLSCLGRNMDISRMNDLVLKMDEVKIRPDVVTLGILINTLCKSRRVDEALEVFEKMRGKRTDDGNVIKADSIHFNTLIDGLCKVGRLKEAEELLVRMKLEERCAPNAVTYNCLIDGYCRAGKLETAKEVVSRMKEDEIKPNVVTVNTIVGGMCRHHGLNMAVVFFMDMEKEGVKGNVVTYMTLIHACCSVSNVEKAMYWYEKMLEAGCSPDAKIYYALISGLCQVRRDHDAIRVVEKLKEGGFSLDLLAYNMLIGLFCDKNNTEKVYEMLTDMEKEGKKPDSITYNTLISFFGKHKDFESVERMMEQMREDGLDPTVTTYGAVIDAYCSVGELDEALKLFKDMGLHSKVNPNTVIYNILINAFSKLGNFGQALSLKEEMKMKMVRPNVETYNALFKCLNEKTQGETLLKLMDEMVEQSCEPNQITMEILMERLSGSDELVKLRKFMQGYSVASPTEKASPFDVFSLG

SEQ ID NO: 100859 - DNA, 954 bp, Arabidopsis thaliana
  misc_feature (1)..(954): Ceres Seq. ID no. 13606198
  misc_feature (1)..(954): Ortholog of  Ceres SEQ ID NO 14302705 as cited in SEQ ID NO 56264
aatctttatgttgtcgacactctttcagttctctcgacgccgtccatcgccctccgtcatatcgccgccgctaaagtactggcagagagttcacaacaatggagtacgtaaaccctgaaggtcttcgattagatggtcgccgattcaacgagatgaggcaaatcgtagctgaagttggagttgtttctaaggctgacggttctgctgtcttcgagatgggtaataccaaagtaattgcagctgtttatggtccaagagagattcaaaacaagagccagcaaaagaagaacgaccatgcagtggtgttgtgtgagtatagtatggctcagtttagtactggtgatcgtagaagacagaaattcgacaggcgatcaacagagctatctcttgtcatccgtcagacaatggaagcttgcatattaaccgaattgatgcctcactctcagatcgatattttccttcaggttctacaagctgatggaggaacaagatcagcttgtatcaatgccgcgactctagctctagcagatgctggaattccaatgcgtgatctcgctgtttcctgtagtgctggatatttaaacagtactcctcttcttgatctgaactatgttgaagacagtgctggaggagctgatgtaaccgtcggtattctacctaaattagacaaagtgtcactccttcagatggatgccaagttaccgatggaaacatttgagacagtgtttgcattggcttctgaaggttgcaaggcaattgcagagagaatacgcgaggtacttcaagaaaacaccaaacagctagagtatcgccgagctgcataaactttagagttagagaaaaaaacgtaaagctccaagatttttgttaattagattttgctgttgtttgtggaagttgaggataaaaagctagtagtgcaaactctttttgggaaaaatgaatcaatttgat

SEQ ID NO: 100860 - protein, 241 aa, Arabidopsis thaliana
  peptide (1)..(241): Ceres Seq. ID no. 13606199
MEYVNPEGLRLDGRRFNEMRQIVAEVGVVSKADGSAVFEMGNTKVIAAVYGPREIQNKSQQKKNDHAVVLCEYSMAQFSTGDRRRQKFDRRSTELSLVIRQTMEACILTELMPHSQIDIFLQVLQADGGTRSACINAATLALADAGIPMRDLAVSCSAGYLNSTPLLDLNYVEDSAGGADVTVGILPKLDKVSLLQMDAKLPMETFETVFALASEGCKAIAERIREVLQENTKQLEYRRAA

SEQ ID NO: 100861 - protein, 223 aa, Arabidopsis thaliana
  peptide (1)..(223): Ceres Seq. ID no. 13606200
MRQIVAEVGVVSKADGSAVFEMGNTKVIAAVYGPREIQNKSQQKKNDHAVVLCEYSMAQFSTGDRRRQKFDRRSTELSLVIRQTMEACILTELMPHSQIDIFLQVLQADGGTRSACINAATLALADAGIPMRDLAVSCSAGYLNSTPLLDLNYVEDSAGGADVTVGILPKLDKVSLLQMDAKLPMETFETVFALASEGCKAIAERIREVLQENTKQLEYRRAA

SEQ ID NO: 100862 - protein, 202 aa, Arabidopsis thaliana
  peptide (1)..(202): Ceres Seq. ID no. 13606201
MGNTKVIAAVYGPREIQNKSQQKKNDHAVVLCEYSMAQFSTGDRRRQKFDRRSTELSLVIRQTMEACILTELMPHSQIDIFLQVLQADGGTRSACINAATLALADAGIPMRDLAVSCSAGYLNSTPLLDLNYVEDSAGGADVTVGILPKLDKVSLLQMDAKLPMETFETVFALASEGCKAIAERIREVLQENTKQLEYRRAA

SEQ ID NO: 100863 - DNA, 1227 bp, Arabidopsis thaliana
  misc_feature (1)..(1227): Ceres Seq. ID no. 13606202
  misc_feature (1)..(1227): Ortholog of  Ceres SEQ ID NO 13582619 as cited in SEQ ID NO 56520
  misc_feature (1)..(1227): Ortholog of  Ceres SEQ ID NO 14315846 as cited in SEQ ID NO 58094
  misc_feature (1)..(1227): Ortholog of  Ceres SEQ ID NO 13660872 as cited in SEQ ID NO 60830
  misc_feature (1)..(1227): Ortholog of  Ceres SEQ ID NO 12616221 as cited in SEQ ID NO 63291
cgttctattttcttctcctttttctatctttagcaatgaacatatcagtaaacggacagtcacaagtacctcctggctttaggtttcacccaaccgaggaagagctcttgaagtattacctccgcaagaaaatctctaacatcaagatcgatctcgatgttattcctgacattgatctcaacaagctcgagccttgggatattcaagagatgtgtaagattggaacgacgccgcaaaacgattggtacttttatagccataaggacaagaagtatcccaccgggactagaaccaacagagccaccacggtcggattttggaaagcgacgggacgtgacaagaccatatataccaatggtgatagaatcgggatgcgaaagacgcttgtcttctacaaaggtcgagcccctcatggtcagaaatccgattggatcatgcacgaatatagactcgacgagagtgtattaatctcctcgtgtggcgatcatgacgtcaacgtagaaacgtgtgatgtcataggaagtgacgaaggatgggtggtgtgtcgtgttttcaagaaaaataacctttgcaaaaacatgattagtagtagcccggcgagttcggtgaaaacgccgtcgttcaatgaggagactatcgagcaacttctcgaagttatggggcaatcttgtaaaggagagatagttttagaccctttcttaaaactccctaacctcgaatgccataacaacaccaccatcacgagttatcagtggttaatcgacgaccaagtcaacaactgccacgtcagcaaagttatggatcccagcttcatcactagctgggccgctttggatcggctcgttgcctcacagttaaatgggcccaactcgtattcaataccagccgttaatgagacttcacaatcaccgtatcatggactgaaccggtccggttgtaataccggtttaacaccagattactatataccggagattgatttatggaacgaggcagatttcgcgagaacgacatgccacttgttgaacggtagtggataacggaaatggaagagaggaagtgactaagtgagtgacataccaaaacattgtgtagaaagatataataatcatcataccatatatatagttgttgaaacttttacggtataaatggtcagattgtgataattacagtacgtagttatgtgatatcattacagaaaataaaagttctctatatctgtgt

SEQ ID NO: 100864 - protein, 345 aa, Arabidopsis thaliana
  peptide (1)..(345): Ceres Seq. ID no. 13606203
FYFLLLFLSLAMNISVNGQSQVPPGFRFHPTEEELLKYYLRKKISNIKIDLDVIPDIDLNKLEPWDIQEMCKIGTTPQNDWYFYSHKDKKYPTGTRTNRATTVGFWKATGRDKTIYTNGDRIGMRKTLVFYKGRAPHGQKSDWIMHEYRLDESVLISSCGDHDVNVETCDVIGSDEGWVVCRVFKKNNLCKNMISSSPASSVKTPSFNEETIEQLLEVMGQSCKGEIVLDPFLKLPNLECHNNTTITSYQWLIDDQVNNCHVSKVMDPSFITSWAALDRLVASQLNGPNSYSIPAVNETSQSPYHGLNRSGCNTGLTPDYYIPEIDLWNEADFARTTCHLLNGSG

SEQ ID NO: 100865 - protein, 334 aa, Arabidopsis thaliana
  peptide (1)..(334): Ceres Seq. ID no. 13606204
MNISVNGQSQVPPGFRFHPTEEELLKYYLRKKISNIKIDLDVIPDIDLNKLEPWDIQEMCKIGTTPQNDWYFYSHKDKKYPTGTRTNRATTVGFWKATGRDKTIYTNGDRIGMRKTLVFYKGRAPHGQKSDWIMHEYRLDESVLISSCGDHDVNVETCDVIGSDEGWVVCRVFKKNNLCKNMISSSPASSVKTPSFNEETIEQLLEVMGQSCKGEIVLDPFLKLPNLECHNNTTITSYQWLIDDQVNNCHVSKVMDPSFITSWAALDRLVASQLNGPNSYSIPAVNETSQSPYHGLNRSGCNTGLTPDYYIPEIDLWNEADFARTTCHLLNGSG

SEQ ID NO: 100866 - protein, 276 aa, Arabidopsis thaliana
  peptide (1)..(276): Ceres Seq. ID no. 13606205
MCKIGTTPQNDWYFYSHKDKKYPTGTRTNRATTVGFWKATGRDKTIYTNGDRIGMRKTLVFYKGRAPHGQKSDWIMHEYRLDESVLISSCGDHDVNVETCDVIGSDEGWVVCRVFKKNNLCKNMISSSPASSVKTPSFNEETIEQLLEVMGQSCKGEIVLDPFLKLPNLECHNNTTITSYQWLIDDQVNNCHVSKVMDPSFITSWAALDRLVASQLNGPNSYSIPAVNETSQSPYHGLNRSGCNTGLTPDYYIPEIDLWNEADFARTTCHLLNGSG

SEQ ID NO: 100867 - DNA, 1853 bp, Arabidopsis thaliana
  misc_feature (1)..(1853): Ceres Seq. ID no. 13606237
  misc_feature (1)..(1853): Ortholog of  Ceres SEQ ID NO 15169670 as cited in SEQ ID NO 62085
ccccccccccccccggcggctcctgattttagctctctctaaagctgtagttgtgcgttaaccctctaaggagcttgtaaaaatgctaatactgtttgagacgccaggtggttttgccatcttcaaagtattaaacgaaggaaagctctctaatgttgaggatttgggtaatgagttctcgaccgcaaagttagcccgaaagatggtgaagctagtagcttttgacaagtttgacaacacagctgaagctcttgaagcagtggctaaattgcttgagggaactccaagcaagggtctacgcaagtttttgaaagctaactgtgttggtgaaacattagctgttgctgattctaagcttggaaatatcatcaaggagaaactgaaaatagtctgtgttcacaacaatgctgttatggagctgttaagaggtatcagaagccagctaactgaacttatatctggattgggtgatcaagatctaggtccaatgagcttggggttgtctcacagccttgccagatataaactaaagttcagttccgacaaggtggataccatgataatccaagctattggtctgcttgatgatcttgacaaagagcttaacacttacgctatgagggttcgtgaatggtttggttggcattttcctgagcttgctaagatcgtacaggacaatatcttatatgccaaggctgttaaactaatggggaatcggattaatgctgcaaagctagacttctctgagatattggctgatgaaattgaagcagaactgaaagaggctgctgtgatatctatgggaactgaagtcagtgaccttgatttattgcacatccgagaactctgtgaccaggttctttctcttgccgagtacagagctcagctttatgactacttgaagagcagaatgaacacaattgcaccaaatctaactgcccttgtcggggagctagtcggtgctcgcttaatatctcacggtggtagtttgttgaacctcgcaaagcaacctggaagcacggttcagattcttggagctgaaaaagccttatttagagcccttaagaccaaacacgctactccaaagtatggtttaattttccatgcatctgttgttggccaagctgcaccgaagaacaagggtaaaatttcacggtcactagctgcaaaatctgttcttgctatccgttgtgatgctcttggtgactcccaagacaacactatgggagttgaaaaccgtttaaagcttgaagcacggttgagaactctcgaaggaaaagatttaggacgtctatctggctcagctaaaggcaaaccaaagattgaagtatatgacaaagataaaaagaaaggatccggaggtctgatcactcctgctaagacatacaacactgctgcagactctcttcttcaaactcccacagtggattcagagaacggtgtgaaagagaagaaagacaaaaagaagaagaagaaggctgatgatgaggaagaagccaaaactgaggagccctcaaagaagaaatcgaataagaagaagacagaagcagaacctgaaaccgccgaagagcctgcaaagaaggagaagaagaagaagagaaaacacgaggaagaggaaactgaaatgcctgctaagaagaaggaaaagagtgagaagaagaagaagaagaaaactgaggtctgaagagacctttaatatttttgcgtggtctagtttactttgttatcagaaacaaagaaaatcttttgtggcgttaggtgttaagtaaggtttttgttttgtttgaaacttaaaaaaaagaactactcttcgttttgtaaggttataatatgtttggtttagtccttatccc

SEQ ID NO: 100868 - protein, 533 aa, Arabidopsis thaliana
  peptide (1)..(533): Ceres Seq. ID no. 13606238
MLILFETPGGFAIFKVLNEGKLSNVEDLGNEFSTAKLARKMVKLVAFDKFDNTAEALEAVAKLLEGTPSKGLRKFLKANCVGETLAVADSKLGNIIKEKLKIVCVHNNAVMELLRGIRSQLTELISGLGDQDLGPMSLGLSHSLARYKLKFSSDKVDTMIIQAIGLLDDLDKELNTYAMRVREWFGWHFPELAKIVQDNILYAKAVKLMGNRINAAKLDFSEILADEIEAELKEAAVISMGTEVSDLDLLHIRELCDQVLSLAEYRAQLYDYLKSRMNTIAPNLTALVGELVGARLISHGGSLLNLAKQPGSTVQILGAEKALFRALKTKHATPKYGLIFHASVVGQAAPKNKGKISRSLAAKSVLAIRCDALGDSQDNTMGVENRLKLEARLRTLEGKDLGRLSGSAKGKPKIEVYDKDKKKGSGGLITPAKTYNTAADSLLQTPTVDSENGVKEKKDKKKKKKADDEEEAKTEEPSKKKSNKKKTEAEPETAEEPAKKEKKKKRKHEEEETEMPAKKKEKSEKKKKKKTEV

SEQ ID NO: 100869 - protein, 493 aa, Arabidopsis thaliana
  peptide (1)..(493): Ceres Seq. ID no. 13606239
MVKLVAFDKFDNTAEALEAVAKLLEGTPSKGLRKFLKANCVGETLAVADSKLGNIIKEKLKIVCVHNNAVMELLRGIRSQLTELISGLGDQDLGPMSLGLSHSLARYKLKFSSDKVDTMIIQAIGLLDDLDKELNTYAMRVREWFGWHFPELAKIVQDNILYAKAVKLMGNRINAAKLDFSEILADEIEAELKEAAVISMGTEVSDLDLLHIRELCDQVLSLAEYRAQLYDYLKSRMNTIAPNLTALVGELVGARLISHGGSLLNLAKQPGSTVQILGAEKALFRALKTKHATPKYGLIFHASVVGQAAPKNKGKISRSLAAKSVLAIRCDALGDSQDNTMGVENRLKLEARLRTLEGKDLGRLSGSAKGKPKIEVYDKDKKKGSGGLITPAKTYNTAADSLLQTPTVDSENGVKEKKDKKKKKKADDEEEAKTEEPSKKKSNKKKTEAEPETAEEPAKKEKKKKRKHEEEETEMPAKKKEKSEKKKKKKTEV

SEQ ID NO: 100870 - protein, 423 aa, Arabidopsis thaliana
  peptide (1)..(423): Ceres Seq. ID no. 13606240
MELLRGIRSQLTELISGLGDQDLGPMSLGLSHSLARYKLKFSSDKVDTMIIQAIGLLDDLDKELNTYAMRVREWFGWHFPELAKIVQDNILYAKAVKLMGNRINAAKLDFSEILADEIEAELKEAAVISMGTEVSDLDLLHIRELCDQVLSLAEYRAQLYDYLKSRMNTIAPNLTALVGELVGARLISHGGSLLNLAKQPGSTVQILGAEKALFRALKTKHATPKYGLIFHASVVGQAAPKNKGKISRSLAAKSVLAIRCDALGDSQDNTMGVENRLKLEARLRTLEGKDLGRLSGSAKGKPKIEVYDKDKKKGSGGLITPAKTYNTAADSLLQTPTVDSENGVKEKKDKKKKKKADDEEEAKTEEPSKKKSNKKKTEAEPETAEEPAKKEKKKKRKHEEEETEMPAKKKEKSEKKKKKKTEV

SEQ ID NO: 100871 - DNA, 1501 bp, Arabidopsis thaliana
  misc_feature (1)..(1501): Ceres Seq. ID no. 13606241
  misc_feature (1)..(1501): Ortholog of  Ceres SEQ ID NO 12609045 as cited in SEQ ID NO 51314
  misc_feature (1)..(1501): Ortholog of  Ceres SEQ ID NO 13595877 as cited in SEQ ID NO 67702
  misc_feature (1)..(1501): Ortholog of  Ceres SEQ ID NO 13654367 as cited in SEQ ID NO 67993
  misc_feature (1)..(1501): Ortholog of  Ceres SEQ ID NO 13622667 as cited in SEQ ID NO 0
aaaaaaaaaaaaactttactcatcgagactcgtttagtgattcgaaatttcccttctcggctcaaatcttcgatctgggctttcgtgtctttttgcgttttgattggtaataaaaagaagctttttaaaaactttttccatggctggaagtgaagaagttaatcttattgagagcaagacagtggttcctctcaatacatgggttctaatatccaactttaagctagcttacaatctcctgcgtcgccctgacggaacttttaaccgtcatctcgcagagtttctagaccggaaagtccctgcaaatgccaaccctgttaatggggtcttctcttttgatgtgatcatcgatcgccaaactaatttgcttagcagagtttacagaccagctgatgctggcacttcaccaagtattactgatctacagaatcctgttgatggtgaaatagtgcctgttattgtcttctttcatggtggaagctttgcacattcttctgcaaacagtgctatttatgatactctttgtcgtaggcttgttggtttgtgtggtgctgttgttgtctctgtgaattatcgtcgtgcaccagagaatcgatacccttgtgcttatgatgatggatgggctgttttgaaatgggtcaactcgagttcttggcttagaagcaagaaagactcaaaggttcgtattttcttggcgggtgatagctctgggggtaacattgtgcataatgtcgcggtaagagcggttgagtcaaggatcgatgttttggggaacattttgcttaaccctatgtttggagggaccgaaagaacggaatctgagaaacgtttggatgggaagtactttgttacggttagagaccgagattggtattggagagcgtttcttcctgagggtgaagacagagagcatccagcgtgtagcccgtttggcccgagaagcaagagtctagaagggttgagtttccccaagagtcttgtcgttgtagcgggtttagatttgattcaagattggcaattgaagtacgcggaagggctcaagaaagcgggtcaagaggtgaagcttctttacttggagcaagccactattggcttctacttattgcctaacaacaatcacttccataccgttatggatgagatagctgcatttgtaaacgcagaatgccaatgagaacactcttatctctcactgtaatctcttcactaacaaacgggtgatatccaccatggaaggtgaaagcccgagattctcgttttagaagctctttgtagtgagtcaaaagaacggcgtttaactactaccgcggtggtggtggctgcgtccgcgtttgtgaaccgtccaaagctggattctgaaagcaaagcaggaagaagaacagtgtagtcggtaattatgtttggctttctagcgttagcttttgactttaactagagctgagttttttcagcttgtggttaatagtaactttggttatgttactattatgatattttcggt

SEQ ID NO: 100872 - protein, 344 aa, Arabidopsis thaliana
  peptide (1)..(344): Ceres Seq. ID no. 13606242
MAGSEEVNLIESKTVVPLNTWVLISNFKLAYNLLRRPDGTFNRHLAEFLDRKVPANANPVNGVFSFDVIIDRQTNLLSRVYRPADAGTSPSITDLQNPVDGEIVPVIVFFHGGSFAHSSANSAIYDTLCRRLVGLCGAVVVSVNYRRAPENRYPCAYDDGWAVLKWVNSSSWLRSKKDSKVRIFLAGDSSGGNIVHNVAVRAVESRIDVLGNILLNPMFGGTERTESEKRLDGKYFVTVRDRDWYWRAFLPEGEDREHPACSPFGPRSKSLEGLSFPKSLVVVAGLDLIQDWQLKYAEGLKKAGQEVKLLYLEQATIGFYLLPNNNHFHTVMDEIAAFVNAECQ

SEQ ID NO: 100873 - DNA, 2313 bp, Arabidopsis thaliana
  misc_feature (1)..(2313): Ceres Seq. ID no. 13606243
  misc_feature (1)..(2313): Ortholog of  Ceres SEQ ID NO 13597706 as cited in SEQ ID NO 65326
atggaatttgcttcgccggaacaacgtcgtctcgaaaccattcgatctcacatcgatacttctccgaccaacgatcaatcatcatctctattcctcaacgccaccgcttcttctgcttcacctttctttaaagaggatagctacagtgttgtgcttccagaaaagcttgatactggaaaatggaatgtctacagatctaaaagatcgcctacgaaactcgttagtaggttcccggatcatcctgaaatcgggactttacatgacaattttgtacatgctgttgaaacatatgctgaaaacaagtatcttggtacacgagttcggtccgatggaaccattggagagtattcatggatgacatatggagaagcagcgtctgagcgacaagccattggttcaggactcttgtttcatggagttaaccaaggagattgcgttggactctattttattaacagaccagagtggttggttgtggatcatgcttgtgcagcatattcatttgtctctgttcctttatatgatacacttggtccagacgctgttaagtttgtggtgaatcatgctaatctgcaagctatattttgtgtaccacaaaccttgaatattttgctaagcttcctagcggaaatcccatccattcgtctcattgtggtggtgggaggggctgatgagcatttgccatcacttcctcgaggaactggagtcacaattgtatcataccaaaagctattgagtcagggtcgaagtagcttacatccattttcgcctccaaagccagaagacattgcaaccatatgctacacaagtggaaccacaggaacaccaaagggtgttgtgttgactcatggaaacttgatcgcgaatgtcgctggttccagtgtggaagcagaattctttccttcagatgtttacatatcatatcttcctttggcgcacatatatgaacgtgcaaatcagattatgggggtgtatggtggtgttgctgtcggtttctatcagggggatgtcttcaagctgatggatgattttgctgtgttaagaccaacaatattctgtagtgtccctcgcttatataatcgaatatatgatggcattacaagtgccgtaaaatcatctggggttgtgaaaaaaaggcttttcgaaattgcctataactcaaagaagcaagcgatcattaatgggcggactccttctgcattttgggacaagctggtgttcaacaaaataaaagaaaagcttggtggacgggttcggtttatggggtctggtgcttctcctttgtcacctgatgtcatggatttcttgagaatatgctttggatgttcggtgcgtgaagggtatggtatgaccgagacttcttgtgtcataagtgctatggatgatggtgacaatttatctggccatgtcggttcccctaatccagcttgcgaggtaaaacttgtggatgttcccgaaatgaattacacatcagacgatcaaccatacccacgtggtgaaatctgtgtaagaggaccaatcatcttcaaaggctactacaaagatgaagaacaaacgagagaaattcttgatggagatggctggctacacacaggagatatcgggttgtggttacctggtggtcggctcaagatcatagacaggaagaagaacatatttaagttggcgcaaggagaatatatagcaccagagaagatcgaaaatgtttataccaaatgtagattcgtttcgcagtgtttcattcacggtgatagcttcaattcctctctagtagctatagtttcagtcgaccccgaagttatgaaagattgggctgcatcagaaggcatcaagtatgagcatctaggacagctctgtaacgatccaagagtgcgaaagactgttcttgctgagatggatgaccttggaagagaagctcagttgagagggtttgagtttgcaaaggctgtgactttggtgccagaaccattcaccttggagaatggacttctcacaccaacattcaagataaagagacctcaagcaaaagcctactttgcagaagcaattagcaaaatgtatgcggaaatcgcagcctcgaaccccattccttctaaactgtgatgctttttgctttgcttaaaagtgtttctttttttttgtattacaaaggtaattgtagaactgttaaaagatcggattaggatgaggtagatcgatcatttgaaataaaacagattcatggtgtaattttctttgatactgttttccagaataaaggaagcagactatgtcctaatcctgaaatggatgatgagtgtggtcataagttcg

SEQ ID NO: 100874 - protein, 700 aa, Arabidopsis thaliana
  peptide (1)..(700): Ceres Seq. ID no. 13606244
MEFASPEQRRLETIRSHIDTSPTNDQSSSLFLNATASSASPFFKEDSYSVVLPEKLDTGKWNVYRSKRSPTKLVSRFPDHPEIGTLHDNFVHAVETYAENKYLGTRVRSDGTIGEYSWMTYGEAASERQAIGSGLLFHGVNQGDCVGLYFINRPEWLVVDHACAAYSFVSVPLYDTLGPDAVKFVVNHANLQAIFCVPQTLNILLSFLAEIPSIRLIVVVGGADEHLPSLPRGTGVTIVSYQKLLSQGRSSLHPFSPPKPEDIATICYTSGTTGTPKGVVLTHGNLIANVAGSSVEAEFFPSDVYISYLPLAHIYERANQIMGVYGGVAVGFYQGDVFKLMDDFAVLRPTIFCSVPRLYNRIYDGITSAVKSSGVVKKRLFEIAYNSKKQAIINGRTPSAFWDKLVFNKIKEKLGGRVRFMGSGASPLSPDVMDFLRICFGCSVREGYGMTETSCVISAMDDGDNLSGHVGSPNPACEVKLVDVPEMNYTSDDQPYPRGEICVRGPIIFKGYYKDEEQTREILDGDGWLHTGDIGLWLPGGRLKIIDRKKNIFKLAQGEYIAPEKIENVYTKCRFVSQCFIHGDSFNSSLVAIVSVDPEVMKDWAASEGIKYEHLGQLCNDPRVRKTVLAEMDDLGREAQLRGFEFAKAVTLVPEPFTLENGLLTPTFKIKRPQAKAYFAEAISKMYAEIAASNPIPSKL

SEQ ID NO: 100875 - protein, 582 aa, Arabidopsis thaliana
  peptide (1)..(582): Ceres Seq. ID no. 13606245
MTYGEAASERQAIGSGLLFHGVNQGDCVGLYFINRPEWLVVDHACAAYSFVSVPLYDTLGPDAVKFVVNHANLQAIFCVPQTLNILLSFLAEIPSIRLIVVVGGADEHLPSLPRGTGVTIVSYQKLLSQGRSSLHPFSPPKPEDIATICYTSGTTGTPKGVVLTHGNLIANVAGSSVEAEFFPSDVYISYLPLAHIYERANQIMGVYGGVAVGFYQGDVFKLMDDFAVLRPTIFCSVPRLYNRIYDGITSAVKSSGVVKKRLFEIAYNSKKQAIINGRTPSAFWDKLVFNKIKEKLGGRVRFMGSGASPLSPDVMDFLRICFGCSVREGYGMTETSCVISAMDDGDNLSGHVGSPNPACEVKLVDVPEMNYTSDDQPYPRGEICVRGPIIFKGYYKDEEQTREILDGDGWLHTGDIGLWLPGGRLKIIDRKKNIFKLAQGEYIAPEKIENVYTKCRFVSQCFIHGDSFNSSLVAIVSVDPEVMKDWAASEGIKYEHLGQLCNDPRVRKTVLAEMDDLGREAQLRGFEFAKAVTLVPEPFTLENGLLTPTFKIKRPQAKAYFAEAISKMYAEIAASNPIPSKL

SEQ ID NO: 100876 - protein, 379 aa, Arabidopsis thaliana
  peptide (1)..(379): Ceres Seq. ID no. 13606246
MGVYGGVAVGFYQGDVFKLMDDFAVLRPTIFCSVPRLYNRIYDGITSAVKSSGVVKKRLFEIAYNSKKQAIINGRTPSAFWDKLVFNKIKEKLGGRVRFMGSGASPLSPDVMDFLRICFGCSVREGYGMTETSCVISAMDDGDNLSGHVGSPNPACEVKLVDVPEMNYTSDDQPYPRGEICVRGPIIFKGYYKDEEQTREILDGDGWLHTGDIGLWLPGGRLKIIDRKKNIFKLAQGEYIAPEKIENVYTKCRFVSQCFIHGDSFNSSLVAIVSVDPEVMKDWAASEGIKYEHLGQLCNDPRVRKTVLAEMDDLGREAQLRGFEFAKAVTLVPEPFTLENGLLTPTFKIKRPQAKAYFAEAISKMYAEIAASNPIPSKL

SEQ ID NO: 100877 - DNA, 851 bp, Arabidopsis thaliana
  misc_feature (1)..(851): Ceres Seq. ID no. 13606251
  misc_feature (1)..(851): Ortholog of  Ceres SEQ ID NO 12627109 as cited in SEQ ID NO 66391
accgattcattagaaatccatccctctcactgtcaaaacccgagaagcagaaaaaagcaaaaaacagatttcgaagtttcgacgcctctctattcttcgatctctttcatatttgaatcgttcaccttcttgccgatcttcggagtatattacaaggttcttaacggatctctaaatcttctgatttaagaagatgcttcctctatcgctgcttaaaactgctcaagggcatcctatgctcgtggagcttaagaatggagagacatacaatgggcatttggtgaattgtgatacttggatgaacatccatctgcgtgaagtcatatgtacatcaaaggacggagatagattttggaggatgccggaatgttatatccgtggtaacacaatcaagtaccttcgagttccggatgaggtgattgataaagtacaggaggagaagacacgcacagatagaaaaccaccaggtgttggacgtggaagaggacgtggtgtggatgatggaggagccagaggcagaggcagaggaacttcaatggggaagatgggtggcaacagaggagcaggtcgcggccgtggttgatgcaacaagttttaaagactcgctgccaaatctgctaacttcccattgtggagaaaaccaaaagttacataagaagttggtctgttgttggttttctattaagtatgtaagggatagggagtgtgtttttcgattctccttgtgatcttttcgaaaaatgaaatttgtcttttgcctttttgtggtatatgtgaaattccaattgttttcatttgcgcttaaaaatgaatctttcaggtcttgaatttatataattgttagagaattt

SEQ ID NO: 100878 - protein, 129 aa, Arabidopsis thaliana
  peptide (1)..(129): Ceres Seq. ID no. 13606252
MLPLSLLKTAQGHPMLVELKNGETYNGHLVNCDTWMNIHLREVICTSKDGDRFWRMPECYIRGNTIKYLRVPDEVIDKVQEEKTRTDRKPPGVGRGRGRGVDDGGARGRGRGTSMGKMGGNRGAGRGRG

SEQ ID NO: 100879 - protein, 115 aa, Arabidopsis thaliana; identical to SEQ ID NO: 24997
  peptide (1)..(115): Ceres Seq. ID no. 13606253

SEQ ID NO: 100880 - protein, 94 aa, Arabidopsis thaliana; identical to SEQ ID NO: 24998
  peptide (1)..(94): Ceres Seq. ID no. 13606254

SEQ ID NO: 100881 - DNA, 1871 bp, Arabidopsis thaliana
  misc_feature (1)..(1871): Ceres Seq. ID no. 13606271
  misc_feature (1)..(1871): Ortholog of  Ceres SEQ ID NO 13596198 as cited in SEQ ID NO 68488
acagactacaatggacgtaactgctatcttcgccggtgatattttggtgcaatccagagagtatcttatccctaatgatgttgtggatgttgatggtggtattaaagcggtaagaccaccaataattcagccccctccgggaagaaaactacctcttattgactttccaggatcatcgtgggatttccttacgtattttgctccaagtaaaacagttaagcggcagagttcctcctcttctgataatacctctgataaagaggaagttgaaacggaagagacgcgaggtatgtttgtccagttgggggatacggctcatgaggcatgcccattcgctacaaacgaggctgactcctccagtacagtatccattatttcgccgagttatgcctctagaggttctatcgtcccttcttggctgaagaggaaatttctgggacgagtatcattaggttttgtgtatgaaggcagttcaggttcctccgttggttccgagtcgacttgttccttgatgacgccttctctggagttcccggatcgcatcagtttccggaaaaaggatttcagtgaaaaaggtcctagtcgacacgtttgggaaaagcgtaaattgacgcgtgccaagttgattgaaaatttttgcaatccggaggacattgaaccagtcacatcttggctgaagggtcaacttctaggagaagaatcatttgcctctgtgtatgaagccatttcagattcctctgttggttccgagtcgacttgttccttgatgacgccttctatggagttcccggatcgcatcagtttccgaaaaagggatttcagcgaagaaggtcctagtggacgtgttaaggaaaagcgtaaattgatgcgtaacaagttgattgagaattttcgtaagcctgaggatatcacgtcttggctgaagggtcaacttctaggacgaggatcatatgcctctgtgtatgaagccatttcagaagatggggacttctttgctgtcaaggaagtttcacttcttgataagggaattcaggcacaagaatgcattcaacaacttgagggggagattgcactacttagtcagcttcagcatcagaatattgtgcgatatcgtggcacagccaaggacgtgtcaaaattgtacatctttcttgagcttgtaacccaaggatccgttcaaaaactctacgaaagataccaacttagctacacagtagtctccttgtatacaagacaaattcttgctgggttgaattatctccacgataaaggctttgttcacagggacattaaatgtgcaaatatgttggtggacgctaatggcaccgtcaaacttgcagattttggattggcagaggcgtcaaagttcaacgacattatgtcttgcaagggaacattattttggatggctccggaggttattaaccgaaaggatagtgatggcaatggaagtccagctgatatatggagccttgggtgcactgtgctggaaatgtgtactggtcagatcccctactccgatctaaaacccattcaagccgcgtttaagattggaaggggtacgcttccagacgtacctgatactttatcactagacgctcggcatttcatacttacgtgtctcaaagtgaacccggaagagcggccaactgcagctgaactgctgcaccatccatttgttataaatctttgattcttacgctgaaacaatcaaactatgcaatagtatggcgaaaaccatttctttgattctggtcaaagccaagttaattgaagtgtgaagtgtctatataattcaacttgtttcccgttgaagagttatcgcaatgatggatttataaaacttattcgaaaggttttcgactccgtac

SEQ ID NO: 100882 - protein, 563 aa, Arabidopsis thaliana
  peptide (1)..(563): Ceres Seq. ID no. 13606272
QTTMDVTAIFAGDILVQSREYLIPNDVVDVDGGIKAVRPPIIQPPPGRKLPLIDFPGSSWDFLTYFAPSKTVKRQSSSSSDNTSDKEEVETEETRGMFVQLGDTAHEACPFATNEADSSSTVSIISPSYASRGSIVPSWLKRKFLGRVSLGFVYEGSSGSSVGSESTCSLMTPSLEFPDRISFRKKDFSEKGPSRHVWEKRKLTRAKLIENFCNPEDIEPVTSWLKGQLLGEESFASVYEAISDSSVGSESTCSLMTPSMEFPDRISFRKRDFSEEGPSGRVKEKRKLMRNKLIENFRKPEDITSWLKGQLLGRGSYASVYEAISEDGDFFAVKEVSLLDKGIQAQECIQQLEGEIALLSQLQHQNIVRYRGTAKDVSKLYIFLELVTQGSVQKLYERYQLSYTVVSLYTRQILAGLNYLHDKGFVHRDIKCANMLVDANGTVKLADFGLAEASKFNDIMSCKGTLFWMAPEVINRKDSDGNGSPADIWSLGCTVLEMCTGQIPYSDLKPIQAAFKIGRGTLPDVPDTLSLDARHFILTCLKVNPEERPTAAELLHHPFVINL

SEQ ID NO: 100883 - protein, 560 aa, Arabidopsis thaliana
  peptide (1)..(560): Ceres Seq. ID no. 13606273
MDVTAIFAGDILVQSREYLIPNDVVDVDGGIKAVRPPIIQPPPGRKLPLIDFPGSSWDFLTYFAPSKTVKRQSSSSSDNTSDKEEVETEETRGMFVQLGDTAHEACPFATNEADSSSTVSIISPSYASRGSIVPSWLKRKFLGRVSLGFVYEGSSGSSVGSESTCSLMTPSLEFPDRISFRKKDFSEKGPSRHVWEKRKLTRAKLIENFCNPEDIEPVTSWLKGQLLGEESFASVYEAISDSSVGSESTCSLMTPSMEFPDRISFRKRDFSEEGPSGRVKEKRKLMRNKLIENFRKPEDITSWLKGQLLGRGSYASVYEAISEDGDFFAVKEVSLLDKGIQAQECIQQLEGEIALLSQLQHQNIVRYRGTAKDVSKLYIFLELVTQGSVQKLYERYQLSYTVVSLYTRQILAGLNYLHDKGFVHRDIKCANMLVDANGTVKLADFGLAEASKFNDIMSCKGTLFWMAPEVINRKDSDGNGSPADIWSLGCTVLEMCTGQIPYSDLKPIQAAFKIGRGTLPDVPDTLSLDARHFILTCLKVNPEERPTAAELLHHPFVINL

SEQ ID NO: 100884 - protein, 467 aa, Arabidopsis thaliana
  peptide (1)..(467): Ceres Seq. ID no. 13606274
MFVQLGDTAHEACPFATNEADSSSTVSIISPSYASRGSIVPSWLKRKFLGRVSLGFVYEGSSGSSVGSESTCSLMTPSLEFPDRISFRKKDFSEKGPSRHVWEKRKLTRAKLIENFCNPEDIEPVTSWLKGQLLGEESFASVYEAISDSSVGSESTCSLMTPSMEFPDRISFRKRDFSEEGPSGRVKEKRKLMRNKLIENFRKPEDITSWLKGQLLGRGSYASVYEAISEDGDFFAVKEVSLLDKGIQAQECIQQLEGEIALLSQLQHQNIVRYRGTAKDVSKLYIFLELVTQGSVQKLYERYQLSYTVVSLYTRQILAGLNYLHDKGFVHRDIKCANMLVDANGTVKLADFGLAEASKFNDIMSCKGTLFWMAPEVINRKDSDGNGSPADIWSLGCTVLEMCTGQIPYSDLKPIQAAFKIGRGTLPDVPDTLSLDARHFILTCLKVNPEERPTAAELLHHPFVINL

SEQ ID NO: 100885 - DNA, 1748 bp, Arabidopsis thaliana
  misc_feature (1)..(1748): Ceres Seq. ID no. 13606275
  misc_feature (1)..(1748): Ortholog of  Ceres SEQ ID NO 15178246 as cited in SEQ ID NO 52038
aacactcctttatagcttttctccgcctcaactttttgcttcttctctctcgatttgctctcacggaagattcttcagaatatctgatccgatatcagaagccccaagttcgcttgaattccgtctgagcaatggctttggtcttgcacacgtacaagggaaacaaaagtgctgagaaggcactcattgcagcagagtacgttggtgtgcagatcgatgtgccctctgactttcagatgggtgtcactaacaaaacccctgcgttcctcaagatgaaccctattggaaaggttcctgtacttgagactcccgagggttcagtatttgaaagcaacgcaattgcccgttatgtaagccgattgaatggtgacaactctttgaacggatcctccctgatcgaatatgcacaaattgagcaatggattgatttctcttcattggagatctatgcaagtatcttgaggtggttcggcccaagaatgggctttatgccatacagtgctccggctgaagaaggtgcgatctctacgttgaagagagcacttgatgctctgaacacacatctcacgtctaacacttaccttgtcggacactctattacccttgctgatatcatcactgtctgcaacttgaacttgggatttgctactgtcatgaccaagaaatttacctctgaatttcctcatgttgagaggtacttctggactgtggttaaccaaccaaacttcactaaagtgttgggtgatgtcaaacagactgaagctgtccctcctattgcttccaagaaagctgcccagcctgcaaagcccaaagaagagcctaagaaaaaggaagccccagtagcagaggcacctaagcttgctgaagaggaagaggcaccaaagcccaaagccaagaaccctcttgacttgctaccaccaagccctatggttctagatgattggaagaggctttactcaaacaccaaatctaacttccgcgaggttgctattaaaggattctgggacatgtatgacccagagggatactcactatggttctgtgactacaagtacaacgatgagaacatggtgtcatttgtcacgctcaacaaggttggtgggttccttcagcgtatggacttggcacgtaaatactcctttggaaagatgctgatttgtgggtcagagggtccgttcaaggtgaagggtttatggctgttccgtggaccagagatcccaaagttcataatggacgaggtgtacgacatggagctgtatgagtggactaaggttgatatctcagatgaagcccagaaggagcgtgttagccagatgattgaagacgcagagccatttgaaggtgaggctctcttggacgccaagtgcttcaagtgagaagagagaatggtttggtacttccatttacaggttttgcagctggggctttacatatctttctatctgtctgtctcacataggggttttgctctgtgacgtgtcgcatagactgtttttttcttttctaatcgagtgtcaaggacaagtctttttagttctttgttaatgtttcgcctccgtccagaattgtttactataccagttttcgaaatcctgaccggccagtctaccctggcaataggcaatacatggtctggtttatttgttttacggtaattttgccttgattgattttctttgacgcgtttcggtcaacttatatacattggtctttgagttgaacatttagtggtaaagtctttttggcac

SEQ ID NO: 100886 - protein, 414 aa, Arabidopsis thaliana
  peptide (1)..(414): Ceres Seq. ID no. 13606276
MALVLHTYKGNKSAEKALIAAEYVGVQIDVPSDFQMGVTNKTPAFLKMNPIGKVPVLETPEGSVFESNAIARYVSRLNGDNSLNGSSLIEYAQIEQWIDFSSLEIYASILRWFGPRMGFMPYSAPAEEGAISTLKRALDALNTHLTSNTYLVGHSITLADIITVCNLNLGFATVMTKKFTSEFPHVERYFWTVVNQPNFTKVLGDVKQTEAVPPIASKKAAQPAKPKEEPKKKEAPVAEAPKLAEEEEAPKPKAKNPLDLLPPSPMVLDDWKRLYSNTKSNFREVAIKGFWDMYDPEGYSLWFCDYKYNDENMVSFVTLNKVGGFLQRMDLARKYSFGKMLICGSEGPFKVKGLWLFRGPEIPKFIMDEVYDMELYEWTKVDISDEAQKERVSQMIEDAEPFEGEALLDAKCFK

SEQ ID NO: 100887 - protein, 379 aa, Arabidopsis thaliana; identical to SEQ ID NO: 24982
  peptide (1)..(379): Ceres Seq. ID no. 13606277

SEQ ID NO: 100888 - protein, 367 aa, Arabidopsis thaliana; identical to SEQ ID NO: 24983
  peptide (1)..(367): Ceres Seq. ID no. 13606278

SEQ ID NO: 100889 - DNA, 1287 bp, Arabidopsis thaliana
  misc_feature (1)..(1287): Ceres Seq. ID no. 13606300
  misc_feature (1)..(1287): Ortholog of  Ceres SEQ ID NO 14308359 as cited in SEQ ID NO 55097
  misc_feature (1)..(1287): Ortholog of  Ceres SEQ ID NO 15169195 as cited in SEQ ID NO 55200
  misc_feature (1)..(1287): Ortholog of  Ceres SEQ ID NO 13581611 as cited in SEQ ID NO 59028
  misc_feature (1)..(1287): Ortholog of  Ceres SEQ ID NO 13596689 as cited in SEQ ID NO 62728
  misc_feature (1)..(1287): Ortholog of  Ceres SEQ ID NO 14302142 as cited in SEQ ID NO 0
atgggtggtgagagtaatgaaggaggagagatgggctttaagcatggagatgatgagagtggtgggatctctagagttggaattacatcaatgcccttgtatgcaaaggcagatcctttcttctcttctgcagattgggatccagttgtcaatgctgctgctgctggcttctccagctctcattaccatccttccatggcgatggataatccagggatgagttgcttctctcattaccaacccggttctgtttccggttttgcagcagacatgcctgctagtcttcttccgtttggtgattgtggtggtggtcaaattggtcattttcttggttcagacaagaaaggggaaagattgatcagagctggagaatcatctcatgaggatcatcatcaggtttcagatgatgctgttcttggtgcttccccagttgggaaaagaaggctacctgaagccgaatcacaatggaacaagaaagctgtggaggaatttcaagaagaccctcaaaggggaaatgatcagagccagaagaagcataaaaatgatcagagtaaagagacggtgaacaaggagagctcacaaagtgaagaagcaccgaaagaaaactacattcatatgagggcaagaagaggtcaagccactaatagtcacagtcttgcagagcgggttagaagagaaaagatcagtgaaaggatgagattgcttcaagaacttgttcccggatgcaacaagatcaccggaaaagcggttatgctcgatgaaataatcaactatgttcagtcattgcaacagcaagttgagtttttgtctatgaaacttgcgacggtgaatccagagatcaatattgatatagacaggattctcgccaaagatcttctgcagtcaagagacagaaacactcctacactcgggctgaatccttttgccggttttcaagggaacataccaaacctttctgccaccacaaatccacaatacaacccactacctcagacaacactagagagtgaactacaaaacctttaccagatgggattcgtctcaaatccatcgactatgtccagtttctcacctaatggtcgattgaaacctgagctctagtacttcaaggacacggaaaatttgcagggagtttgtatagaagatggctttggttctaagtatcatatgtgttcgttcttccatattatttgttctaagcacaaggatttggattctcagttgttgttgtttttgcttttcctcaacgaagaatacatttattatatatggaaatcagatttatct

SEQ ID NO: 100890 - protein, 366 aa, Arabidopsis thaliana
  peptide (1)..(366): Ceres Seq. ID no. 13606301
MGGESNEGGEMGFKHGDDESGGISRVGITSMPLYAKADPFFSSADWDPVVNAAAAGFSSSHYHPSMAMDNPGMSCFSHYQPGSVSGFAADMPASLLPFGDCGGGQIGHFLGSDKKGERLIRAGESSHEDHHQVSDDAVLGASPVGKRRLPEAESQWNKKAVEEFQEDPQRGNDQSQKKHKNDQSKETVNKESSQSEEAPKENYIHMRARRGQATNSHSLAERVRREKISERMRLLQELVPGCNKITGKAVMLDEIINYVQSLQQQVEFLSMKLATVNPEINIDIDRILAKDLLQSRDRNTPTLGLNPFAGFQGNIPNLSATTNPQYNPLPQTTLESELQNLYQMGFVSNPSTMSSFSPNGRLKPEL

SEQ ID NO: 100891 - protein, 356 aa, Arabidopsis thaliana
  peptide (1)..(356): Ceres Seq. ID no. 13606302
MGFKHGDDESGGISRVGITSMPLYAKADPFFSSADWDPVVNAAAAGFSSSHYHPSMAMDNPGMSCFSHYQPGSVSGFAADMPASLLPFGDCGGGQIGHFLGSDKKGERLIRAGESSHEDHHQVSDDAVLGASPVGKRRLPEAESQWNKKAVEEFQEDPQRGNDQSQKKHKNDQSKETVNKESSQSEEAPKENYIHMRARRGQATNSHSLAERVRREKISERMRLLQELVPGCNKITGKAVMLDEIINYVQSLQQQVEFLSMKLATVNPEINIDIDRILAKDLLQSRDRNTPTLGLNPFAGFQGNIPNLSATTNPQYNPLPQTTLESELQNLYQMGFVSNPSTMSSFSPNGRLKPEL

SEQ ID NO: 100892 - protein, 336 aa, Arabidopsis thaliana
  peptide (1)..(336): Ceres Seq. ID no. 13606303
MPLYAKADPFFSSADWDPVVNAAAAGFSSSHYHPSMAMDNPGMSCFSHYQPGSVSGFAADMPASLLPFGDCGGGQIGHFLGSDKKGERLIRAGESSHEDHHQVSDDAVLGASPVGKRRLPEAESQWNKKAVEEFQEDPQRGNDQSQKKHKNDQSKETVNKESSQSEEAPKENYIHMRARRGQATNSHSLAERVRREKISERMRLLQELVPGCNKITGKAVMLDEIINYVQSLQQQVEFLSMKLATVNPEINIDIDRILAKDLLQSRDRNTPTLGLNPFAGFQGNIPNLSATTNPQYNPLPQTTLESELQNLYQMGFVSNPSTMSSFSPNGRLKPEL

SEQ ID NO: 100893 - DNA, 1620 bp, Arabidopsis thaliana
  misc_feature (1)..(1620): Ceres Seq. ID no. 13606304
  misc_feature (1)..(1620): Ortholog of  Ceres SEQ ID NO 12625831 as cited in SEQ ID NO 65139
attcatgttattatggtcaacaacagaatctgaatcccatttccccattttcggatcacaataactaacaaaccctagatttctatctatagtccttcgatctgtttctgtgtctccttaaagctgtgatttttgcaattggggtttgtgagattcgatcaattaattgtgtttgttgaatggaccttcttcgattgagagaaaagggtatatttttatctcagagaagaaggaaatggctgatttttatggcgatctctggagtttctggctatggagcttacaaggtttatcatttgccatctgttgccagaaaaaggaagcgtctttttaagcttttcggagccattgtctctgtagctgaattgatctctgattcagctgagaccttaagtatggtatcacgagacgtgaaggattttctcaattcagattcagatgaaatccctaacagcttgaagcagatcgcgaagatcacaacttcgaatgagtttacggattcgctttctagggtttctcaggctgtgactattggtgcctttcgtgggtacaaatccgaatcgtctattggtgattcaggaattgagaaatcatcagactcgagtgttgttgatagagtgattgataaggttttctcagaggctggaactggttttgtttcagttgttgttggtagctttgctaagaatcttgttcttggattttactctggtaaggtagagagtggtgtgaaatgtgagggttctgattcttctgagacacctagatgggtgactttgcttggtgatgacaagtgtagagagcttttagctgattgtattgagagattcaccagcactgcaattggtgtgtatcttgacaagacgatggatatcaatacttatgatcaaatctttgaaggcttgacgaatccgaaacatcaggatagtgtcaaggacgttcttgtttcggtttgtaacggtgctctcgagactattgttaggacatctcacgacgtgtttacatcttcaaggtctaagaatgtgatagaagagatcgaagatgatgatttcaagagtaatggttccgcgagaagcaagatggtttcggaatcaggagatggggtcaagagtaatgggtggactgaggctattgcaactacattggcagttccgagcaatcggaggtttatgtttgatgtaacaggaagagtaacactagaaacgacgagatcaatcatcgcatttataatggtgaagacatttcaagggttcagaaaaagtatcaatgtggttcatgaagaggttacagacagaggacgccaagcagttgaatatgttggagccaaatcttctgttataatcactgtatgccttgcgttgtacttgcacatcataagcggctgtgttcggaattctcccataggcgtaagccagcatttttagttcttcagatgaagaagagatcatcgatttggttggatataggataatatttgttaggtacacaagatttatcagctcgttgtttatagttggagctgagaatattgtaaagattgtgtgcgtgtattagcacaacttgattcttattgatggatcatggatcttatatatatatacatattgaaaaggttcttgg

SEQ ID NO: 100894 - protein, 414 aa, Arabidopsis thaliana
  peptide (1)..(414): Ceres Seq. ID no. 13606305
MDLLRLREKGIFLSQRRRKWLIFMAISGVSGYGAYKVYHLPSVARKRKRLFKLFGAIVSVAELISDSAETLSMVSRDVKDFLNSDSDEIPNSLKQIAKITTSNEFTDSLSRVSQAVTIGAFRGYKSESSIGDSGIEKSSDSSVVDRVIDKVFSEAGTGFVSVVVGSFAKNLVLGFYSGKVESGVKCEGSDSSETPRWVTLLGDDKCRELLADCIERFTSTAIGVYLDKTMDINTYDQIFEGLTNPKHQDSVKDVLVSVCNGALETIVRTSHDVFTSSRSKNVIEEIEDDDFKSNGSARSKMVSESGDGVKSNGWTEAIATTLAVPSNRRFMFDVTGRVTLETTRSIIAFIMVKTFQGFRKSINVVHEEVTDRGRQAVEYVGAKSSVIITVCLALYLHIISGCVRNSPIGVSQHF

SEQ ID NO: 100895 - protein, 391 aa, Arabidopsis thaliana
  peptide (1)..(391): Ceres Seq. ID no. 13606306
MAISGVSGYGAYKVYHLPSVARKRKRLFKLFGAIVSVAELISDSAETLSMVSRDVKDFLNSDSDEIPNSLKQIAKITTSNEFTDSLSRVSQAVTIGAFRGYKSESSIGDSGIEKSSDSSVVDRVIDKVFSEAGTGFVSVVVGSFAKNLVLGFYSGKVESGVKCEGSDSSETPRWVTLLGDDKCRELLADCIERFTSTAIGVYLDKTMDINTYDQIFEGLTNPKHQDSVKDVLVSVCNGALETIVRTSHDVFTSSRSKNVIEEIEDDDFKSNGSARSKMVSESGDGVKSNGWTEAIATTLAVPSNRRFMFDVTGRVTLETTRSIIAFIMVKTFQGFRKSINVVHEEVTDRGRQAVEYVGAKSSVIITVCLALYLHIISGCVRNSPIGVSQHF

SEQ ID NO: 100896 - protein, 342 aa, Arabidopsis thaliana
  peptide (1)..(342): Ceres Seq. ID no. 13606307
MVSRDVKDFLNSDSDEIPNSLKQIAKITTSNEFTDSLSRVSQAVTIGAFRGYKSESSIGDSGIEKSSDSSVVDRVIDKVFSEAGTGFVSVVVGSFAKNLVLGFYSGKVESGVKCEGSDSSETPRWVTLLGDDKCRELLADCIERFTSTAIGVYLDKTMDINTYDQIFEGLTNPKHQDSVKDVLVSVCNGALETIVRTSHDVFTSSRSKNVIEEIEDDDFKSNGSARSKMVSESGDGVKSNGWTEAIATTLAVPSNRRFMFDVTGRVTLETTRSIIAFIMVKTFQGFRKSINVVHEEVTDRGRQAVEYVGAKSSVIITVCLALYLHIISGCVRNSPIGVSQHF

SEQ ID NO: 100897 - DNA, 958 bp, Arabidopsis thaliana
  misc_feature (1)..(958): Ceres Seq. ID no. 13606308
  misc_feature (1)..(958): Ortholog of  Ceres SEQ ID NO 13656286 as cited in SEQ ID NO 69168
  misc_feature (1)..(958): Ortholog of  Ceres SEQ ID NO 15174351 as cited in SEQ ID NO 0
aattgacaatctctttctttcatcttcatcttattcttctttatctctctctctctctcaagactattgagcttctttcttttttcctgagtcttttagtctgatctcttacaagaatggcgttcgcaggaacaacccagaaatgcatggcatgtgacaaaacagtttatcttgtcgacaagttaaccgccgataaccgggtctaccacaaagcttgtttccgatgtcaccattgcaaaggaactctcaagcttagcaattacaactcctttgaaggagttctctactgcagaccacatttcgatcaaaacttcaagagaactggaagtcttgagaaaagcttcgaagggacaccaaagattgggaaacctgataggcctttggagggagagagacctgctggaaccaaagtttcgaatatgtttggtggaacacgagagaaatgcgttggttgcgacaaaaccgtgtatccaattgagaaggtatcggtgaatggaacattgtaccacaagagctgcttcaagtgtacacatggaggctgcacgataagcccttcgaattacatagctcacgagggtaagctatattgcaagcatcatcatattcagctgatcaaggagaaaggaaacttgagccagctcgaaggaggaggagagaatgccgccaaggacaaagtcgtcgctgcttaaagaaacaattcaatctctctgggatgattttgactatcgaagaatcaaaagagtcactacttctccatcgatcgataacatatattggttttgtttcttcctacgtttgtgtttttctttttggtctttaatatgtttttttttttttgggacctttgttcactcttttattgggtttcttgaaatgaaactagagaaacaaagaaataatggatgtttgcttatgagatatatatgtattacgttcatatgatataaattaattttcg

SEQ ID NO: 100898 - protein, 190 aa, Arabidopsis thaliana; identical to SEQ ID NO: 24619
  peptide (1)..(190): Ceres Seq. ID no. 13606309

SEQ ID NO: 100899 - protein, 180 aa, Arabidopsis thaliana; identical to SEQ ID NO: 24620
  peptide (1)..(180): Ceres Seq. ID no. 13606310

SEQ ID NO: 100900 - DNA, 1384 bp, Arabidopsis thaliana
  misc_feature (1)..(1384): Ceres Seq. ID no. 13606315
  misc_feature (1)..(1384): Ortholog of  Ceres SEQ ID NO 13639663 as cited in SEQ ID NO 57850
  misc_feature (1)..(1384): Ortholog of  Ceres SEQ ID NO 15224330 as cited in SEQ ID NO 58808
aaaatatctcgaatccgattccttttttctcttctgcaatctctttgaaatctcaagcttctcttcaaaatttcgattacagctgaagattctctcgattttctggttttgactttttttttgtttggtttggtgaaagatttggatcaaatgggggtggattactacaatgttctgaaagtgaatcgaaatgctaacgaagatgatctgaagaagtcttaccggcgaatggctatgaaatggcaccctgacaaaaaccctacgagcaagaaagaagctgaagctaagttcaagcagatctctgaagcttacgacgtcttgagcgatcctcagagacgtcagatctacgatcagtacggagaagaaggtcttaaatccaccgatttacctactgcggcggagacggcggcgcatcagcagcagcggagctactcttctagcaactctgagtttcggtattatccgcgtgatgctgaagatatctttgctgagtttttcggcgaatccggtgatgcttttggcggagggagtagcggaaggacacgtggagatggcggtgatggtggcggtcggagatttaaaagtgcagaagcagggagccaggctaatagaaagacgccgccgacgaacaaaaaaacgacgccgccggcgaataggaaggctccggctattgagagtaaattggcttgcacattggaggagctctacaaaggtgcaaagaagaagatgcgaatttctcgcgttgttcctgatgattttggaaagccaaagacagtccaagagatattgaagatagacataaaaccaggttggaagaaaggcacaaagatcacttttccagagaaaggcaaccaagaacctggtgtcactcctgcggatcttatattcgtggttgacgagaaaccgcattcggtattcaagagagacggtaacgatctgattctcgagaagaaagtctctcttatagatgctttaaccggtctcaccattagcgtaacgactctagacgggaggagcctaactatcccggtgctggatatcgtaaaaccgggtcaggagattgtgatcccgaatgagggaatgcctactaaagaccctttgaagagaggagaccttagagttacctttgaaatcttgttcccgtcaaggctaacgtcagaacagaagaatgacctcaagagagttcttggtggaagctgatgagttgacgtttagttttcaagtaagctattgatcttctttaacaacggattccacaggaagttgctagtcatttgagtgtacatacatttacgtttttcctttgtaaacttgtgttataagaaaaacaagaaaacccaaatcgaataagactggatatgcgggatctaataatggctgccac

SEQ ID NO: 100901 - protein, 349 aa, Arabidopsis thaliana; identical to SEQ ID NO: 23763
  peptide (1)..(349): Ceres Seq. ID no. 13606316

SEQ ID NO: 100902 - protein, 323 aa, Arabidopsis thaliana; identical to SEQ ID NO: 23764
  peptide (1)..(323): Ceres Seq. ID no. 13606317

SEQ ID NO: 100903 - protein, 321 aa, Arabidopsis thaliana; identical to SEQ ID NO: 23765
  peptide (1)..(321): Ceres Seq. ID no. 13606318

SEQ ID NO: 100904 - DNA, 809 bp, Arabidopsis thaliana
  misc_feature (1)..(809): Ceres Seq. ID no. 13606331
  misc_feature (1)..(809): Ortholog of  Ceres SEQ ID NO 15178534 as cited in SEQ ID NO 65306
gtagaattgtcatcttcgcaaaagcttcgagagtagtgcaatcgaaacaagtcatggatctttcgcctgttaaggaagctttggccgccaaatcctttgacaaaatcgccgatatctgcgatactctcatgcttcaggttgcttccgaaggaattgaatatcatgatgattggccttacgcaatccatcttctgggttacttttacgttgacgattgtgatagcgcacgtttcctctggaaaaggatacctacagctatcaaggagaggaagcctgaagttgttgcagcttgggggattggtcagaagctgtggacacacgactatgcaggtgtatatgaagctattcggggttatgattggagtcaagaagctaaagatatggttgctgccttctcagatctttacacaaaaaggatgtttcagcttttgttgtctgcctactccacaattaccatccatgatttagctcttttcctagggatgacggaggatgatgccacaacttatgttgtagagaatggatggacagtggatgcagcttctcaaatggcgagtgtgaagaaacaagctgttaaaagagagcaaaaggtggattcatcgaagctacaacgcttgacggagtatgtgttccaccttgaacattaaaactaagtgccgatctcctattaagatagtgaaattctaagaacagaattcgtttttgagagatttcacaatgactgattctaagttgcaacatatcttgactctttgagtatatgatgaataactcctaccaattttactcttataagatcagtttacacc

SEQ ID NO: 100905 - protein, 214 aa, Arabidopsis thaliana
  peptide (1)..(214): Ceres Seq. ID no. 13606332
RIVIFAKASRVVQSKQVMDLSPVKEALAAKSFDKIADICDTLMLQVASEGIEYHDDWPYAIHLLGYFYVDDCDSARFLWKRIPTAIKERKPEVVAAWGIGQKLWTHDYAGVYEAIRGYDWSQEAKDMVAAFSDLYTKRMFQLLLSAYSTITIHDLALFLGMTEDDATTYVVENGWTVDAASQMASVKKQAVKREQKVDSSKLQRLTEYVFHLEH

SEQ ID NO: 100906 - protein, 197 aa, Arabidopsis thaliana
  peptide (1)..(197): Ceres Seq. ID no. 13606333
MDLSPVKEALAAKSFDKIADICDTLMLQVASEGIEYHDDWPYAIHLLGYFYVDDCDSARFLWKRIPTAIKERKPEVVAAWGIGQKLWTHDYAGVYEAIRGYDWSQEAKDMVAAFSDLYTKRMFQLLLSAYSTITIHDLALFLGMTEDDATTYVVENGWTVDAASQMASVKKQAVKREQKVDSSKLQRLTEYVFHLEH

SEQ ID NO: 100907 - protein, 172 aa, Arabidopsis thaliana
  peptide (1)..(172): Ceres Seq. ID no. 13606334
MLQVASEGIEYHDDWPYAIHLLGYFYVDDCDSARFLWKRIPTAIKERKPEVVAAWGIGQKLWTHDYAGVYEAIRGYDWSQEAKDMVAAFSDLYTKRMFQLLLSAYSTITIHDLALFLGMTEDDATTYVVENGWTVDAASQMASVKKQAVKREQKVDSSKLQRLTEYVFHLEH

SEQ ID NO: 100908 - DNA, 603 bp, Arabidopsis thaliana
  misc_feature (1)..(603): Ceres Seq. ID no. 13606339
  misc_feature (1)..(603): Ortholog of  Ceres SEQ ID NO 14316118 as cited in SEQ ID NO 52391
  misc_feature (1)..(603): Ortholog of  Ceres SEQ ID NO 14316060 as cited in SEQ ID NO 52465
  misc_feature (1)..(603): Ortholog of  Ceres SEQ ID NO 15177246 as cited in SEQ ID NO 57731
  misc_feature (1)..(603): Ortholog of  Ceres SEQ ID NO 13664032 as cited in SEQ ID NO 67527
aaaacatctatctctctttctcgaccttttgtctcctcgatctaaagatggcggattcggacaacgattcaggaggacacaaagacggtggaaatgcttcgacacgtgagcaagataggtttctaccgatcgctaacgttagcaggatcatgaagaaagcacttcctgcgaacgcaaaaatctctaaggatgctaaagaaacggttcaagagtgtgtatcggaattcataagtttcatcaccggtgaggcttctgacaagtgtcagagagagaagaggaagacaatcaacggtgacgatcttctttgggcgatgactacgctagggtttgaggactacgtggagcctctcaaggtttatctgcaaaagtatagggaggtggaaggagagaagactactacggcagggagacaaggcgataaggaaggtggaggaggaggcggtggagctggaagtggaagtggaggagctccgatgtacggtggtggcatggtgactacgatgggacatcaattttcccatcatttttcttaattgtaaaatgataaaagcaaattttcatttttattaattaatgatatatatatatatatgtttaactttt

SEQ ID NO: 100909 - protein, 176 aa, Arabidopsis thaliana
  peptide (1)..(176): Ceres Seq. ID no. 13606340
NIYLSFSTFCLLDLKMADSDNDSGGHKDGGNASTREQDRFLPIANVSRIMKKALPANAKISKDAKETVQECVSEFISFITGEASDKCQREKRKTINGDDLLWAMTTLGFEDYVEPLKVYLQKYREVEGEKTTTAGRQGDKEGGGGGGGAGSGSGGAPMYGGGMVTTMGHQFSHHFS

SEQ ID NO: 100910 - protein, 161 aa, Arabidopsis thaliana
  peptide (1)..(161): Ceres Seq. ID no. 13606341
MADSDNDSGGHKDGGNASTREQDRFLPIANVSRIMKKALPANAKISKDAKETVQECVSEFISFITGEASDKCQREKRKTINGDDLLWAMTTLGFEDYVEPLKVYLQKYREVEGEKTTTAGRQGDKEGGGGGGGAGSGSGGAPMYGGGMVTTMGHQFSHHFS

SEQ ID NO: 100911 - protein, 127 aa, Arabidopsis thaliana
  peptide (1)..(127): Ceres Seq. ID no. 13606342
MKKALPANAKISKDAKETVQECVSEFISFITGEASDKCQREKRKTINGDDLLWAMTTLGFEDYVEPLKVYLQKYREVEGEKTTTAGRQGDKEGGGGGGGAGSGSGGAPMYGGGMVTTMGHQFSHHFS

SEQ ID NO: 100912 - DNA, 1363 bp, Arabidopsis thaliana
  misc_feature (1)..(1363): Ceres Seq. ID no. 13606343
  misc_feature (1)..(1363): Ortholog of  Ceres SEQ ID NO 13593889 as cited in SEQ ID NO 53305
  misc_feature (1)..(1363): Ortholog of  Ceres SEQ ID NO 13581959 as cited in SEQ ID NO 56156
acctattcactagtaataatctgaaaaaattagtactagatttcatgatgatgatgaaaagattgatgatttgagtcacaaaatcttgttttttgaaagttgtgtgatcttcttgtttgcatagtgaattagttttgatttgaaaagattttaagtaatggagaagaaatcagaagaagatgggaacaacacgacgaaagaaaagatctttagagcggataagattgatttgaagagtttagatagacagcttgagaaacatctgagtagggtttggtcgaggaaccttgaggtgaatcctaaagctaaggaagaatgggagattgatttggctaagcttgaaacaagtaatgttattgctcgtggtacttatggtactgtctacaaaggcatttatgatggacaagatgttgcagtgaaggtgcttgattgggaagatgatgggaatgaaacaacggccaagaccgctacaaatcgagctttgttccgtcaagaggtcactgtttggcacaaactcaaccatccaaatgtcacaaagtttgttggagcgtcgatgggaacaacgaatcttaatatacgatcagctgattcgaaaggctcgttgcctcaacaagcatgttgtgtggttgtggaatatcttcctggtggaacattgaaacaacacttgattcgtcataagagcaagaaactcgcttttaaagccgttatcaaactcgctcttgatctcgccagagggctaagctatttgcactcagagaagattgtccaccgcgatgtgaaaacagagaacatgcttttggatgctcagaagaatttgaaaatagcggattttggagtagcacgagtggaagctcttaatccaaaagacatgacaggagaaaccggtactcttggatacatggctcctgaggtcattgatggtaagccatacaacagaaggtgcgatgtttacagctttgggatatgtttatgggaaatctactgctgcgatatgccttatcctgatcttagctttgtcgatgtttcttccgcggttgtcttacataatctgagaccggagataccgagatgctgtccgactgcattggcgggcataatgaagacatgttgggatgggaatccgcagaaacggccggagatgaaggaggtggtgaaaatgcttgaaggtgttgataccagtaaaggtggcggaatgataccggaagatcaaagtcggggctgtttctgctttgctcctgctcgtggaccttaaatttccctttctacctctgtttggttttattgtcttgtttttgtcgacatttaactgaatgccccttttgcttcttctccaagaaacttcttttaacaagatttgttaaat

SEQ ID NO: 100913 - protein, 364 aa, Arabidopsis thaliana
  peptide (1)..(364): Ceres Seq. ID no. 13606344
MEKKSEEDGNNTTKEKIFRADKIDLKSLDRQLEKHLSRVWSRNLEVNPKAKEEWEIDLAKLETSNVIARGTYGTVYKGIYDGQDVAVKVLDWEDDGNETTAKTATNRALFRQEVTVWHKLNHPNVTKFVGASMGTTNLNIRSADSKGSLPQQACCVVVEYLPGGTLKQHLIRHKSKKLAFKAVIKLALDLARGLSYLHSEKIVHRDVKTENMLLDAQKNLKIADFGVARVEALNPKDMTGETGTLGYMAPEVIDGKPYNRRCDVYSFGICLWEIYCCDMPYPDLSFVDVSSAVVLHNLRPEIPRCCPTALAGIMKTCWDGNPQKRPEMKEVVKMLEGVDTSKGGGMIPEDQSRGCFCFAPARGP

SEQ ID NO: 100914 - protein, 232 aa, Arabidopsis thaliana
  peptide (1)..(232): Ceres Seq. ID no. 13606345
MGTTNLNIRSADSKGSLPQQACCVVVEYLPGGTLKQHLIRHKSKKLAFKAVIKLALDLARGLSYLHSEKIVHRDVKTENMLLDAQKNLKIADFGVARVEALNPKDMTGETGTLGYMAPEVIDGKPYNRRCDVYSFGICLWEIYCCDMPYPDLSFVDVSSAVVLHNLRPEIPRCCPTALAGIMKTCWDGNPQKRPEMKEVVKMLEGVDTSKGGGMIPEDQSRGCFCFAPARGP

SEQ ID NO: 100915 - DNA, 927 bp, Arabidopsis thaliana
  misc_feature (1)..(927): Ceres Seq. ID no. 13606346
  misc_feature (1)..(927): Ortholog of  Ceres SEQ ID NO 14307839 as cited in SEQ ID NO 54379
  misc_feature (1)..(927): Ortholog of  Ceres SEQ ID NO 13596109 as cited in SEQ ID NO 68619
gctctagtctcttcttcgaacgcttgcaatggatcttctcaagactccttcctccacggttggtctatcagaaacattcgctaggttaaagtcacaaggcaaagtggctctgattccatatatcacagctggtgatcctgatctttctacaacagcgaaagctcttaaagtgcttgattcgtgtggctccgacataatcgaactcggtgttccatactctgatccattagctgatggtccagcaatccaggctgctgcgagacgttcgttacttaaaggaaccaactttaactccattatctctatgcttaaagaggttattcctcagttatcttgtccaattgcattgtttacatattacaatccaatcctgcgacgaggagtagagaactacatgactgttataaagaatgctggagttcatgggcttctggttcctgatgttccactcgaggagactgaaactctgcggaacgaagctcggaagcatcaaattgagctagtactgctcacaacacccacaactccaaaagaacgaatgaatgccattgttgaagcctctgaaggatttatctatctcgtaagttcagtaggggttactggtacaagagagtctgttaacgaaaaagttcaatctcttctacaacaaatcaaagaggcaactagcaagccagtggcagttggatttggcatatcaaaacctgagcatgtgaaacaggtagctgaatggggagcagacggagtcattgttggtagcgcgatggttaagatcttgggcgagtctgaatcacctgagcaaggacttaaggagctagaattcttcactaaatctttgaagtctgctcttgtctcttgaatacccacaatgattctttcttaattgaatgcaaagaaccagatgaagctaccattgcttcttcataatat

SEQ ID NO: 100916 - protein, 275 aa, Arabidopsis thaliana
  peptide (1)..(275): Ceres Seq. ID no. 13606347
MDLLKTPSSTVGLSETFARLKSQGKVALIPYITAGDPDLSTTAKALKVLDSCGSDIIELGVPYSDPLADGPAIQAAARRSLLKGTNFNSIISMLKEVIPQLSCPIALFTYYNPILRRGVENYMTVIKNAGVHGLLVPDVPLEETETLRNEARKHQIELVLLTTPTTPKERMNAIVEASEGFIYLVSSVGVTGTRESVNEKVQSLLQQIKEATSKPVAVGFGISKPEHVKQVAEWGADGVIVGSAMVKILGESESPEQGLKELEFFTKSLKSALVS

SEQ ID NO: 100917 - protein, 183 aa, Arabidopsis thaliana
  peptide (1)..(183): Ceres Seq. ID no. 13606348
MLKEVIPQLSCPIALFTYYNPILRRGVENYMTVIKNAGVHGLLVPDVPLEETETLRNEARKHQIELVLLTTPTTPKERMNAIVEASEGFIYLVSSVGVTGTRESVNEKVQSLLQQIKEATSKPVAVGFGISKPEHVKQVAEWGADGVIVGSAMVKILGESESPEQGLKELEFFTKSLKSALVS

SEQ ID NO: 100918 - protein, 153 aa, Arabidopsis thaliana
  peptide (1)..(153): Ceres Seq. ID no. 13606349
MTVIKNAGVHGLLVPDVPLEETETLRNEARKHQIELVLLTTPTTPKERMNAIVEASEGFIYLVSSVGVTGTRESVNEKVQSLLQQIKEATSKPVAVGFGISKPEHVKQVAEWGADGVIVGSAMVKILGESESPEQGLKELEFFTKSLKSALVS

SEQ ID NO: 100919 - DNA, 1713 bp, Arabidopsis thaliana
  misc_feature (1)..(1713): Ceres Seq. ID no. 13606350
  misc_feature (1)..(1713): Ortholog of  Ceres SEQ ID NO 13654989 as cited in SEQ ID NO 63117
  misc_feature (1)..(1713): Ortholog of  Ceres SEQ ID NO 13584744 as cited in SEQ ID NO 69137
gtgcagcagaacaaaagcaaaaagagagagtcagaggaagaagaagaagaagaagagtcagtgagctgcaatggcggattctcactcagtcaacaatcagctctcgagacacacttccatttttggtttacgtttatgggttgttctcggcgtttgcgttggagccgcgatcgttcttttactcgttctcatctctctctggttcatttaccgacgaagcaacaagaacaaatctcttgagtcttcttctaaatctaaccatacgattgttcccgttgtttccaaggagattcaagagattcgacctccaattcaacccgacccaacaccggagccacaccaaaaccaacaaagagaagacgataacaaaattcacatcgaaattggtaaagatcatcggattgcgtacccggaacgaggaggttggactggttccgggtctgggtccgggtcgggtgatcagggtttacttatgttgtcgggtcctgaggtttctcatttaggttggggacattggtatacgttgagagagcttgaggtttctactaatggatttgctgacgagaatgtgattggacaaggaggttatgggattgtgtatagaggtgttcttgaggataaatcaatggtggctataaagaatctgctcaacaacagaggacaagctgagaaagaatttaaagtcgaagtcgaagctattggacgcgtaagacacaagaatctggtgagattgcttggttattgcgttgaaggagctcataggatgttagtttacgagtatgttgataatgggaatttagaacaatggattcatggtggtggtttggggtttaagagtcctcttacttgggagattaggatgaacattgttcttggaacagccaaagggttaatgtatttacacgaaggtcttgagcctaaagttgttcaccgagatattaaatcgagtaatatcttgcttgacaagcaatggaactcgaaagtttctgactttgggttagctaagctcttgggttcggagatgagctatgtgactactcgtgtgatgggtacgtttgggtatgtggctcctgaatacgcgagtaccggaatgttgaatgagaggagcgatgtttatagcttcggtgttcttgttatggagattatttcagggagaagtcctgtggattatagccgggctccgggagaagtgaatcttgtggaatggttgaagagattggtgacgaatcgagatgcggaaggagttttggatccgaggatggttgataaaccgtcgttaaggtcattgaagcgtacccttttggtagctttaagatgtgttgatcctaatgctcaaaagaggccaaaaatgggtcatatcattcatatgcttgaagctgaggacttggtctctaaagatgatcggagaaactctggaggaggaggaggaggaatagaacagggaaggtcaccgcggaggaagacaaatgtgaatgaatcagaggatgagagtggtaattctgttctgatcaacaatgaccaattagctttggagaataagcagaactagtaaaaaagaaagaagctttggcattataattttgtattactatttttagaagttttttcttgtgtgtgtatatttatgtgtgtagattcttagccctttcacaaaaaaaaaaaaaatgtgtgtagattcttgtaattttgcaataattaaaactggggattgct

SEQ ID NO: 100920 - protein, 492 aa, Arabidopsis thaliana
  peptide (1)..(492): Ceres Seq. ID no. 13606351
MADSHSVNNQLSRHTSIFGLRLWVVLGVCVGAAIVLLLVLISLWFIYRRSNKNKSLESSSKSNHTIVPVVSKEIQEIRPPIQPDPTPEPHQNQQREDDNKIHIEIGKDHRIAYPERGGWTGSGSGSGSGDQGLLMLSGPEVSHLGWGHWYTLRELEVSTNGFADENVIGQGGYGIVYRGVLEDKSMVAIKNLLNNRGQAEKEFKVEVEAIGRVRHKNLVRLLGYCVEGAHRMLVYEYVDNGNLEQWIHGGGLGFKSPLTWEIRMNIVLGTAKGLMYLHEGLEPKVVHRDIKSSNILLDKQWNSKVSDFGLAKLLGSEMSYVTTRVMGTFGYVAPEYASTGMLNERSDVYSFGVLVMEIISGRSPVDYSRAPGEVNLVEWLKRLVTNRDAEGVLDPRMVDKPSLRSLKRTLLVALRCVDPNAQKRPKMGHIIHMLEAEDLVSKDDRRNSGGGGGGIEQGRSPRRKTNVNESEDESGNSVLINNDQLALENKQN

SEQ ID NO: 100921 - protein, 358 aa, Arabidopsis thaliana
  peptide (1)..(358): Ceres Seq. ID no. 13606352
MLSGPEVSHLGWGHWYTLRELEVSTNGFADENVIGQGGYGIVYRGVLEDKSMVAIKNLLNNRGQAEKEFKVEVEAIGRVRHKNLVRLLGYCVEGAHRMLVYEYVDNGNLEQWIHGGGLGFKSPLTWEIRMNIVLGTAKGLMYLHEGLEPKVVHRDIKSSNILLDKQWNSKVSDFGLAKLLGSEMSYVTTRVMGTFGYVAPEYASTGMLNERSDVYSFGVLVMEIISGRSPVDYSRAPGEVNLVEWLKRLVTNRDAEGVLDPRMVDKPSLRSLKRTLLVALRCVDPNAQKRPKMGHIIHMLEAEDLVSKDDRRNSGGGGGGIEQGRSPRRKTNVNESEDESGNSVLINNDQLALENKQN

SEQ ID NO: 100922 - protein, 307 aa, Arabidopsis thaliana
  peptide (1)..(307): Ceres Seq. ID no. 13606353
MVAIKNLLNNRGQAEKEFKVEVEAIGRVRHKNLVRLLGYCVEGAHRMLVYEYVDNGNLEQWIHGGGLGFKSPLTWEIRMNIVLGTAKGLMYLHEGLEPKVVHRDIKSSNILLDKQWNSKVSDFGLAKLLGSEMSYVTTRVMGTFGYVAPEYASTGMLNERSDVYSFGVLVMEIISGRSPVDYSRAPGEVNLVEWLKRLVTNRDAEGVLDPRMVDKPSLRSLKRTLLVALRCVDPNAQKRPKMGHIIHMLEAEDLVSKDDRRNSGGGGGGIEQGRSPRRKTNVNESEDESGNSVLINNDQLALENKQN

SEQ ID NO: 100923 - DNA, 1393 bp, Arabidopsis thaliana
  misc_feature (1)..(1393): Ceres Seq. ID no. 13606354
  misc_feature (1)..(1393): Ortholog of  Ceres SEQ ID NO 14310350 as cited in SEQ ID NO 20670
  misc_feature (1)..(1393): Ortholog of  Ceres SEQ ID NO 15177648 as cited in SEQ ID NO 58917
gaaaaagagagcgagcgatgaacagtatcttctccattgacgatttctccgatcctttctgggaaactcctccgattcctctcaatcccgactcttctaagcctgttacggcggatgaagttagccagagtcaaccggaatggactttcgagatgtttctcgaagagatttcttcgtcggcggtgagctctgagccacttggtaacaacaacaacgcgatcgtcggtgtttcttcggcgcaatctcttccttctgtttccggacagaatgatttcgaggatgatagtcgatttcgtgatcgcgattcgggaaatttggattgtgctgctcccatgacgacgaagacggtgattgttgattccgatgattatcgtcgtgttcttaagaacaagcttgagactgagtgcgctactgttgtttctcttcgggttgggtctgtgaagcctgaagattcgactagttctccagaaactcaacttcaaccagttcaatccagtcctcttactcaaggagaacttggtgttacttcttccttaccagctgaggtgaaaaaaactggtgtatcaatgaagcaggttactagtggatcgtcgagagaatattctgatgacgaggaccttgatgaagagaatgaaaccaccggttccttgaagccagaggacgttaaaaaatctagaaggatgctgtcaaatcgtgagtcagctaggcgatctagaaggagaaagcaggagcaaacaagtgacctcgaaacacaggttaatgatctaaaaggtgagcattcatcacttcttaaacaactgagcaacatgaatcacaagtatgacgaggctgctgttggcaatagaatactaaaggctgacattgagacattaagagctaaggtgaaaatggcggaagaaaccgtgaagagagtaacaggaatgaatccgatgcttctcggaagatcaagtggacataacaacaacaacagaatgccaataactggtaacaacaggatggattcttctagcattattccagcttatcaaccacactcaaacctaaaccatatgtcaaaccaaaacatcgggatcccaaccattctacctccaagactcggaaacaatttcgctgctcctccatcccaaaccagctctcccttgcagagaattagaaatgggcaaaatcaccatgttactccaagcgccaacccgtatggctggaataccgaacctcagaacgattcagcatggccgaaaaaatgcgtggactgatcaaacaagaagcgggtttcgcactatattaatgtctatgcatctgtaatttgtaagtgttattaagttacgaatcatgagaaaacatcttgtgaaaatacagtctcatggcttatatatatatataagctctgtcttat

SEQ ID NO: 100924 - protein, 416 aa, Arabidopsis thaliana; identical to SEQ ID NO: 27485
  peptide (1)..(416): Ceres Seq. ID no. 13606355

SEQ ID NO: 100925 - protein, 411 aa, Arabidopsis thaliana; identical to SEQ ID NO: 27486
  peptide (1)..(411): Ceres Seq. ID no. 13606356

SEQ ID NO: 100926 - protein, 366 aa, Arabidopsis thaliana; identical to SEQ ID NO: 27487
  peptide (1)..(366): Ceres Seq. ID no. 13606357

SEQ ID NO: 100927 - DNA, 1509 bp, Arabidopsis thaliana
  misc_feature (1)..(1509): Ceres Seq. ID no. 13606366
  misc_feature (1)..(1509): Ortholog of  Ceres SEQ ID NO 13497992 as cited in SEQ ID NO 58175
gtattcgatgatgtaagcttacgggaagctccacaagattcttcttcttcttcaggtatctgaagtcactaaacacgtcaatcacaaattccttttacttttcctctctgacaatctttctacacttcatctctctatatatatatatcgaatcttgaaactgatttgaaagaagaagaagaagaaacctaacgaagaacattcgaaaaaacctaaactgttttttactttgagcttgaatctgtaaaaatggaaggcattgaatctgggtctaaacaaggaaagagagtggttgtgatcggcggcggaatcgccggctcactcgccgcgaaattgcttcagttcgatgctgaagtcacactcatcgatccgaaggagtattttgagattacatgggcaagtttgagatccatggtggagcctaagtttgctgagagaacagtgattaaccacaagagttacttgaaacaaggccgtcttgtaacttctccggcgatcaatatcacagagagtgatgttatgactgaagatggatctgtgattggatatgattatcttgtgattgctacaggtcacaatgacttgttccctaaaactagacaagagaagctgtcacattatcaatctgaatatgagaagataaaatcttctggatcagttttgattgttggtggaggtccatctggtgtggagctagctgcggaaatcgcggttgatttcccggagaagaaggttactctggtgcataaaggaccaagattgcttgagtttgttggacaaaaagctgctgataaagcatctgattggttagaatcaaagaaagtggaagttatattgaaccaatctgtggatttgagttcagcttcggatggaaacaaaatataccggacttcaggaggagaaactatacacgcagatattcacttcctctgtgttgggaaacctttgtcttctcaatggctcaatggaactgttctgaaagatagcttggatggtaaaggaagagtcatggtcgatgagtacttgcggattagaggtcgaagcaatgtattcgctgttggagatatcactaatatccctgagatgaaacaaggatatatagcagagactcatgctaatgtcgttgtgaagaacataaaggtaatgatgtcaggtgggaaaaagaagaagatgtcgacttacaagcccggtccagagttggccattgtatctttaggaagaaaggactcggtggctcagtttccgtttgtgacagttgttggttgcctccctggtttgatcaagtctaaggatctgtttgtggggaagacaaggaaggcaagaggcctaaatcctaaacttgtataagtttgattcctattgtgttttgaggttacatcttgtgtgcagatgtaatcatgttgtttgtgtttgtgtttgtttttgtgttgatttcattgtttcagtgtgtgttgattttgctttatgttggtatctaatgtataaataatggaattatttgagtcgact

SEQ ID NO: 100928 - protein, 365 aa, Arabidopsis thaliana
  peptide (1)..(365): Ceres Seq. ID no. 13606367
MEGIESGSKQGKRVVVIGGGIAGSLAAKLLQFDAEVTLIDPKEYFEITWASLRSMVEPKFAERTVINHKSYLKQGRLVTSPAINITESDVMTEDGSVIGYDYLVIATGHNDLFPKTRQEKLSHYQSEYEKIKSSGSVLIVGGGPSGVELAAEIAVDFPEKKVTLVHKGPRLLEFVGQKAADKASDWLESKKVEVILNQSVDLSSASDGNKIYRTSGGETIHADIHFLCVGKPLSSQWLNGTVLKDSLDGKGRVMVDEYLRIRGRSNVFAVGDITNIPEMKQGYIAETHANVVVKNIKVMMSGGKKKKMSTYKPGPELAIVSLGRKDSVAQFPFVTVVGCLPGLIKSKDLFVGKTRKARGLNPKLV

SEQ ID NO: 100929 - protein, 311 aa, Arabidopsis thaliana
  peptide (1)..(311): Ceres Seq. ID no. 13606368
MVEPKFAERTVINHKSYLKQGRLVTSPAINITESDVMTEDGSVIGYDYLVIATGHNDLFPKTRQEKLSHYQSEYEKIKSSGSVLIVGGGPSGVELAAEIAVDFPEKKVTLVHKGPRLLEFVGQKAADKASDWLESKKVEVILNQSVDLSSASDGNKIYRTSGGETIHADIHFLCVGKPLSSQWLNGTVLKDSLDGKGRVMVDEYLRIRGRSNVFAVGDITNIPEMKQGYIAETHANVVVKNIKVMMSGGKKKKMSTYKPGPELAIVSLGRKDSVAQFPFVTVVGCLPGLIKSKDLFVGKTRKARGLNPKLV

SEQ ID NO: 100930 - protein, 275 aa, Arabidopsis thaliana
  peptide (1)..(275): Ceres Seq. ID no. 13606369
MTEDGSVIGYDYLVIATGHNDLFPKTRQEKLSHYQSEYEKIKSSGSVLIVGGGPSGVELAAEIAVDFPEKKVTLVHKGPRLLEFVGQKAADKASDWLESKKVEVILNQSVDLSSASDGNKIYRTSGGETIHADIHFLCVGKPLSSQWLNGTVLKDSLDGKGRVMVDEYLRIRGRSNVFAVGDITNIPEMKQGYIAETHANVVVKNIKVMMSGGKKKKMSTYKPGPELAIVSLGRKDSVAQFPFVTVVGCLPGLIKSKDLFVGKTRKARGLNPKLV

SEQ ID NO: 100931 - DNA, 1016 bp, Arabidopsis thaliana
  misc_feature (1)..(1016): Ceres Seq. ID no. 13606386
  misc_feature (1)..(1016): Ortholog of  Ceres SEQ ID NO 13595568 as cited in SEQ ID NO 56764
atagcacagagaagagacttgagaaaaagaaaacaaacaagaaacacatacacacacacacaagttcactatactctatggaaatgaactccccacacgaaaaggcggtgcaagctatccgttatggccatagctgcgccatgcggttgaagaggcggctcaaccatccaatggctgatggtggaccgctttcaagttatgatcttgctaaatcgatcgttgaaagtttttccaatgccatttcaatcttatctgctaaaccagaaaccgaagatgatcagttttctgatttatcttctagggattcttctcctcctccacaggggagcccctccaagaaaagaaagattgatagtacaaattcaagtgagaattggagggacgattcaccggatccgatttactacgacgggtatctttggaggaaatatggtcaaaagagtataaaaaaatctaatcaccaaaggagttactatagatgttcttacaacaaagatcataactgcgaagcaagaaagcatgaacaaaagatcaaagacaatcctccggtttaccgaaccacttactttggccaccacacttgcaaaaccgaacataatctagatgccatttttattgccggacaagatcccctagatgactttaaaagtacccaaatgatccgattcggaaaagatcaggatcaggagaaggaaagccgctcgaacggtttctccttatcggttaagcatgaagaagatatcatcaaagagcaagctatagatcagtaccgtgagataaccagtaatgaccaagattgtcaagatgttatagaagaatatctatcatcaccatcaggctcttatcctccttcatcgtcatctggcagtgaaagtgctgactttaattctgatttgttatttgacaacccagactcgtgggatcgttatgatcagttttacttttgattgcactagatttttcagctaaaactatttaataatgttttcctttttatgagattgtatatatttgag

SEQ ID NO: 100932 - protein, 314 aa, Arabidopsis thaliana
  peptide (1)..(314): Ceres Seq. ID no. 13606387
STEKRLEKKKTNKKHIHTHTSSLYSMEMNSPHEKAVQAIRYGHSCAMRLKRRLNHPMADGGPLSSYDLAKSIVESFSNAISILSAKPETEDDQFSDLSSRDSSPPPQGSPSKKRKIDSTNSSENWRDDSPDPIYYDGYLWRKYGQKSIKKSNHQRSYYRCSYNKDHNCEARKHEQKIKDNPPVYRTTYFGHHTCKTEHNLDAIFIAGQDPLDDFKSTQMIRFGKDQDQEKESRSNGFSLSVKHEEDIIKEQAIDQYREITSNDQDCQDVIEEYLSSPSGSYPPSSSSGSESADFNSDLLFDNPDSWDRYDQFYF

SEQ ID NO: 100933 - protein, 289 aa, Arabidopsis thaliana
  peptide (1)..(289): Ceres Seq. ID no. 13606388
MEMNSPHEKAVQAIRYGHSCAMRLKRRLNHPMADGGPLSSYDLAKSIVESFSNAISILSAKPETEDDQFSDLSSRDSSPPPQGSPSKKRKIDSTNSSENWRDDSPDPIYYDGYLWRKYGQKSIKKSNHQRSYYRCSYNKDHNCEARKHEQKIKDNPPVYRTTYFGHHTCKTEHNLDAIFIAGQDPLDDFKSTQMIRFGKDQDQEKESRSNGFSLSVKHEEDIIKEQAIDQYREITSNDQDCQDVIEEYLSSPSGSYPPSSSSGSESADFNSDLLFDNPDSWDRYDQFYF

SEQ ID NO: 100934 - protein, 287 aa, Arabidopsis thaliana
  peptide (1)..(287): Ceres Seq. ID no. 13606389
MNSPHEKAVQAIRYGHSCAMRLKRRLNHPMADGGPLSSYDLAKSIVESFSNAISILSAKPETEDDQFSDLSSRDSSPPPQGSPSKKRKIDSTNSSENWRDDSPDPIYYDGYLWRKYGQKSIKKSNHQRSYYRCSYNKDHNCEARKHEQKIKDNPPVYRTTYFGHHTCKTEHNLDAIFIAGQDPLDDFKSTQMIRFGKDQDQEKESRSNGFSLSVKHEEDIIKEQAIDQYREITSNDQDCQDVIEEYLSSPSGSYPPSSSSGSESADFNSDLLFDNPDSWDRYDQFYF

SEQ ID NO: 100935 - DNA, 2215 bp, Arabidopsis thaliana
  misc_feature (1)..(2215): Ceres Seq. ID no. 13606402
  misc_feature (1)..(2215): Ortholog of  Ceres SEQ ID NO 13654290 as cited in SEQ ID NO 62197
  misc_feature (1)..(2215): Ortholog of  Ceres SEQ ID NO 14301924 as cited in SEQ ID NO 67731
agcttcttctactggagaagaggaggagaacacaaatccaattcacactggaaactgttgggtcggatcctgagtgatatttcgagaccgatgatgtggaagaacattgctgggttgtcgaaggcagcggcagcggcaagaacacacggatctcggcggtgcttttccacagcgattcctggtccttgcatcgtccacaagcgtggtgctgatattcttcacgatccatggttcaataaggttgtgtgttttcctttgactgagagagatagattagggatacgaggcttgcttcctcctcgtgttatgacctgtgtacagcaatgtgatcgtttcattgagtcgtttcgttcgctagagaacaacacaaaaggagagcctgaaaacgttgttgcattagctaaatggaggatgttgaatagattgcatgaccgtaatgagactttgtactaccgagttcttattgataacatcaaagattttgcccccattatatacactcctacggttggacttgtttgtcagaactattctggtttgtatagaagaccaagaggaatgtacttcagcgccaaagacaaaggagagatgatgtctatgatttataactggcctgctccgcaggtagatatgattgtcatcactgatggtagccgtattttgggcttaggagaccttggagtacagggaattgggattcctattggaaagctcgacatgtatgtcgctgctgcaggaatcaatccacagagagttttgccaattatgttggatgtaggcacaaataatgaaaagctcctacagaatgatctctatttaggagtcagacaacctaggttggaaggagaggagtaccttgagattattgatgaatttatggaagctgcatttacacgttggccaaaggccgtcgtacagttcgaagatttccaagcgaaatgggctttcggaacattggaaagatatcggaagaaattttgcatgttcaatgatgatgtccagggaactgctggtgttgcactggctggactattgggaactgtaagagctcaaggtcggccgatatccgactttgtgaaccaaaagattgttgtggtgggagctggaagtgctgggcttggtgtaactaagatggcagtacaggcagttgccagaatggcaggtatcagcgagagtgaagcaacaaaaaacttttacctgatagataaagatggtcttgtcaccacggagaggacaaaacttgacccaggagctgtactttttgccaaaaatccagctgagatacgcgagggagcaagtatcgttgaagtggtgaagaaagtgaggccacatgttcttcttggtttatctggagttggtggtatctttaatgaagaagttctcaaggcgatgcgagaatctgactcatgcaagcctgccatttttgccatgtcgaatcccactttgaatgccgagtgcactgctgctgatgctttcaaacacgccggaggaaacattgtctttgcaagtggaagtccatttgagaacgttgaacttgagaatggtaaagtaggacatgtgaatcaggctaacaacatgtatttattcccggggatcgggctagggactcttctctctggtgcacgtatcgtaactgatggaatgctacaagcagcttctgaatgccttgcgtcctacatgaccgatgaagaagtccaaaaaggcatcctttacccttcaatcaacaacatccgacacataacagctgaagtcggggcagctgttctacgagctgcggtgactgatgacattgcagaaggacatggtgatgttggtcccaaagatctcagccacatgtctaaggaggatacagtgaattacattacacgcaacatgtggttccctgtttacagccctctcgttcacgagaaatagacaacaactctatataactcttctcaggtttcatagaaagccaaaagacaaaaaatcttcgcttcatcttttatttgtgatcaacattctttttttcttcaaaatgtgatatgttttaagaaaaacaatgccaaaaagagggcttaagaacaagaacagggttagttctaggtcaacctgtacttttccttttttttttttggacatttttccaacttcttacgattatttctgatgataatgattacaactttatatactgttttggcaataataagccaataatgatatctttcttctg

SEQ ID NO: 100936 - protein, 637 aa, Arabidopsis thaliana
  peptide (1)..(637): Ceres Seq. ID no. 13606403
SFFYWRRGGEHKSNSHWKLLGRILSDISRPMMWKNIAGLSKAAAAARTHGSRRCFSTAIPGPCIVHKRGADILHDPWFNKVVCFPLTERDRLGIRGLLPPRVMTCVQQCDRFIESFRSLENNTKGEPENVVALAKWRMLNRLHDRNETLYYRVLIDNIKDFAPIIYTPTVGLVCQNYSGLYRRPRGMYFSAKDKGEMMSMIYNWPAPQVDMIVITDGSRILGLGDLGVQGIGIPIGKLDMYVAAAGINPQRVLPIMLDVGTNNEKLLQNDLYLGVRQPRLEGEEYLEIIDEFMEAAFTRWPKAVVQFEDFQAKWAFGTLERYRKKFCMFNDDVQGTAGVALAGLLGTVRAQGRPISDFVNQKIVVVGAGSAGLGVTKMAVQAVARMAGISESEATKNFYLIDKDGLVTTERTKLDPGAVLFAKNPAEIREGASIVEVVKKVRPHVLLGLSGVGGIFNEEVLKAMRESDSCKPAIFAMSNPTLNAECTAADAFKHAGGNIVFASGSPFENVELENGKVGHVNQANNMYLFPGIGLGTLLSGARIVTDGMLQAASECLASYMTDEEVQKGILYPSINNIRHITAEVGAAVLRAAVTDDIAEGHGDVGPKDLSHMSKEDTVNYITRNMWFPVYSPLVHEK

SEQ ID NO: 100937 - protein, 607 aa, Arabidopsis thaliana
  peptide (1)..(607): Ceres Seq. ID no. 13606404
MMWKNIAGLSKAAAAARTHGSRRCFSTAIPGPCIVHKRGADILHDPWFNKVVCFPLTERDRLGIRGLLPPRVMTCVQQCDRFIESFRSLENNTKGEPENVVALAKWRMLNRLHDRNETLYYRVLIDNIKDFAPIIYTPTVGLVCQNYSGLYRRPRGMYFSAKDKGEMMSMIYNWPAPQVDMIVITDGSRILGLGDLGVQGIGIPIGKLDMYVAAAGINPQRVLPIMLDVGTNNEKLLQNDLYLGVRQPRLEGEEYLEIIDEFMEAAFTRWPKAVVQFEDFQAKWAFGTLERYRKKFCMFNDDVQGTAGVALAGLLGTVRAQGRPISDFVNQKIVVVGAGSAGLGVTKMAVQAVARMAGISESEATKNFYLIDKDGLVTTERTKLDPGAVLFAKNPAEIREGASIVEVVKKVRPHVLLGLSGVGGIFNEEVLKAMRESDSCKPAIFAMSNPTLNAECTAADAFKHAGGNIVFASGSPFENVELENGKVGHVNQANNMYLFPGIGLGTLLSGARIVTDGMLQAASECLASYMTDEEVQKGILYPSINNIRHITAEVGAAVLRAAVTDDIAEGHGDVGPKDLSHMSKEDTVNYITRNMWFPVYSPLVHEK

SEQ ID NO: 100938 - protein, 606 aa, Arabidopsis thaliana
  peptide (1)..(606): Ceres Seq. ID no. 13606405
MWKNIAGLSKAAAAARTHGSRRCFSTAIPGPCIVHKRGADILHDPWFNKVVCFPLTERDRLGIRGLLPPRVMTCVQQCDRFIESFRSLENNTKGEPENVVALAKWRMLNRLHDRNETLYYRVLIDNIKDFAPIIYTPTVGLVCQNYSGLYRRPRGMYFSAKDKGEMMSMIYNWPAPQVDMIVITDGSRILGLGDLGVQGIGIPIGKLDMYVAAAGINPQRVLPIMLDVGTNNEKLLQNDLYLGVRQPRLEGEEYLEIIDEFMEAAFTRWPKAVVQFEDFQAKWAFGTLERYRKKFCMFNDDVQGTAGVALAGLLGTVRAQGRPISDFVNQKIVVVGAGSAGLGVTKMAVQAVARMAGISESEATKNFYLIDKDGLVTTERTKLDPGAVLFAKNPAEIREGASIVEVVKKVRPHVLLGLSGVGGIFNEEVLKAMRESDSCKPAIFAMSNPTLNAECTAADAFKHAGGNIVFASGSPFENVELENGKVGHVNQANNMYLFPGIGLGTLLSGARIVTDGMLQAASECLASYMTDEEVQKGILYPSINNIRHITAEVGAAVLRAAVTDDIAEGHGDVGPKDLSHMSKEDTVNYITRNMWFPVYSPLVHEK

SEQ ID NO: 100939 - DNA, 1779 bp, Arabidopsis thaliana
  misc_feature (1)..(1779): Ceres Seq. ID no. 13606418
  misc_feature (1)..(1779): Ortholog of  Ceres SEQ ID NO 13585587 as cited in SEQ ID NO 65515
atctttatctatctctctttgtctgcaaatggaagaacatattcaagatcgccgtgaaattgcgttcttacactcaggagaatttctccacggagattctgactcaaaggatcatcaaccgaacgagtctccggtggaacgtcatcacgagtcgtctatcaaagaagttgatttcttcgctgctaaaagtcagccgtttgatcttggtcatgtgagaacaacgacgatcgttggatcatctggttttaatgatggattaggtttggtaaattcatgtcatggaacatcaagcaatgatggcgatgacaaaaccaaaactcaaattagtagactgaagttggagctagagaggcttcacgaggagaatcacaaactgaagcatttattagatgaggtcagtgagagttacaacgacctccaaagaagagttttgttagcaagacaaacacaagtggaaggtcttcatcataaacaacatgaggatgtacctcaagctggttcctcacaagctctagagaacagaagaccaaaggatatgaaccatgaaactccggccaccaccttgaaacgacggtctccagacgacgtggatggtcgtgatatgcaccgaggatcaccaaaaactcctcgaatagaccaaaacaagagtactaatcatgaagaacaacaaaaccctcatgatcaattaccctatagaaaagctagggtttccgttagagctagatctgatgccactacggtaaatgacggatgtcaatggagaaaatacggtcagaaaatggcgaaagggaatccatgtcctcgcgcttattatcgttgcaccatggccgttggatgtcctgtccgtaaacaggtccaacgatgcgcggaggatacaactatcttgacaacaacgtacgaaggaaaccataaccatcctcttcccccgtcagccacagccatggctgcaaccacctccgccgcagcagccatgctcttatcaggctcctcctccagcaacctccaccaaacactctctagcccctccgccacgtcatcatcatccttctaccataacttcccatacacctccacaatcgcaacactctctgcctcagctcctttccccaccataaccttagacctcaccaacccacctcgaccgctacaaccgccaccgcagtttctaagccagtatggtcccgccgcgtttttaccaaacgctaatcaaattaggtctatgaataataataaccagcagttattaatacctaatttgtttggcccacaagccccaccacgtgaaatggtcgattcagttagggctgcgattgcgatggatccgaacttcacggcggcacttgcggccgcgatctcaaacattatcggaggaggtaataacgacaacaataataatactgatattaatgataacaaggttgatgcaaaaagtggagggagtagtaacggagattcgccacagcttcctcagtcttgcaccactttctctacaaactaattttactaccattattatatgttatcttattatatattacacacacatattatacattatgcgtatcttaagttttttttggtgtacattatatatgaatgatatggagatcactgagagagagagagagctattataggtttttttttttacaggtttacacgattttggctatcgtttttttttcttctatgttaagaacgaggggtgtaggttttatttttcctacttcttatgaatcatactctgtatatgtatacatcttaaatatatattatgtt

SEQ ID NO: 100940 - protein, 498 aa, Arabidopsis thaliana
  peptide (1)..(498): Ceres Seq. ID no. 13606419
SLSISLCLQMEEHIQDRREIAFLHSGEFLHGDSDSKDHQPNESPVERHHESSIKEVDFFAAKSQPFDLGHVRTTTIVGSSGFNDGLGLVNSCHGTSSNDGDDKTKTQISRLKLELERLHEENHKLKHLLDEVSESYNDLQRRVLLARQTQVEGLHHKQHEDVPQAGSSQALENRRPKDMNHETPATTLKRRSPDDVDGRDMHRGSPKTPRIDQNKSTNHEEQQNPHDQLPYRKARVSVRARSDATTVNDGCQWRKYGQKMAKGNPCPRAYYRCTMAVGCPVRKQVQRCAEDTTILTTTYEGNHNHPLPPSATAMAATTSAAAAMLLSGSSSSNLHQTLSSPSATSSSSFYHNFPYTSTIATLSASAPFPTITLDLTNPPRPLQPPPQFLSQYGPAAFLPNANQIRSMNNNNQQLLIPNLFGPQAPPREMVDSVRAAIAMDPNFTAALAAAISNIIGGGNNDNNNNTDINDNKVDAKSGGSSNGDSPQLPQSCTTFSTN

SEQ ID NO: 100941 - protein, 489 aa, Arabidopsis thaliana
  peptide (1)..(489): Ceres Seq. ID no. 13606420
MEEHIQDRREIAFLHSGEFLHGDSDSKDHQPNESPVERHHESSIKEVDFFAAKSQPFDLGHVRTTTIVGSSGFNDGLGLVNSCHGTSSNDGDDKTKTQISRLKLELERLHEENHKLKHLLDEVSESYNDLQRRVLLARQTQVEGLHHKQHEDVPQAGSSQALENRRPKDMNHETPATTLKRRSPDDVDGRDMHRGSPKTPRIDQNKSTNHEEQQNPHDQLPYRKARVSVRARSDATTVNDGCQWRKYGQKMAKGNPCPRAYYRCTMAVGCPVRKQVQRCAEDTTILTTTYEGNHNHPLPPSATAMAATTSAAAAMLLSGSSSSNLHQTLSSPSATSSSSFYHNFPYTSTIATLSASAPFPTITLDLTNPPRPLQPPPQFLSQYGPAAFLPNANQIRSMNNNNQQLLIPNLFGPQAPPREMVDSVRAAIAMDPNFTAALAAAISNIIGGGNNDNNNNTDINDNKVDAKSGGSSNGDSPQLPQSCTTFSTN

SEQ ID NO: 100942 - protein, 320 aa, Arabidopsis thaliana
  peptide (1)..(320): Ceres Seq. ID no. 13606421
MNHETPATTLKRRSPDDVDGRDMHRGSPKTPRIDQNKSTNHEEQQNPHDQLPYRKARVSVRARSDATTVNDGCQWRKYGQKMAKGNPCPRAYYRCTMAVGCPVRKQVQRCAEDTTILTTTYEGNHNHPLPPSATAMAATTSAAAAMLLSGSSSSNLHQTLSSPSATSSSSFYHNFPYTSTIATLSASAPFPTITLDLTNPPRPLQPPPQFLSQYGPAAFLPNANQIRSMNNNNQQLLIPNLFGPQAPPREMVDSVRAAIAMDPNFTAALAAAISNIIGGGNNDNNNNTDINDNKVDAKSGGSSNGDSPQLPQSCTTFSTN

SEQ ID NO: 100943 - DNA, 2859 bp, Arabidopsis thaliana
  misc_feature (1)..(2859): Ceres Seq. ID no. 13606442
  misc_feature (1)..(2859): Ortholog of  Ceres SEQ ID NO 15177203 as cited in SEQ ID NO 54018
acgtcaaggtttattctgtttctcaggctgcttttgtgctctgtcttcaaatttcgaacacttgtctgagatatatttgtctgattccaaagatcatggaagctaattcagctgatcagaaacaaaaacctaactttcttgttgaggttaataacattgagaaacagctatggacattaatccattcaaagactatattgcataccgatgtttcagaattatacgcgaaagctggttcgacctacgagcaaatctttaaaagcaatctccaacacgaagagcttcaagaagtagagttctgtctctggaaactccactataaacacatcgatgagtttcgtaaaggccttaaaacaaatgatcatgccaagcatatgaaagcattcaagttgtttctgtcaaaagcagctgagttttaccagaatctgatttccaaagtcagaggatattaccacagactctccgaggaatcaggagagcaaaaaagcagattcttatgccatcgtttctacatttgtcttggagatcttcaaaggtatcaagaacaatatctgaaagcacatgaacatcctaattggtcaactgcagctacttactatcttgaagctgcaaaatcttggcctgatagtggaaatcctcataaccagctagctgtattggccacatatgttagtgatgagttattggctctgtatcactgcgtaagaagcttagctgtgaaagagccttttcctggtgcttcgaacaatcttcttttgttgtttgagaagaacaggtcatctccattgcagtctctgtctactgatgcagagtttaactacttaaacccatcagagaaaaaagtttctgtgaaggaacgagatttgtcaaaagcaaaaggagaactagttgccggaattgatttatggcccctggttgttcgaacaactagcttctttttccttaaatccagttttgatgagtttggtcgggcatttgcatcaactataagagaactggatgcagcgtttgcagcagatgatagaaatctagaagccatgttggagtcttatcaatttatggacacggcgagaaagggaccttataaaatcctccaaattgttgcggtttttatctacatcttccacaatttagcagaggctaatggatccgacatcgtgaaagaggaagttaagctaacaaatttagcattaactatggtgtttatcgtcatggggcgagttgttgagagatgtttgaagacaactcccttggattcttgccctctcttacctgctctacttgtatttctagactacttaccgtttctgcttgacaaggtagaagaagaagaagaagaatgcaggtttgatgagaagagcaagagtgcaatatcttacttctttggcaaactcgttgatatcttgaaccagttaaaggtgaaagacaaaaactgccctgctaaaacgttgttagctctctgggaagatcatgaactgaagtccttggctcctctggctcccatacatgcacttttggatttctcaagtaatatggatcttagagagagttttgatagagggaaggagcttcgtcttcaacggattattagttcagcaattgatatcacaactaggcagaagaagggttctcaaaagtggctattctttgacaatcaacggactcatttctacacaacttcgggtgaattgcaaagcaacggagagctctttcatggaaatggagagggtagaaacagaaaatgcgttactattggaccagttgaaatcattcctttggagaatgaaagatctgttcctgtagaagaggaagaagtcattcttctcaagccgctcgtaaggtgtcaatctgctccaatatattcttctggcattgcagcaaagccacttagctctgattgcacaacttcaggaaatcaaacaactacatccaatgacagcctaagacgtaccttatcactcattgggtctgaaagtttcagctttacgcaaggtcttaaggacacggatccacaacatttgcatctcgaagaaggcactgtctcaggaagacctccatcgctgagcgcgtgggtggttgacaagaacaaagagaaaggacgactcggtttaagtaaaccaaacggattgggccctattgatgaaacaggtcctgtctcagcctttgatagtctctccatcaatagcagcaccgagcatcctgcgtcttcctattcgcctcctactccgtctgctccactactgcctgaagacgcttcttggtttcataatgacgctagtactaacaaagcagagagcttctatgatcagacacgatatatggaactccccggtatcatgaagccatacacaaacccaccctttgttgggatttcttcttctgaatggttacgtcggtacagagaaagtaggaatcttggaccagcctattcctatcaagctcagggaacaaacaatttgagaaactttatggctcatggctcttccaagttcagtctcttagctaggtacgggacaccaaacgattcttctcaaaactcaacgtttcaccctcagctctacatggaagaccatgaatctagaggagagaagctcggcaacgttcaacaaagcacaacaaatccttatggcttcagtgacgatcccggaccgtttcttagatttctgagagaaaaagagtggctgaatgagaacggtcagaggctaagaggacctcctcctgcatatatgaacaactaaagatgcgagtgagtgagttttcaagaaactgtcctaagttgacaagttgtgacaactatagttatttcttctctctttgtgtactgtttctcaaattttcacgagaatggaaaatcatatt

SEQ ID NO: 100944 - protein, 911 aa, Arabidopsis thaliana
  peptide (1)..(911): Ceres Seq. ID no. 13606443
VKVYSVSQAAFVLCLQISNTCLRYICLIPKIMEANSADQKQKPNFLVEVNNIEKQLWTLIHSKTILHTDVSELYAKAGSTYEQIFKSNLQHEELQEVEFCLWKLHYKHIDEFRKGLKTNDHAKHMKAFKLFLSKAAEFYQNLISKVRGYYHRLSEESGEQKSRFLCHRFYICLGDLQRYQEQYLKAHEHPNWSTAATYYLEAAKSWPDSGNPHNQLAVLATYVSDELLALYHCVRSLAVKEPFPGASNNLLLLFEKNRSSPLQSLSTDAEFNYLNPSEKKVSVKERDLSKAKGELVAGIDLWPLVVRTTSFFFLKSSFDEFGRAFASTIRELDAAFAADDRNLEAMLESYQFMDTARKGPYKILQIVAVFIYIFHNLAEANGSDIVKEEVKLTNLALTMVFIVMGRVVERCLKTTPLDSCPLLPALLVFLDYLPFLLDKVEEEEEECRFDEKSKSAISYFFGKLVDILNQLKVKDKNCPAKTLLALWEDHELKSLAPLAPIHALLDFSSNMDLRESFDRGKELRLQRIISSAIDITTRQKKGSQKWLFFDNQRTHFYTTSGELQSNGELFHGNGEGRNRKCVTIGPVEIIPLENERSVPVEEEEVILLKPLVRCQSAPIYSSGIAAKPLSSDCTTSGNQTTTSNDSLRRTLSLIGSESFSFTQGLKDTDPQHLHLEEGTVSGRPPSLSAWVVDKNKEKGRLGLSKPNGLGPIDETGPVSAFDSLSINSSTEHPASSYSPPTPSAPLLPEDASWFHNDASTNKAESFYDQTRYMELPGIMKPYTNPPFVGISSSEWLRRYRESRNLGPAYSYQAQGTNNLRNFMAHGSSKFSLLARYGTPNDSSQNSTFHPQLYMEDHESRGEKLGNVQQSTTNPYGFSDDPGPFLRFLREKEWLNENGQRLRGPPPAYMNN

SEQ ID NO: 100945 - protein, 880 aa, Arabidopsis thaliana
  peptide (1)..(880): Ceres Seq. ID no. 13606444
MEANSADQKQKPNFLVEVNNIEKQLWTLIHSKTILHTDVSELYAKAGSTYEQIFKSNLQHEELQEVEFCLWKLHYKHIDEFRKGLKTNDHAKHMKAFKLFLSKAAEFYQNLISKVRGYYHRLSEESGEQKSRFLCHRFYICLGDLQRYQEQYLKAHEHPNWSTAATYYLEAAKSWPDSGNPHNQLAVLATYVSDELLALYHCVRSLAVKEPFPGASNNLLLLFEKNRSSPLQSLSTDAEFNYLNPSEKKVSVKERDLSKAKGELVAGIDLWPLVVRTTSFFFLKSSFDEFGRAFASTIRELDAAFAADDRNLEAMLESYQFMDTARKGPYKILQIVAVFIYIFHNLAEANGSDIVKEEVKLTNLALTMVFIVMGRVVERCLKTTPLDSCPLLPALLVFLDYLPFLLDKVEEEEEECRFDEKSKSAISYFFGKLVDILNQLKVKDKNCPAKTLLALWEDHELKSLAPLAPIHALLDFSSNMDLRESFDRGKELRLQRIISSAIDITTRQKKGSQKWLFFDNQRTHFYTTSGELQSNGELFHGNGEGRNRKCVTIGPVEIIPLENERSVPVEEEEVILLKPLVRCQSAPIYSSGIAAKPLSSDCTTSGNQTTTSNDSLRRTLSLIGSESFSFTQGLKDTDPQHLHLEEGTVSGRPPSLSAWVVDKNKEKGRLGLSKPNGLGPIDETGPVSAFDSLSINSSTEHPASSYSPPTPSAPLLPEDASWFHNDASTNKAESFYDQTRYMELPGIMKPYTNPPFVGISSSEWLRRYRESRNLGPAYSYQAQGTNNLRNFMAHGSSKFSLLARYGTPNDSSQNSTFHPQLYMEDHESRGEKLGNVQQSTTNPYGFSDDPGPFLRFLREKEWLNENGQRLRGPPPAYMNN

SEQ ID NO: 100946 - protein, 787 aa, Arabidopsis thaliana
  peptide (1)..(787): Ceres Seq. ID no. 13606445
MKAFKLFLSKAAEFYQNLISKVRGYYHRLSEESGEQKSRFLCHRFYICLGDLQRYQEQYLKAHEHPNWSTAATYYLEAAKSWPDSGNPHNQLAVLATYVSDELLALYHCVRSLAVKEPFPGASNNLLLLFEKNRSSPLQSLSTDAEFNYLNPSEKKVSVKERDLSKAKGELVAGIDLWPLVVRTTSFFFLKSSFDEFGRAFASTIRELDAAFAADDRNLEAMLESYQFMDTARKGPYKILQIVAVFIYIFHNLAEANGSDIVKEEVKLTNLALTMVFIVMGRVVERCLKTTPLDSCPLLPALLVFLDYLPFLLDKVEEEEEECRFDEKSKSAISYFFGKLVDILNQLKVKDKNCPAKTLLALWEDHELKSLAPLAPIHALLDFSSNMDLRESFDRGKELRLQRIISSAIDITTRQKKGSQKWLFFDNQRTHFYTTSGELQSNGELFHGNGEGRNRKCVTIGPVEIIPLENERSVPVEEEEVILLKPLVRCQSAPIYSSGIAAKPLSSDCTTSGNQTTTSNDSLRRTLSLIGSESFSFTQGLKDTDPQHLHLEEGTVSGRPPSLSAWVVDKNKEKGRLGLSKPNGLGPIDETGPVSAFDSLSINSSTEHPASSYSPPTPSAPLLPEDASWFHNDASTNKAESFYDQTRYMELPGIMKPYTNPPFVGISSSEWLRRYRESRNLGPAYSYQAQGTNNLRNFMAHGSSKFSLLARYGTPNDSSQNSTFHPQLYMEDHESRGEKLGNVQQSTTNPYGFSDDPGPFLRFLREKEWLNENGQRLRGPPPAYMNN

SEQ ID NO: 100947 - DNA, 1152 bp, Arabidopsis thaliana
  misc_feature (1)..(1152): Ceres Seq. ID no. 13606454
  misc_feature (1)..(1152): Ortholog of  Ceres SEQ ID NO 15174669 as cited in SEQ ID NO 59656
aaaaggaagtcaaaacttcagagagaaagtggatgggggacacgaaggtagagacaatctcgaggttagctcaatggagaattgaaaattttggtccttgttctttcaaaaagtccgatcctttcaaagtcggaatttggaattggcatctgtctatagagaggaatcgctatctatcagtgaggctattcccagaactttctcgagtatctaaagagcaacctcctgttgccaaatttgttcttcgtgtctccaacgttggccccaatcgtagattctacatctctcctgtttatgagaagctgctgcgtacaactgatgattgtgtgtggcatgttgactccagtttccacggtcgattcaccattgatgttgagtttcttgatctcaaaatctgccctgtgaatggtggtgaagcttctcctgtttggccaaccgatgcaacaatgcaatcaatctctactcaaaccactctcaaatgcttatcccggatgctagaggaaagcatactaaccgatgtaatcatccacacagccgatggaacactctctgctcacaaagctatcctctcagctagctcaactgttttcaaaagcatgttccaccacgacctcatggaaaaggaatcatccacaatccacatagacgacatgtcgagagaatcttgcatggctctactaagttacctctacggaaacataacccaagaagagttctggaaacacaggctcgccctcctcggcgctgcaaacaagtacgacataacggatttgaaagcagcctgcgaggagagcctaatggaagatataaactcgagtaatgtgctcgagaggctacaagaagcttggctttatcagctggagaaactgaagaaagggtgtttgatgtatttgtttgatttcggaaagatttatgatgtcagagaagaaatcagcagtttcttcaggcaagctgatcgagaactgatgctggagatgtttcaagaggttttgtctgtgtggaaaccggtctaatatacacttacacacatactttgaacatttcagcttgatggtgttttgtttatagtcttcttgttctcttctgtgtgtgtaactaacaacaactctggattttgttgtatcactctgtctaatgtatagtattgagtgg

SEQ ID NO: 100948 - protein, 336 aa, Arabidopsis thaliana
  peptide (1)..(336): Ceres Seq. ID no. 13606455
KEVKTSERKWMGDTKVETISRLAQWRIENFGPCSFKKSDPFKVGIWNWHLSIERNRYLSVRLFPELSRVSKEQPPVAKFVLRVSNVGPNRRFYISPVYEKLLRTTDDCVWHVDSSFHGRFTIDVEFLDLKICPVNGGEASPVWPTDATMQSISTQTTLKCLSRMLEESILTDVIIHTADGTLSAHKAILSASSTVFKSMFHHDLMEKESSTIHIDDMSRESCMALLSYLYGNITQEEFWKHRLALLGAANKYDITDLKAACEESLMEDINSSNVLERLQEAWLYQLEKLKKGCLMYLFDFGKIYDVREEISSFFRQADRELMLEMFQEVLSVWKPV

SEQ ID NO: 100949 - protein, 326 aa, Arabidopsis thaliana; identical to SEQ ID NO: 23514
  peptide (1)..(326): Ceres Seq. ID no. 13606456

SEQ ID NO: 100950 - protein, 188 aa, Arabidopsis thaliana; identical to SEQ ID NO: 23515
  peptide (1)..(188): Ceres Seq. ID no. 13606457

SEQ ID NO: 100951 - DNA, 1751 bp, Arabidopsis thaliana
  misc_feature (1)..(1751): Ceres Seq. ID no. 13606478
  misc_feature (1)..(1751): Ortholog of  Ceres SEQ ID NO 13662164 as cited in SEQ ID NO 67158
  misc_feature (1582)..(1582): n is a, c, t, g, unknown, or other
  misc_feature (1609)..(1609): n is a, c, t, g, unknown, or other
atgtcgcttgacataaagaaaccgaacatcaccaagacgaagaagaagaagacaggtttcgtcgtaaaaatgcagcttaataacaacagaggaggaaataaaagaaacatctttatcttcttcttcttcagaaactattacacatggatcctctggttttgcctctctctgtatttcttcacatcttacttctccgtcgaagaccaatcctcaccgtcgtcaatacgtctcttgtctaaccacaaaacgtcgtcgtctctcccatctcgtgctctcatcgaatcttccgccattaaaaccacctccattggtaaaaaagcctcgatctttatctcttctctgtttcaaatctttcacttctcctcaaaaattgattttttggggtctctgattaaaggtttgttcaccggaatgaagatatacgtttacgatttaccggcgagttataacgacgattgggttacagcatcagaccgttgcgctagccacctcttcgcggcggaggtagctatccaccgtgcacttctctcctccgacgtccgtacgttagacccagatgaagctgattacttcttcgtccctgtctacgtttcttgcaatttctccacatccaacggcttcccttctctaagccacgctcgctctctccttagctccgccgtcgattttctctccgatcattacccattttggaacaggagtcaaggctctgaccacgtcttcgtcgcttcccatgactttggcgcatgcttccacgcaatggaggatatggctatagaggaagggattccaaaatttatgaagagatcaataattttacaaacgtttggagttaagtacaagcatccatgtcaagaagtggaacatgttgtgattcctccttatattccaccggagagtgttcaaaaagctattgaaaaagctccggtgaacggacggcgagacatttgggcgtttttccggggaaaaatggaagtcaaccctaagaatattagcggacgcttttacagcaagggagtgagaacggcgattctaaagaaattcggaggaagaaggcggttttatctaaaccggcaccggtttgctggataccgatcagaaatcgtgagatcagtgttttgtctctgtcctttagggtgggcaccatggagtcctagactagtggaatccgccgtgttaggttgtgttcccgttgttatcgccgatgggattcaattaccgttctcggagacggtacaatggccggaaatctcactaacggtggcggagaaagacgtgaggaatctacgaaaggttttggaacacgtggcggctactaatttgtctgcaatacaaagaaacttacatgaaccggtgtttaagcgggccctcttgtacaatgtgccgatgaaagaaggagacgccacgtggcatattctcgagtcgttgtggaggaagctcgatgatcggtcgtacagaaggtcaagggttttaagccaacgagaagtcgacatgtaggattctgtgtntgaatggatgctaggctggaatttttcggactgtttcggaattggttaaccgggaatgtctcgagtggggtccncaacgtggattaactcgggcacgtganatgtttgctgagctggcaattattgagtggaatattaacgtgccaagggaagtgaaagtgtaaagtattgctgacgtgtaattcttttgatgagtaggcatataaattcttttgaatatagttgatcaaaatgcaaagttat

SEQ ID NO: 100952 - protein, 498 aa, Arabidopsis thaliana
  peptide (1)..(498): Ceres Seq. ID no. 13606479
MSLDIKKPNITKTKKKKTGFVVKMQLNNNRGGNKRNIFIFFFFRNYYTWILWFCLSLYFFTSYFSVEDQSSPSSIRLLSNHKTSSSLPSRALIESSAIKTTSIGKKASIFISSLFQIFHFSSKIDFLGSLIKGLFTGMKIYVYDLPASYNDDWVTASDRCASHLFAAEVAIHRALLSSDVRTLDPDEADYFFVPVYVSCNFSTSNGFPSLSHARSLLSSAVDFLSDHYPFWNRSQGSDHVFVASHDFGACFHAMEDMAIEEGIPKFMKRSIILQTFGVKYKHPCQEVEHVVIPPYIPPESVQKAIEKAPVNGRRDIWAFFRGKMEVNPKNISGRFYSKGVRTAILKKFGGRRRFYLNRHRFAGYRSEIVRSVFCLCPLGWAPWSPRLVESAVLGCVPVVIADGIQLPFSETVQWPEISLTVAEKDVRNLRKVLEHVAATNLSAIQRNLHEPVFKRALLYNVPMKEGDATWHILESLWRKLDDRSYRRSRVLSQREVDM

SEQ ID NO: 100953 - protein, 475 aa, Arabidopsis thaliana
  peptide (1)..(475): Ceres Seq. ID no. 13606480
MQLNNNRGGNKRNIFIFFFFRNYYTWILWFCLSLYFFTSYFSVEDQSSPSSIRLLSNHKTSSSLPSRALIESSAIKTTSIGKKASIFISSLFQIFHFSSKIDFLGSLIKGLFTGMKIYVYDLPASYNDDWVTASDRCASHLFAAEVAIHRALLSSDVRTLDPDEADYFFVPVYVSCNFSTSNGFPSLSHARSLLSSAVDFLSDHYPFWNRSQGSDHVFVASHDFGACFHAMEDMAIEEGIPKFMKRSIILQTFGVKYKHPCQEVEHVVIPPYIPPESVQKAIEKAPVNGRRDIWAFFRGKMEVNPKNISGRFYSKGVRTAILKKFGGRRRFYLNRHRFAGYRSEIVRSVFCLCPLGWAPWSPRLVESAVLGCVPVVIADGIQLPFSETVQWPEISLTVAEKDVRNLRKVLEHVAATNLSAIQRNLHEPVFKRALLYNVPMKEGDATWHILESLWRKLDDRSYRRSRVLSQREVDM

SEQ ID NO: 100954 - protein, 361 aa, Arabidopsis thaliana; identical to SEQ ID NO: 78151
  peptide (1)..(361): Ceres Seq. ID no. 13606481

SEQ ID NO: 100955 - DNA, 2015 bp, Arabidopsis thaliana
  misc_feature (1)..(2015): Ceres Seq. ID no. 13606506
  misc_feature (1)..(2015): Ortholog of  Ceres SEQ ID NO 15174638 as cited in SEQ ID NO 53185
  misc_feature (1)..(2015): Ortholog of  Ceres SEQ ID NO 13657460 as cited in SEQ ID NO 66115
  misc_feature (1)..(2015): Ortholog of  Ceres SEQ ID NO 13659394 as cited in SEQ ID NO 67049
acaggcgaaattataatggcctgcctctcttccttcttatctcttttacttacactctccaggtccctcacttccctcattggacctctctaactctcctctcttaccttctcctgtttaaattcttctcctttctttccacaatttctgtctaaccaattccaacaccaaaaaattccatttcttgacgatgaaacgaagccatcaagaaacgtctgtagaagaagaagctccttcaatggtggagaagttagaaaatggttgtggtggtggtggagacgataacatggacgagtttcttgctgttttgggttacaaggttcgatcttcagacatggcagatgttgcacagaagcttgaacagcttgaaatggtcttgtccaatgatattgcctcttctagtaatgccttcaatgacaccgttcattacaatccttctgatctctccggttgggctcagagcatgctctcggatcttaattactacccggatcttgacccgaaccggatttgcgatctgagaccaatcacagacgacgatgagtgttgcagtagcaatagtaacagcaacaagaggattcgactcggtccttggtgtgactcagtgaccagcgagtcaactcgttccgtggtgcttatcgaggagacaggagttagactcgttcaggcgctagtggcctgcgccgaggcggttcagctggagaatctgagcctcgcggatgctctcgtcaagcgcgtgggattactcgcggcttctcaagccggagccatggggaaagtcgctacctacttcgccgaagccctagctcgtcgaatttaccggattcatccttccgccgccgccattgatccttccttcgaagagattcttcagatgaacttctacgactcgtgtccctacctgaaattcgctcatttcacggccaatcaggcgattctagaagctgttacgacgtcgcgtgtcgtacacgtaatcgatctagggcttaatcaaggtatgcaatggccggcgttaatgcaagccttagctctccgacccggtggtccaccgtcgtttcgtctcaccggcgttgggaatccgtcgaatcgagaagggattcaagagttaggttggaagctagctcagctggctcaagccatcggcgtcgaattcaaattcaatggtctaacgacggagaggttatccgatttagaaccggatatgttcgagacccgaaccgaatcggagactctagtggttaattcggttttcgagcttcacccggttttatcccaacccggttcgatcgaaaagctgttagcgacggttaaggcggttaaaccgggtctcgtaacagtggtggaacaagaagcgaaccataacggtgacgttttcttagaccggtttaacgaagcgcttcactattactcgagcttgttcgactcgctcgaagatggtgttgtgataccgagtcaagaccgagtcatgtcggaggtttacttagggagacagatattgaacttggtggcgacggaaggaagcgataggatcgagcgacacgagacgctggctcagtggcgaaaacgtatgggatccgccgggtttgacccggttaacctcggatcagacgcgtttaagcaagcgagtttgctattggcgttatctggcggtggagatggatacagagtggaggagaacgacggaagcctaatgcttgcgtggcaaacgaaacctctaatcgctgcatcggcgtggaaactagcggcggagttgcggcggtagatacgtcgtcataaagaggagaagaaaaaagacttagcgaacgtgaccttatgtttttattttactttaacttaccccagtagtttcgttttgtgacaatttcgcccgaaatattccgtgccttatacttttgggacccagttggttcgttggtcgtggagattcgagaacgaggaacatgtgtgtatgtaacaacagcacgagcaagtgttttcatagtttgaataaatatgaaagaaatgacgtttatttt

SEQ ID NO: 100956 - protein, 523 aa, Arabidopsis thaliana
  peptide (1)..(523): Ceres Seq. ID no. 13606507
MKRSHQETSVEEEAPSMVEKLENGCGGGGDDNMDEFLAVLGYKVRSSDMADVAQKLEQLEMVLSNDIASSSNAFNDTVHYNPSDLSGWAQSMLSDLNYYPDLDPNRICDLRPITDDDECCSSNSNSNKRIRLGPWCDSVTSESTRSVVLIEETGVRLVQALVACAEAVQLENLSLADALVKRVGLLAASQAGAMGKVATYFAEALARRIYRIHPSAAAIDPSFEEILQMNFYDSCPYLKFAHFTANQAILEAVTTSRVVHVIDLGLNQGMQWPALMQALALRPGGPPSFRLTGVGNPSNREGIQELGWKLAQLAQAIGVEFKFNGLTTERLSDLEPDMFETRTESETLVVNSVFELHPVLSQPGSIEKLLATVKAVKPGLVTVVEQEANHNGDVFLDRFNEALHYYSSLFDSLEDGVVIPSQDRVMSEVYLGRQILNLVATEGSDRIERHETLAQWRKRMGSAGFDPVNLGSDAFKQASLLLALSGGGDGYRVEENDGSLMLAWQTKPLIAASAWKLAAELRR

SEQ ID NO: 100957 - protein, 507 aa, Arabidopsis thaliana
  peptide (1)..(507): Ceres Seq. ID no. 13606508
MVEKLENGCGGGGDDNMDEFLAVLGYKVRSSDMADVAQKLEQLEMVLSNDIASSSNAFNDTVHYNPSDLSGWAQSMLSDLNYYPDLDPNRICDLRPITDDDECCSSNSNSNKRIRLGPWCDSVTSESTRSVVLIEETGVRLVQALVACAEAVQLENLSLADALVKRVGLLAASQAGAMGKVATYFAEALARRIYRIHPSAAAIDPSFEEILQMNFYDSCPYLKFAHFTANQAILEAVTTSRVVHVIDLGLNQGMQWPALMQALALRPGGPPSFRLTGVGNPSNREGIQELGWKLAQLAQAIGVEFKFNGLTTERLSDLEPDMFETRTESETLVVNSVFELHPVLSQPGSIEKLLATVKAVKPGLVTVVEQEANHNGDVFLDRFNEALHYYSSLFDSLEDGVVIPSQDRVMSEVYLGRQILNLVATEGSDRIERHETLAQWRKRMGSAGFDPVNLGSDAFKQASLLLALSGGGDGYRVEENDGSLMLAWQTKPLIAASAWKLAAELRR

SEQ ID NO: 100958 - protein, 491 aa, Arabidopsis thaliana
  peptide (1)..(491): Ceres Seq. ID no. 13606509
MDEFLAVLGYKVRSSDMADVAQKLEQLEMVLSNDIASSSNAFNDTVHYNPSDLSGWAQSMLSDLNYYPDLDPNRICDLRPITDDDECCSSNSNSNKRIRLGPWCDSVTSESTRSVVLIEETGVRLVQALVACAEAVQLENLSLADALVKRVGLLAASQAGAMGKVATYFAEALARRIYRIHPSAAAIDPSFEEILQMNFYDSCPYLKFAHFTANQAILEAVTTSRVVHVIDLGLNQGMQWPALMQALALRPGGPPSFRLTGVGNPSNREGIQELGWKLAQLAQAIGVEFKFNGLTTERLSDLEPDMFETRTESETLVVNSVFELHPVLSQPGSIEKLLATVKAVKPGLVTVVEQEANHNGDVFLDRFNEALHYYSSLFDSLEDGVVIPSQDRVMSEVYLGRQILNLVATEGSDRIERHETLAQWRKRMGSAGFDPVNLGSDAFKQASLLLALSGGGDGYRVEENDGSLMLAWQTKPLIAASAWKLAAELRR

SEQ ID NO: 100959 - DNA, 1238 bp, Arabidopsis thaliana
  misc_feature (1)..(1238): Ceres Seq. ID no. 13606510
  misc_feature (1)..(1238): Ortholog of  Ceres SEQ ID NO 13638097 as cited in SEQ ID NO 57043
  misc_feature (1)..(1238): Ortholog of  Ceres SEQ ID NO 13596416 as cited in SEQ ID NO 62177
  misc_feature (1)..(1238): Ortholog of  Ceres SEQ ID NO 13659338 as cited in SEQ ID NO 66875
atcttccttatctctctccgccactctccttctctttctccgaactcttcgatggccggtctactcaaaacgccgtctttacatctcacaccaactcttcttcatgctccttctgtaccctttaagcccttttgcgtatctttcgccggaggaagaaacgttagcgtctcactctctcgccgagcttctctccggtctgtctctagcggctatcctctccgcttactaaacctcgtaccctttgcttcgggagaagctgagacgacggagacggaggtggaatcgaacgaacccgaagagacggatggtgctgttgatgtcgagaatgaaaatgccagtgctgaggagggtgaagctgaggaagaagaagcagctgttatcacagcgttgctgaaatcctataaagaagctttagcagacaacaacgaggggaagattgctgagatagaagcatctttaaagtccatagaagatgaaaaatttctgcttgcggataaagtagcgtctttatccaatgagttatcggtggagagggatcggcttataagaatcagtgcagatttcgacaacttcaggaagaggactgagagggaaaggctaaaccttgtttcaaatgctcaaggagaggttgtagagaatcttttggctgttttggataatttcgagagagctaaatcccaaattaaggtggagactgagggagaagagaaagtcactaatagctatcagagcatatacaaacagtttgtagaaattctgggatcacttggtgttatccatgtggagacagtcggcaagcagtttgatccaatgctacatgaggcaataatgagagaagactctgcggaatacgaagagggtatagtactagaagaatacaggaaaggtttcttgctaggtgaaaggcttttacgtccttcaatggtgaaagtatcagctggacctggaccagaaaagccccttgaagctgaaggagaagaagccacagcacaaggaagcgcagaagaagaatcatcttcatcttgaaattgaagatgatcaagactcagcagttttgtgtgcgtgtgtgtgagagagatacagagataaaagagggagaggtctgttttaccattattgttgttattgttattgatacgttatatcatttctacagagtctagaagtaatatagatcgacatttttaatgaattcttaagtattcaatccgaaagggaatgccataattgattttttt

SEQ ID NO: 100960 - protein, 341 aa, Arabidopsis thaliana
  peptide (1)..(341): Ceres Seq. ID no. 13606511
IFLISLRHSPSLSPNSSMAGLLKTPSLHLTPTLLHAPSVPFKPFCVSFAGGRNVSVSLSRRASLRSVSSGYPLRLLNLVPFASGEAETTETEVESNEPEETDGAVDVENENASAEEGEAEEEEAAVITALLKSYKEALADNNEGKIAEIEASLKSIEDEKFLLADKVASLSNELSVERDRLIRISADFDNFRKRTERERLNLVSNAQGEVVENLLAVLDNFERAKSQIKVETEGEEKVTNSYQSIYKQFVEILGSLGVIHVETVGKQFDPMLHEAIMREDSAEYEEGIVLEEYRKGFLLGERLLRPSMVKVSAGPGPEKPLEAEGEEATAQGSAEEESSSS

SEQ ID NO: 100961 - protein, 324 aa, Arabidopsis thaliana
  peptide (1)..(324): Ceres Seq. ID no. 13606512
MAGLLKTPSLHLTPTLLHAPSVPFKPFCVSFAGGRNVSVSLSRRASLRSVSSGYPLRLLNLVPFASGEAETTETEVESNEPEETDGAVDVENENASAEEGEAEEEEAAVITALLKSYKEALADNNEGKIAEIEASLKSIEDEKFLLADKVASLSNELSVERDRLIRISADFDNFRKRTERERLNLVSNAQGEVVENLLAVLDNFERAKSQIKVETEGEEKVTNSYQSIYKQFVEILGSLGVIHVETVGKQFDPMLHEAIMREDSAEYEEGIVLEEYRKGFLLGERLLRPSMVKVSAGPGPEKPLEAEGEEATAQGSAEEESSSS

SEQ ID NO: 100962 - DNA, 2295 bp, Arabidopsis thaliana
  misc_feature (1)..(2295): Ceres Seq. ID no. 13606516
  misc_feature (1)..(2295): Ortholog of  Ceres SEQ ID NO 13595900 as cited in SEQ ID NO 69289
atgccagagttaagaagtggagcacgtagattgagacaacctagccctcaggtgactggtcaggcggataatattgaacttcctcctcagcctgtaacaaggagaagaggcggtggtggtagaggaaggggaaacgccaaaggtgctgcacctccaagaccagctggtggtgtcggtaggggtcgaggcatcagattaatagatttagaggcagaaccttgtgaagttcgtccagcagtaggtgaacctgcttttaatcaagttgaagcggtagctgaaaaggatattgctatggaaggtggtagcgcagagaaggtagttggtgtggaagaagattctagcacagctccagtccctgaaagggtacaagttggaaattctcctgtatataagactgagaggaaactcggtaaaggaggctttggtcaagtttttgttggtagaagggtgagtggtggcagcgataggattggggccgatgcaattgaggtggccctgaaatttgagcatcgaaatagcaaaggatgcaattttggtccaccttacgagtggcaagtgtacaataccctcaatggttgctatggagttcctgcggtacatcataagggtcgtcaaggagatttttacattcttgtcatggacatgcttggtccgagtctctgggatgtttggaattcttcggggcaatcgatgtctccaaacatggtagcctgcattgcagttgagtccatatctattcttgagaaacttcatatgaaagggtttgtccacggagatgtgaagccggaaaactttttactcggtcaaccaggaacagcagatgagaaaaaactctaccttatcgatcttggtctggcatctaaatggaaagattcacactcaggccagcatgttgaatatgatcaaagacctgatgtgttcaggggaacgataaggtatgcaagtgttcatgcacacctaggtcgaactggaagtaggagagatgatctggagtcgctggcttatactttaatttttcttttgaagggaagattgccatggcaaggatatcagggtgacaacaagagctttcttgtttgcaagaaaaagatgtcaacttctcctgaattgatgtgctgtttttgtccacccccgtttaagctcttcctcgaggcagttacaaacatgaagtttgacgaagagcccaactatgcaaagcttatttcgatttttgattctcttattgaacaatgtgcactatctagaccaattaaaattgatggtgctcttaaggttgggcaaaaacgaggaagaatgcttcttaatttggatgaggatgaacagccaaagaagaaaatcagaattggcagtcctgcttgtcagtggatctcagtctataatgctcgtcgtcccatgaaacagagatatcactacaacgttgcagactcaaggttgcatcagcatgtacagaagggtaatgaggatggccttttaattagctgtgtagcatcagcagctaatctctgggccctcataatggatgctgggactggattcacctctcaagtttatgaattgtcaactgtcttccttcacaaggactggattatggaacaatgggaaaagaactactatatcagttccatagctggttcagataacgggaactcattagttgttatgtcaaaaggaacgtcttatactcagcaatcttacaaagtcagcgactcttttcctttcaagtggataaacaagaaatggaaagaagatttccatgtaacctccatgacaactgctgggaatcgttggggtgtggtaatgtcgaggaattctggctactctgatcaggtcgtggagctcgactttttgtacccaagcgatggaatacataggaggtgggaaagtgggtataggataacatcaatggcagcaactgcagatcaagcagctttcatattaagcgtaccaaaacgtaaaatgatggatgaaactcaagagactcttcgcaccaccgcctttccaagcactcatgtcaaggaaaaatgggcgaaaaatctgtacattgcatcaatatgctttgggaggacagtttgctgaggtacttagcatcatatgaaagccaagaagacaattggaggataaggatcataatacgatcaagaaggtaacgcaacctgtttgttaaatgtaatgaaatggatgcgtgttcgtatgtatgtagaagtataaaaggatagaaaagatggtaacagagaagttgaattagttttaatagaaagttttgagggctttttaagccttcaagtgtgcttactt

SEQ ID NO: 100963 - protein, 691 aa, Arabidopsis thaliana
  peptide (1)..(691): Ceres Seq. ID no. 13606517
MPELRSGARRLRQPSPQVTGQADNIELPPQPVTRRRGGGGRGRGNAKGAAPPRPAGGVGRGRGIRLIDLEAEPCEVRPAVGEPAFNQVEAVAEKDIAMEGGSAEKVVGVEEDSSTAPVPERVQVGNSPVYKTERKLGKGGFGQVFVGRRVSGGSDRIGADAIEVALKFEHRNSKGCNFGPPYEWQVYNTLNGCYGVPAVHHKGRQGDFYILVMDMLGPSLWDVWNSSGQSMSPNMVACIAVESISILEKLHMKGFVHGDVKPENFLLGQPGTADEKKLYLIDLGLASKWKDSHSGQHVEYDQRPDVFRGTIRYASVHAHLGRTGSRRDDLESLAYTLIFLLKGRLPWQGYQGDNKSFLVCKKKMSTSPELMCCFCPPPFKLFLEAVTNMKFDEEPNYAKLISIFDSLIEQCALSRPIKIDGALKVGQKRGRMLLNLDEDEQPKKKIRIGSPACQWISVYNARRPMKQRYHYNVADSRLHQHVQKGNEDGLLISCVASAANLWALIMDAGTGFTSQVYELSTVFLHKDWIMEQWEKNYYISSIAGSDNGNSLVVMSKGTSYTQQSYKVSDSFPFKWINKKWKEDFHVTSMTTAGNRWGVVMSRNSGYSDQVVELDFLYPSDGIHRRWESGYRITSMAATADQAAFILSVPKRKMMDETQETLRTTAFPSTHVKEKWAKNLYIASICFGRTVC

SEQ ID NO: 100964 - protein, 594 aa, Arabidopsis thaliana
  peptide (1)..(594): Ceres Seq. ID no. 13606518
MEGGSAEKVVGVEEDSSTAPVPERVQVGNSPVYKTERKLGKGGFGQVFVGRRVSGGSDRIGADAIEVALKFEHRNSKGCNFGPPYEWQVYNTLNGCYGVPAVHHKGRQGDFYILVMDMLGPSLWDVWNSSGQSMSPNMVACIAVESISILEKLHMKGFVHGDVKPENFLLGQPGTADEKKLYLIDLGLASKWKDSHSGQHVEYDQRPDVFRGTIRYASVHAHLGRTGSRRDDLESLAYTLIFLLKGRLPWQGYQGDNKSFLVCKKKMSTSPELMCCFCPPPFKLFLEAVTNMKFDEEPNYAKLISIFDSLIEQCALSRPIKIDGALKVGQKRGRMLLNLDEDEQPKKKIRIGSPACQWISVYNARRPMKQRYHYNVADSRLHQHVQKGNEDGLLISCVASAANLWALIMDAGTGFTSQVYELSTVFLHKDWIMEQWEKNYYISSIAGSDNGNSLVVMSKGTSYTQQSYKVSDSFPFKWINKKWKEDFHVTSMTTAGNRWGVVMSRNSGYSDQVVELDFLYPSDGIHRRWESGYRITSMAATADQAAFILSVPKRKMMDETQETLRTTAFPSTHVKEKWAKNLYIASICFGRTVC

SEQ ID NO: 100965 - protein, 479 aa, Arabidopsis thaliana
  peptide (1)..(479): Ceres Seq. ID no. 13606519
MDMLGPSLWDVWNSSGQSMSPNMVACIAVESISILEKLHMKGFVHGDVKPENFLLGQPGTADEKKLYLIDLGLASKWKDSHSGQHVEYDQRPDVFRGTIRYASVHAHLGRTGSRRDDLESLAYTLIFLLKGRLPWQGYQGDNKSFLVCKKKMSTSPELMCCFCPPPFKLFLEAVTNMKFDEEPNYAKLISIFDSLIEQCALSRPIKIDGALKVGQKRGRMLLNLDEDEQPKKKIRIGSPACQWISVYNARRPMKQRYHYNVADSRLHQHVQKGNEDGLLISCVASAANLWALIMDAGTGFTSQVYELSTVFLHKDWIMEQWEKNYYISSIAGSDNGNSLVVMSKGTSYTQQSYKVSDSFPFKWINKKWKEDFHVTSMTTAGNRWGVVMSRNSGYSDQVVELDFLYPSDGIHRRWESGYRITSMAATADQAAFILSVPKRKMMDETQETLRTTAFPSTHVKEKWAKNLYIASICFGRTVC

SEQ ID NO: 100966 - DNA, 1817 bp, Arabidopsis thaliana
  misc_feature (1)..(1817): Ceres Seq. ID no. 13606552
  misc_feature (1)..(1817): Ortholog of  Ceres SEQ ID NO 15178767 as cited in SEQ ID NO 55317
caatcgaaccctattcctcactgaccctgacgtttatggcagaggaaggattcatcggaattggagaaagcgaagaagaagcggcagagatcggcgctttctcctacagccaccaccagatctctgacctgcgacgaagaagttgactgaaacaattatttgtttcgtggctggaatccatggggaagggccccttatcgtttcgccgtctttcaagcatccgtcaccggaaaaaaggttctgcggtgaaggatgactccgcacagacatcgacgccttcatctccaccgcctcccctaccgattcatgctggcggatcggctgtgggagcgacggggaaggcgaagaagaaaaccggaggagctaggctgtggatgaggtttgatcggactggtgctatggaagtggtggagtgcgataagagtacaatcatcaaacgtgcttctgttcccgctagggatttgaggatacttggccctgtcttctctcactcctctaacattctcgccagagagaaagctattgttgtgaatttagaggtcataaaggcaatagttactgcagaagaagtgttgttgttggatcctctccgtcctgaagttcttccattcgttgaacgactaaagcaacagtttcctcagaggaatgggaatgaaaatgcactgcaagcttctgcgaatgtacaatctcctcttgatccagaagctgcagagggtttgcagagtgagcttccttttgagtttcaggtcctggagattgcacttgaggtcgtctgctcatttgttgataaaagtgtggctgctcttgagacagaagcttggcctgtccttgatgaactcactaagaatgtcagcactgagaatcttgaatatgtacgaagtttgaaaagtaatctcacccgcttgctagctcgtgtacaaaaggtgagagatgaactcgagcatttgttagatgacaacgaagacatggctgacttatacttaacaaggaaatggatccagaaccagcaaaccgaggcaatactggcgggtacagcatcaaacagcattgccctcccagcacataatacatcaaatcttcaccggctcacatcaaacagaagtgcgagtatggtgacgagcaatacagaggaagatgacgtggaggatttggagatgttgttggaggcatacttcatgcaactggatggaatgcggaacaagattcttacagtgagggagtacattgacgacacagaagactacgtgaacattcaactggataatcaacgaaacgaactgatccagctgcagctgacgctgaccatagcctcgtttgcaatagccgcagagacattgttggccagcttgtttggaatgaacataccatgtccattgtatagcatacatggcgtctttggttactttgtgtggagtgttactgcactttgcattgtgcttttcatggtcactcttggttacgccaggtggaagaagctgctaggctcataatctccctctctcttacaaaccatgtgccacttgtgtaataatttatacatatgttactggacagagttgtttcactcatatcttgtccagtgaagacgttagtgattcatatatgttgttgaggaacacatgtagatggaaatgatataagagtatatatgttgaagagaattatattcagacatcgaagtcattaaaatgtttaaactaattgtgcacataattgaactcttcaactagtttgctctcttctcaaagctctctcttattactcttccaatgatttttctctatattcctcacacaaaacattcatcctctaccttg

SEQ ID NO: 100967 - protein, 436 aa, Arabidopsis thaliana
  peptide (1)..(436): Ceres Seq. ID no. 13606553
MGKGPLSFRRLSSIRHRKKGSAVKDDSAQTSTPSSPPPPLPIHAGGSAVGATGKAKKKTGGARLWMRFDRTGAMEVVECDKSTIIKRASVPARDLRILGPVFSHSSNILAREKAIVVNLEVIKAIVTAEEVLLLDPLRPEVLPFVERLKQQFPQRNGNENALQASANVQSPLDPEAAEGLQSELPFEFQVLEIALEVVCSFVDKSVAALETEAWPVLDELTKNVSTENLEYVRSLKSNLTRLLARVQKVRDELEHLLDDNEDMADLYLTRKWIQNQQTEAILAGTASNSIALPAHNTSNLHRLTSNRSASMVTSNTEEDDVEDLEMLLEAYFMQLDGMRNKILTVREYIDDTEDYVNIQLDNQRNELIQLQLTLTIASFAIAAETLLASLFGMNIPCPLYSIHGVFGYFVWSVTALCIVLFMVTLGYARWKKLLGS

SEQ ID NO: 100968 - protein, 371 aa, Arabidopsis thaliana
  peptide (1)..(371): Ceres Seq. ID no. 13606554
MRFDRTGAMEVVECDKSTIIKRASVPARDLRILGPVFSHSSNILAREKAIVVNLEVIKAIVTAEEVLLLDPLRPEVLPFVERLKQQFPQRNGNENALQASANVQSPLDPEAAEGLQSELPFEFQVLEIALEVVCSFVDKSVAALETEAWPVLDELTKNVSTENLEYVRSLKSNLTRLLARVQKVRDELEHLLDDNEDMADLYLTRKWIQNQQTEAILAGTASNSIALPAHNTSNLHRLTSNRSASMVTSNTEEDDVEDLEMLLEAYFMQLDGMRNKILTVREYIDDTEDYVNIQLDNQRNELIQLQLTLTIASFAIAAETLLASLFGMNIPCPLYSIHGVFGYFVWSVTALCIVLFMVTLGYARWKKLLGS

SEQ ID NO: 100969 - protein, 363 aa, Arabidopsis thaliana
  peptide (1)..(363): Ceres Seq. ID no. 13606555
MEVVECDKSTIIKRASVPARDLRILGPVFSHSSNILAREKAIVVNLEVIKAIVTAEEVLLLDPLRPEVLPFVERLKQQFPQRNGNENALQASANVQSPLDPEAAEGLQSELPFEFQVLEIALEVVCSFVDKSVAALETEAWPVLDELTKNVSTENLEYVRSLKSNLTRLLARVQKVRDELEHLLDDNEDMADLYLTRKWIQNQQTEAILAGTASNSIALPAHNTSNLHRLTSNRSASMVTSNTEEDDVEDLEMLLEAYFMQLDGMRNKILTVREYIDDTEDYVNIQLDNQRNELIQLQLTLTIASFAIAAETLLASLFGMNIPCPLYSIHGVFGYFVWSVTALCIVLFMVTLGYARWKKLLGS

SEQ ID NO: 100970 - DNA, 1836 bp, Arabidopsis thaliana
  misc_feature (1)..(1836): Ceres Seq. ID no. 13606566
  misc_feature (1)..(1836): Ortholog of  Ceres SEQ ID NO 14309715 as cited in SEQ ID NO 55353
  misc_feature (1)..(1836): Ortholog of  Ceres SEQ ID NO 13595521 as cited in SEQ ID NO 59840
atgactacgtttctgaagtcactcatcttcttacaagattcatgtcttgccttcctctctctaatgttccatcgagggagttctgaggatgcagctgaagctctcaagaagcttgaaacatccataaatggtgcgaggataagcttcgacacgacatggacacgagaatttaggagcttatttatagttcccttattcaagtgtttggtggctttttgtttgataatctccctcttagttttcatagagggtatatacatgaaccttgtagtactctacgtcaaggtgtttgagcgaaaacccgaaaaagtttatagatgggaggcgatgcaagaggacattgagcttggacatgaaacctaccccatggtccttgtccaaattccaatgtacaacgaaaaagaggtccttcaattatctataggtgctgcatgtagactaatatggccattggaccgcctaattgttcaagttttagatgattccactgatcaaaccatcaaggagctggtgaacacagagtgtgcaaaatgggaaagcaaaggtgtaaatataaagtgtgagaggagagacaacagaaatggctacaaagccggagctcttaaagaaggcatgaagcacaactacgtgaagctatgcaattatgtcgtcatcttcgacgcagacttccaaccggagcctgattacctccaacactctgtccccttcctcgttcataaccccgaggtcgctctggttcaagcccgatggagattcatgaacgcaaacaagtgcttgatgacgaggatgcaagagatgtccctcaactaccactttatggcagagcaagaatctggatccactagacatgccttctttagcttcaatggaactgcgggtgtatggagaatggccgcgatggaagaagctggaggatggcatgaccggactactgtagaggacatggacttggccgttcgtgctggtcttctcggctggaaatttgtctttctcaatgacctcacggtgaaaagcgagttaccaagcaagtttaaggcctttagattccagcaacatcgatggtcttgtggtccagctaatctcttcaggaaaatgattatggagattattcgcaataagagagtgacgatttggaagaagttgtatctggtctacagcttctttttcttacggaagatcatagtccactgcttcacttttattttctactgtgttattcttcctacaagtgtcttctttcccgaagtcaacattccagcttggtcaactttttacattccctctatgatcactctctgcattgtcattgcgacaccaagatcattctacctcgtgatattttggatcttgtttgaaaacgtaatgtctatgcaccggacaaaaggaactttcatcggcatactcgaaagacaaagagtgaacgaatgggttgtcactgagaaattaggagatgctcttaagactaagctacttcctaggattggaaaacctagtaacatgtttcttgaaagagtaaactccaaggagataatggtggggatatacatcttgtgttgtgcttgctatggacttttctttgggaacacattgttatatctctatctcttcatgcaagcggttgcttttctcatatctggagttggctttgtcggcacttaaatattgatcacatttagacctcaattttagtgtctagctcttcaacaagttagttcatgctttgattactcagtctcaagttaattgtgtaaatttagattgataatttctagatgttttgtctagctacgttagttttatatcttgaatatcgaataagatggtgttgattgttat

SEQ ID NO: 100971 - protein, 552 aa, Arabidopsis thaliana
  peptide (1)..(552): Ceres Seq. ID no. 13606567
MTTFLKSLIFLQDSCLAFLSLMFHRGSSEDAAEALKKLETSINGARISFDTTWTREFRSLFIVPLFKCLVAFCLIISLLVFIEGIYMNLVVLYVKVFERKPEKVYRWEAMQEDIELGHETYPMVLVQIPMYNEKEVLQLSIGAACRLIWPLDRLIVQVLDDSTDQTIKELVNTECAKWESKGVNIKCERRDNRNGYKAGALKEGMKHNYVKLCNYVVIFDADFQPEPDYLQHSVPFLVHNPEVALVQARWRFMNANKCLMTRMQEMSLNYHFMAEQESGSTRHAFFSFNGTAGVWRMAAMEEAGGWHDRTTVEDMDLAVRAGLLGWKFVFLNDLTVKSELPSKFKAFRFQQHRWSCGPANLFRKMIMEIIRNKRVTIWKKLYLVYSFFFLRKIIVHCFTFIFYCVILPTSVFFPEVNIPAWSTFYIPSMITLCIVIATPRSFYLVIFWILFENVMSMHRTKGTFIGILERQRVNEWVVTEKLGDALKTKLLPRIGKPSNMFLERVNSKEIMVGIYILCCACYGLFFGNTLLYLYLFMQAVAFLISGVGFVGT

SEQ ID NO: 100972 - protein, 531 aa, Arabidopsis thaliana
  peptide (1)..(531): Ceres Seq. ID no. 13606568
MFHRGSSEDAAEALKKLETSINGARISFDTTWTREFRSLFIVPLFKCLVAFCLIISLLVFIEGIYMNLVVLYVKVFERKPEKVYRWEAMQEDIELGHETYPMVLVQIPMYNEKEVLQLSIGAACRLIWPLDRLIVQVLDDSTDQTIKELVNTECAKWESKGVNIKCERRDNRNGYKAGALKEGMKHNYVKLCNYVVIFDADFQPEPDYLQHSVPFLVHNPEVALVQARWRFMNANKCLMTRMQEMSLNYHFMAEQESGSTRHAFFSFNGTAGVWRMAAMEEAGGWHDRTTVEDMDLAVRAGLLGWKFVFLNDLTVKSELPSKFKAFRFQQHRWSCGPANLFRKMIMEIIRNKRVTIWKKLYLVYSFFFLRKIIVHCFTFIFYCVILPTSVFFPEVNIPAWSTFYIPSMITLCIVIATPRSFYLVIFWILFENVMSMHRTKGTFIGILERQRVNEWVVTEKLGDALKTKLLPRIGKPSNMFLERVNSKEIMVGIYILCCACYGLFFGNTLLYLYLFMQAVAFLISGVGFVGT

SEQ ID NO: 100973 - protein, 466 aa, Arabidopsis thaliana
  peptide (1)..(466): Ceres Seq. ID no. 13606569
MNLVVLYVKVFERKPEKVYRWEAMQEDIELGHETYPMVLVQIPMYNEKEVLQLSIGAACRLIWPLDRLIVQVLDDSTDQTIKELVNTECAKWESKGVNIKCERRDNRNGYKAGALKEGMKHNYVKLCNYVVIFDADFQPEPDYLQHSVPFLVHNPEVALVQARWRFMNANKCLMTRMQEMSLNYHFMAEQESGSTRHAFFSFNGTAGVWRMAAMEEAGGWHDRTTVEDMDLAVRAGLLGWKFVFLNDLTVKSELPSKFKAFRFQQHRWSCGPANLFRKMIMEIIRNKRVTIWKKLYLVYSFFFLRKIIVHCFTFIFYCVILPTSVFFPEVNIPAWSTFYIPSMITLCIVIATPRSFYLVIFWILFENVMSMHRTKGTFIGILERQRVNEWVVTEKLGDALKTKLLPRIGKPSNMFLERVNSKEIMVGIYILCCACYGLFFGNTLLYLYLFMQAVAFLISGVGFVGT

SEQ ID NO: 100974 - DNA, 1615 bp, Arabidopsis thaliana
  misc_feature (1)..(1615): Ceres Seq. ID no. 13606570
  misc_feature (1)..(1615): Ortholog of  Ceres SEQ ID NO 14311854 as cited in SEQ ID NO 51455
  misc_feature (1)..(1615): Ortholog of  Ceres SEQ ID NO 14313097 as cited in SEQ ID NO 58902
gactctttcataaccaatctttcttcttcttcttcttcttcttcttcctctttccttatctctccatctctgtggagagacacaaaacttccaaaaaggaacattctttcagttctttacttaatctttcacaatgctaaatcattagccgttgataaagtcttaatctttgattcattcaaacgcgtttttgtttagtaatgtcgtcgcgtttttctttgacggtggtgtgtttgattgctctgttaccgtttgttgttggtatacggttgattccggcgaggatcacgagtgtcggtgatggcggcggcggaggaggtaataatgggtttagtaaacttggtccgtttatggaagctccggagtatagaaacggcaaggagtgtgtatcttcatcagtgaacagagagaacttcgtgtcgtcttcttctagttctaatgatccttcgcttgttcacatcgctatgactttggactcagagtatctccgtggatcaatcgcagccgttcattctgttcttcgccacgcgtcttgtccagagaacgtcttcttccatttcatcgctgctgagtttgactctgcgagtcctcgtgttctgagtcaactcgtgaggtcgacttttccttcgttgaactttaaagtctacatttttagggaagatacggtgatcaatctcatatcttcttcgattagactagctttggagaatccgttgaactatgctcggaactatctcggagatattcttgatcgaagtgttgaacgagtcatttatcttgactcggatgttataactgtggatgatatcacaaagctttggaacacggttttgaccgggtcacgagtcatcggagctccggagtattgtcacgcgaacttcactcagtatttcacttccgggttctggtcagacccggctttaccgggtctaatctcgggtcaaaagccttgctatttcaacacaggagtgatggtgatggatcttgttagatggagagaagggaattacagagagaagttagagcaatggatgcaattgcagaagaagatgagaatctacgatcttggatcattaccaccgtttcttttggtgtttgcgggtaatgttgaagctattgatcatagatggaaccaacatggtttaggaggagacaatatacgaggaagttgtcggtcattgcatcctggtcctgtgagcttgttgcattggagtggtaaaggtaagccatgggttagacttgatgagaagaggccttgtccgttggatcatctttgggagccatatgatttgtataagcataagattgagagagctaaagatcagtctctgcttgggtttgcttctctgtcggagttgactgatgattcaagcttcttgtgagagttttaaagttacattctttttcaatatcttctgttgtattacagatgaaatatcattgttcaggtgagtgattctttgattttctgttgtacaaatctattttagagagggaagatatatattaggctgtggaaaagccattgatgatcctttttgttgagaattctttgtcattctggcgctcttgtgtttcaatcttttcttcttaataaaactcatcttgaagtgcc

SEQ ID NO: 100975 - protein, 393 aa, Arabidopsis thaliana
  peptide (1)..(393): Ceres Seq. ID no. 13606571
MSSRFSLTVVCLIALLPFVVGIRLIPARITSVGDGGGGGGNNGFSKLGPFMEAPEYRNGKECVSSSVNRENFVSSSSSSNDPSLVHIAMTLDSEYLRGSIAAVHSVLRHASCPENVFFHFIAAEFDSASPRVLSQLVRSTFPSLNFKVYIFREDTVINLISSSIRLALENPLNYARNYLGDILDRSVERVIYLDSDVITVDDITKLWNTVLTGSRVIGAPEYCHANFTQYFTSGFWSDPALPGLISGQKPCYFNTGVMVMDLVRWREGNYREKLEQWMQLQKKMRIYDLGSLPPFLLVFAGNVEAIDHRWNQHGLGGDNIRGSCRSLHPGPVSLLHWSGKGKPWVRLDEKRPCPLDHLWEPYDLYKHKIERAKDQSLLGFASLSELTDDSSFL

SEQ ID NO: 100976 - protein, 343 aa, Arabidopsis thaliana
  peptide (1)..(343): Ceres Seq. ID no. 13606572
MEAPEYRNGKECVSSSVNRENFVSSSSSSNDPSLVHIAMTLDSEYLRGSIAAVHSVLRHASCPENVFFHFIAAEFDSASPRVLSQLVRSTFPSLNFKVYIFREDTVINLISSSIRLALENPLNYARNYLGDILDRSVERVIYLDSDVITVDDITKLWNTVLTGSRVIGAPEYCHANFTQYFTSGFWSDPALPGLISGQKPCYFNTGVMVMDLVRWREGNYREKLEQWMQLQKKMRIYDLGSLPPFLLVFAGNVEAIDHRWNQHGLGGDNIRGSCRSLHPGPVSLLHWSGKGKPWVRLDEKRPCPLDHLWEPYDLYKHKIERAKDQSLLGFASLSELTDDSSFL

SEQ ID NO: 100977 - protein, 305 aa, Arabidopsis thaliana
  peptide (1)..(305): Ceres Seq. ID no. 13606573
MTLDSEYLRGSIAAVHSVLRHASCPENVFFHFIAAEFDSASPRVLSQLVRSTFPSLNFKVYIFREDTVINLISSSIRLALENPLNYARNYLGDILDRSVERVIYLDSDVITVDDITKLWNTVLTGSRVIGAPEYCHANFTQYFTSGFWSDPALPGLISGQKPCYFNTGVMVMDLVRWREGNYREKLEQWMQLQKKMRIYDLGSLPPFLLVFAGNVEAIDHRWNQHGLGGDNIRGSCRSLHPGPVSLLHWSGKGKPWVRLDEKRPCPLDHLWEPYDLYKHKIERAKDQSLLGFASLSELTDDSSFL

SEQ ID NO: 100978 - DNA, 1661 bp, Arabidopsis thaliana
  misc_feature (1)..(1661): Ceres Seq. ID no. 13606582
  misc_feature (1)..(1661): Ortholog of  Ceres SEQ ID NO 13594380 as cited in SEQ ID NO 58039
  misc_feature (1)..(1661): Ortholog of  Ceres SEQ ID NO 13597407 as cited in SEQ ID NO 64106
  misc_feature (1)..(1661): Ortholog of  Ceres SEQ ID NO 15180690 as cited in SEQ ID NO 0
aatgtattctctttgttcatttggttttacaaccaaaaaaaaaacaaaaaaaaacacttcatgcgtaagacataagcaaaatggccggtggaggattggctcttgatgtctccagcgccggaaacattgatgccaagatcacagccgcagttgtcatgagttgcattgtggctgcctcatgtggtctcatttttggctatgacatcggaatctcagggggtgtgacgactatgaagccgtttcttgagaaattctttccatcggttcttaaaaaagcttcggaagctaagacgaatgtctactgcgtctacgacagccaacttcttacggccttcacatctagcctttatgttgccggcttagtagcttccttagtggctagccgtctcacagcggcttatggtcgccgaaccaccatgatccttggcggtttcactttcctctttggtgctctgatcaatggcttagctgctaacatcgccatgctcatctccggtcggattttgctaggatttggtgtcggtttcaccaaccaggcggctccggtatatctatcggaagtagcaccaccgcgatggcgtggagcattcaacatcggcttttcatgcttcatcagtatgggagtagtagcagccaatctaataaattacggtaccgatagtcaccgtaacggctggcgtatctcgctaggtctagctgctgtaccagccgcgatcatgaccgtgggatgtctattcatttccgacacaccttctagcctcttggcgcgtgggaaacacgatgaagctcacacgtcgctgcttaagctacgtggcgtcgaaaacatagctgacgtggaaaccgagctagcagagttggttaggtcaagccagctagccattgaggctagagccgaactgtttatgaagacgatattgcagagacggtataggcctcatcttgtggttgctgtggtgataccatgttttcaacagttaactggaataacggtgaacgcgttctatgcgccggttctgtttcgatcggttgggtttggttctggtccggctcttattgcgacgttcatactcgggtttgttaatcttggttcgcttcttctctcaacaatggttattgaccggtttggtagacggtttttgttcattgctggcggtattctgatgcttctctgtcagattgcagtggctgtgttactagctgtgacagtgggagccaccggggacggagagatgaagaagggttacgccgtgacggtggtggtgttactttgcatatacgcagctgggtttggatggtcgtgggggccattaagctggcttgtcccaagtgagatattcccactcaagatacgaccagctggtcagagcttaagcgttgccgtgaacttcgccgcaacgtttgctctctctcaaacgttcttagcaacgctctgcgatttcaagtacggtgctttcttgttttacggcggttggatctttacaatgacgatattcgtcatcatgttcttgcccgagaccaaagggatacctgtggattctatgtatcaagtttgggagaagcattggtattggcaacggtttactaaaccgacgtcaacttaaaagatgcaatattgcaatgggttcgcattttcaatggattatgtttattaattagttagg

SEQ ID NO: 100979 - protein, 506 aa, Arabidopsis thaliana
  peptide (1)..(506): Ceres Seq. ID no. 13606583
MAGGGLALDVSSAGNIDAKITAAVVMSCIVAASCGLIFGYDIGISGGVTTMKPFLEKFFPSVLKKASEAKTNVYCVYDSQLLTAFTSSLYVAGLVASLVASRLTAAYGRRTTMILGGFTFLFGALINGLAANIAMLISGRILLGFGVGFTNQAAPVYLSEVAPPRWRGAFNIGFSCFISMGVVAANLINYGTDSHRNGWRISLGLAAVPAAIMTVGCLFISDTPSSLLARGKHDEAHTSLLKLRGVENIADVETELAELVRSSQLAIEARAELFMKTILQRRYRPHLVVAVVIPCFQQLTGITVNAFYAPVLFRSVGFGSGPALIATFILGFVNLGSLLLSTMVIDRFGRRFLFIAGGILMLLCQIAVAVLLAVTVGATGDGEMKKGYAVTVVVLLCIYAAGFGWSWGPLSWLVPSEIFPLKIRPAGQSLSVAVNFAATFALSQTFLATLCDFKYGAFLFYGGWIFTMTIFVIMFLPETKGIPVDSMYQVWEKHWYWQRFTKPTST

SEQ ID NO: 100980 - protein, 481 aa, Arabidopsis thaliana
  peptide (1)..(481): Ceres Seq. ID no. 13606584
MSCIVAASCGLIFGYDIGISGGVTTMKPFLEKFFPSVLKKASEAKTNVYCVYDSQLLTAFTSSLYVAGLVASLVASRLTAAYGRRTTMILGGFTFLFGALINGLAANIAMLISGRILLGFGVGFTNQAAPVYLSEVAPPRWRGAFNIGFSCFISMGVVAANLINYGTDSHRNGWRISLGLAAVPAAIMTVGCLFISDTPSSLLARGKHDEAHTSLLKLRGVENIADVETELAELVRSSQLAIEARAELFMKTILQRRYRPHLVVAVVIPCFQQLTGITVNAFYAPVLFRSVGFGSGPALIATFILGFVNLGSLLLSTMVIDRFGRRFLFIAGGILMLLCQIAVAVLLAVTVGATGDGEMKKGYAVTVVVLLCIYAAGFGWSWGPLSWLVPSEIFPLKIRPAGQSLSVAVNFAATFALSQTFLATLCDFKYGAFLFYGGWIFTMTIFVIMFLPETKGIPVDSMYQVWEKHWYWQRFTKPTST

SEQ ID NO: 100981 - protein, 456 aa, Arabidopsis thaliana
  peptide (1)..(456): Ceres Seq. ID no. 13606585
MKPFLEKFFPSVLKKASEAKTNVYCVYDSQLLTAFTSSLYVAGLVASLVASRLTAAYGRRTTMILGGFTFLFGALINGLAANIAMLISGRILLGFGVGFTNQAAPVYLSEVAPPRWRGAFNIGFSCFISMGVVAANLINYGTDSHRNGWRISLGLAAVPAAIMTVGCLFISDTPSSLLARGKHDEAHTSLLKLRGVENIADVETELAELVRSSQLAIEARAELFMKTILQRRYRPHLVVAVVIPCFQQLTGITVNAFYAPVLFRSVGFGSGPALIATFILGFVNLGSLLLSTMVIDRFGRRFLFIAGGILMLLCQIAVAVLLAVTVGATGDGEMKKGYAVTVVVLLCIYAAGFGWSWGPLSWLVPSEIFPLKIRPAGQSLSVAVNFAATFALSQTFLATLCDFKYGAFLFYGGWIFTMTIFVIMFLPETKGIPVDSMYQVWEKHWYWQRFTKPTST

SEQ ID NO: 100982 - DNA, 1810 bp, Arabidopsis thaliana
  misc_feature (1)..(1810): Ceres Seq. ID no. 13606592
  misc_feature (1)..(1810): Ortholog of  Ceres SEQ ID NO 15177324 as cited in SEQ ID NO 52621
tccctgagagattagaaacgccatggaggttctagattcttaaggcttcatcactcgaaactgaaattagatagttttgtttgtttttgaggaatcactaatctgattctcttgagaagttagctttcgttcgtaagaattcacttacgtttgaaatctcaagtctttgtttcttccaggcaacaatttctctcaaagatggcgttttttgggctctcccgtgtttcaagacggttgttgaaatcttccgtctccgtaactccatcttcttcctctgctcttttgcaatcacaacataaatccttgtccaatcctgtgactacccattacacaaatcctttcactaagtgttatccttcatggaatgataattaccaagtatggagtaaaggaagagaattgcatcaggagaagttttttggtgttggttggaattacagattaatttgtggaatgtcgtcgtcttcttcggttttggagggaaagccgaagaaagatgataaggagaagagtgatggtgttgttgttaaggaagcttcttggatagatttgtatttaccagaagaagttagaggttatgctaagcttgctcgattggataaacccattggaacttggttgcttgcgtggccttgtatgtggtcgattgcgttggctgctgatcctggaagccttccaagttttaaatatatggctttatttggttgcggagcattacttcttagaggtgctggttgtactataaatgatctgcttgatcaggacatagatacaaaggttgatcgtacaaaactaagacctatcgccagtggtcttttgacaccatttcaagggattggatttctcgggctgcagttgcttttaggcttagggattcttctccaacttaacaattacagccgtgttttaggggcttcatctttgttacttgtcttttcctacccacttatgaagaggtttacattttggcctcaagcctttttaggtttgaccataaactggggagcattgttaggatggactgcagttaaaggaagcatagcaccatctattgtactccctctctatctctccggagtctgctggacccttgtttatgatactatttatgcacatcaggacaaagaagatgatgtaaaagttggtgttaagtcaacagcccttagattcggtgataatacaaagctttggttaactggatttggcacagcatccataggttttcttgcactttctggattcagtgcagatctcgggtggcaatattacgcatcactggccgctgcatcaggacagttaggatggcaaatagggacagctgacttatcatctggtgctgactgcagtagaaaatttgtgtcgaacaagtggtttggtgctattatatttagtggagttgtacttggaagaagttttcaataaagactctctctctgtcaacgaatgaggatgaagctgtagtgtgaggaacctatatatgaagaattgaagtagacttttgagacacactgtaagtgaaacagaggacatggtcttgctacaaagtgggtctccttcaggattgaaatgatcaaggagccattgccagaaaagctgaaacttaactcttttagattagtgactagttactactggttcttgtaaaagaagctattgttgttgtttgggatccatgtcttttcttccaggaggtagtttggctgtatgtatacaatgatcatgaccttctggtcaaacaagaggctttacttttggcttttatagttgacatacgcaatatcattgattttgtaacctaaaggatgttaat

SEQ ID NO: 100983 - protein, 407 aa, Arabidopsis thaliana
  peptide (1)..(407): Ceres Seq. ID no. 13606593
MAFFGLSRVSRRLLKSSVSVTPSSSSALLQSQHKSLSNPVTTHYTNPFTKCYPSWNDNYQVWSKGRELHQEKFFGVGWNYRLICGMSSSSSVLEGKPKKDDKEKSDGVVVKEASWIDLYLPEEVRGYAKLARLDKPIGTWLLAWPCMWSIALAADPGSLPSFKYMALFGCGALLLRGAGCTINDLLDQDIDTKVDRTKLRPIASGLLTPFQGIGFLGLQLLLGLGILLQLNNYSRVLGASSLLLVFSYPLMKRFTFWPQAFLGLTINWGALLGWTAVKGSIAPSIVLPLYLSGVCWTLVYDTIYAHQDKEDDVKVGVKSTALRFGDNTKLWLTGFGTASIGFLALSGFSADLGWQYYASLAAASGQLGWQIGTADLSSGADCSRKFVSNKWFGAIIFSGVVLGRSFQ

SEQ ID NO: 100984 - protein, 322 aa, Arabidopsis thaliana
  peptide (1)..(322): Ceres Seq. ID no. 13606594
MSSSSSVLEGKPKKDDKEKSDGVVVKEASWIDLYLPEEVRGYAKLARLDKPIGTWLLAWPCMWSIALAADPGSLPSFKYMALFGCGALLLRGAGCTINDLLDQDIDTKVDRTKLRPIASGLLTPFQGIGFLGLQLLLGLGILLQLNNYSRVLGASSLLLVFSYPLMKRFTFWPQAFLGLTINWGALLGWTAVKGSIAPSIVLPLYLSGVCWTLVYDTIYAHQDKEDDVKVGVKSTALRFGDNTKLWLTGFGTASIGFLALSGFSADLGWQYYASLAAASGQLGWQIGTADLSSGADCSRKFVSNKWFGAIIFSGVVLGRSFQ

SEQ ID NO: 100985 - protein, 261 aa, Arabidopsis thaliana
  peptide (1)..(261): Ceres Seq. ID no. 13606595
MWSIALAADPGSLPSFKYMALFGCGALLLRGAGCTINDLLDQDIDTKVDRTKLRPIASGLLTPFQGIGFLGLQLLLGLGILLQLNNYSRVLGASSLLLVFSYPLMKRFTFWPQAFLGLTINWGALLGWTAVKGSIAPSIVLPLYLSGVCWTLVYDTIYAHQDKEDDVKVGVKSTALRFGDNTKLWLTGFGTASIGFLALSGFSADLGWQYYASLAAASGQLGWQIGTADLSSGADCSRKFVSNKWFGAIIFSGVVLGRSFQ

SEQ ID NO: 100986 - DNA, 1182 bp, Arabidopsis thaliana
  misc_feature (1)..(1182): Ceres Seq. ID no. 13606610
  misc_feature (1)..(1182): Ortholog of  Ceres SEQ ID NO 14314371 as cited in SEQ ID NO 52260
acacactttaacgcatttctcaaaattacgttgccaaagtctggtcagagctacaaatcaaatttgacagactgcaatttccaatccaacgactgcgaatgaagtttaatggcgactagatcgccttataagagacaaacgaagcgatccatgattcagtctcttccagcttcttcttctgcatcatctcgccgccgattcatttctcggaagaggttcgcgatgatgattcctcttgctctcctctccggcgccgttttcctattctttatgccattcaatagctggggccaatcatctggttcttctctggatctctcccataggatcaatgaaattgaagtagttgctgagtttcctcatgatccggacgcctttactcagggtcttctttatgcgggaaacgatacactgttcgaatccactggtctatacgggaagtcttcagtgaggaaagtggatctacgaacaggaaaggttgaaattcttgaaaaaatggacaatacatattttggagagggtttaacactccttggagaaaggctctttcaagtcgcatggttgacaaacacgggtttcacatatgaccttcgcaacttaagtaaagtaaaaccatttaaacatcatatgaaagatggatggggactggctaccgatggaaaagcgttatttggaagtgatggcacttctacattatatcggatggaccctcaaacaatgaaagttactgataagcatatagtcagatataatggccgtgaggtacgttaccttaatgagctcgagtacataaacaacgaagtttgggcaaatgtgtggcagtctgattgtattgctagaatttcacccaaggacggatctctgcttggatggatactgctttcaaaattaagtcggggattgctgaaatctggacataggggtattgatgttttgaatggcatagcatgggacagtgacaagcaacgcctctttgtaacggggaaactgtggccaaagctgtaccaaatcaagctaaaacaagcatcagcaaagagcggaaattatatcgagcaacaatgcttggtatgaaaatattgcgcttggtaatggttagaatgtatactggctataatttaccataatttctgaacattagcatttagcaaacttcaatgattgaagatgagaatcaaaacctcg

SEQ ID NO: 100987 - protein, 320 aa, Arabidopsis thaliana
  peptide (1)..(320): Ceres Seq. ID no. 13606611
MATRSPYKRQTKRSMIQSLPASSSASSRRRFISRKRFAMMIPLALLSGAVFLFFMPFNSWGQSSGSSLDLSHRINEIEVVAEFPHDPDAFTQGLLYAGNDTLFESTGLYGKSSVRKVDLRTGKVEILEKMDNTYFGEGLTLLGERLFQVAWLTNTGFTYDLRNLSKVKPFKHHMKDGWGLATDGKALFGSDGTSTLYRMDPQTMKVTDKHIVRYNGREVRYLNELEYINNEVWANVWQSDCIARISPKDGSLLGWILLSKLSRGLLKSGHRGIDVLNGIAWDSDKQRLFVTGKLWPKLYQIKLKQASAKSGNYIEQQCLV

SEQ ID NO: 100988 - protein, 306 aa, Arabidopsis thaliana
  peptide (1)..(306): Ceres Seq. ID no. 13606612
MIQSLPASSSASSRRRFISRKRFAMMIPLALLSGAVFLFFMPFNSWGQSSGSSLDLSHRINEIEVVAEFPHDPDAFTQGLLYAGNDTLFESTGLYGKSSVRKVDLRTGKVEILEKMDNTYFGEGLTLLGERLFQVAWLTNTGFTYDLRNLSKVKPFKHHMKDGWGLATDGKALFGSDGTSTLYRMDPQTMKVTDKHIVRYNGREVRYLNELEYINNEVWANVWQSDCIARISPKDGSLLGWILLSKLSRGLLKSGHRGIDVLNGIAWDSDKQRLFVTGKLWPKLYQIKLKQASAKSGNYIEQQCLV

SEQ ID NO: 100989 - protein, 282 aa, Arabidopsis thaliana
  peptide (1)..(282): Ceres Seq. ID no. 13606613
MMIPLALLSGAVFLFFMPFNSWGQSSGSSLDLSHRINEIEVVAEFPHDPDAFTQGLLYAGNDTLFESTGLYGKSSVRKVDLRTGKVEILEKMDNTYFGEGLTLLGERLFQVAWLTNTGFTYDLRNLSKVKPFKHHMKDGWGLATDGKALFGSDGTSTLYRMDPQTMKVTDKHIVRYNGREVRYLNELEYINNEVWANVWQSDCIARISPKDGSLLGWILLSKLSRGLLKSGHRGIDVLNGIAWDSDKQRLFVTGKLWPKLYQIKLKQASAKSGNYIEQQCLV

SEQ ID NO: 100990 - DNA, 881 bp, Arabidopsis thaliana
  misc_feature (1)..(881): Ceres Seq. ID no. 13606614
  misc_feature (1)..(881): Ortholog of  Ceres SEQ ID NO 14306299 as cited in SEQ ID NO 56895
  misc_feature (1)..(881): Ortholog of  Ceres SEQ ID NO 13663631 as cited in SEQ ID NO 67073
agcacctacaaaacaatataatctcagaaaagagagaggatgagctcatcctatttacgagtaatattactcttaggtgcccttaatgtcgtcgtttctttatcaataaccaattctttaataaccaaatcagcaacactcggtcaggtgttccgaatctgtaagaatttgtgtccgggatgtgaccacgactccttgcagttcttgttccgacacaacctggtccgtgccgcaagattcgaacctcctttgatatgggaccgcagactccagaactacgcccaagggtgggctaatcaaagaaggggagattgtgctttgagacactctgtctcaaacggagagtttaatctcggcgagaacatctactggggatacggcgccaactggtctccggccgacgcggtggttgcatgggccagcgagaagaggttttatcattacggctccaacacgtgcgacgctggtcagatgtgtggtcattacacacagattgtgtggaagagcactaggagggtcggatgtgcacgtgtggtgtgcgacaatggtgggatcttcatgacttgtaactatgatcctcccggtaactacatcggccagaaaccctattaatttatcatcatttatctattaaaaattctccaaaataaagtcatcttactaattttttagaaattatgatgactttttaaaggagattaggtgggtgtatttgtgtattttactagaaaatagatctatttgtgggggttgtgatactaattatgtatcttgattattttaattgatggttgtaattgcatcaacggttatttatatatccgtaagaatgcccagtgtacaagaatatataaaatataaaaagatgatatgatttttgc

SEQ ID NO: 100991 - protein, 190 aa, Arabidopsis thaliana
  peptide (1)..(190): Ceres Seq. ID no. 13606615
MSSSYLRVILLLGALNVVVSLSITNSLITKSATLGQVFRICKNLCPGCDHDSLQFLFRHNLVRAARFEPPLIWDRRLQNYAQGWANQRRGDCALRHSVSNGEFNLGENIYWGYGANWSPADAVVAWASEKRFYHYGSNTCDAGQMCGHYTQIVWKSTRRVGCARVVCDNGGIFMTCNYDPPGNYIGQKPY

SEQ ID NO: 100992 - DNA, 1929 bp, Arabidopsis thaliana
  misc_feature (1)..(1929): Ceres Seq. ID no. 13606623
  misc_feature (1)..(1929): Ortholog of  Ceres SEQ ID NO 15177316 as cited in SEQ ID NO 52739
atgagtaaagaagagtttatgaagatccagacttgtgttctcaaagtgaatattcattgtgatggttgtaagcagaaagtgaagaaaatcttgcagaaaattgaaggtgttttcacgacaaagatagacgcagagctagggaaagtgactgtatctggaaacgtcgacccatcagttcttatcaagaagctcttgaaatctggtaaacatgccgaaatctggggagctcccaagggaggatctaacaacaatcagaaccaacccaacttggccaatcagttcaaagccatgcagattgatcatggcggcaaaggcggtggcggtggtggtggaggccctgctaacaataacaaaggccaaaagatcggtggaggcggtggtggaggaggaggcggcggcggaggtggtggtggcggaccaccgaagatggttattccacagttaacaccacaacagatgcagcagttgaatcctcaacagcttcagcagctacaacaacttcagcagatgaaagggtttcaagatctgaagcttcctcctcagttaaagggtggtccaggtccgggacctggctctgttcctatgaacaagaatcctcagatgcctaataatcctaatcagaaggctgtgaagttcaatgttcctgatgatgatgatgaggaagattttagtgatgaattcgatgatgagtttgatgaagatgacgacgagtttgatgatgatttggaagatgatgagtttgacgaccacccacctccgcctaacaaaatgaagcctatgatgggtggtggtaacatgatcatgcctaataacatgatgcctaacatgatgatgcctaacgctcaacaaatgttaaacgctcataagaatggtggtggtcctggacccgccggaggtaaaattgagggtaaaggtatgccttttccggttcaaatgggcggcggtggtggaggtcccggtggtaagaagggaggtcccggtggaggcgggggtaatatggggaatcagaaccaaggaggaggaggcaagaacggtggaaaaggcggtggtggacatccgttagatggaaaaatgggcggcggaggtggcggtcccaacggtaataaaggaggtggcggagtccagatgaacggaggtcccaacggtgggaaaaagggtggtggtggaggcggcggcggaggaggaggacccatgagtggaggcctcccgccaggtttccggccaatgggaggcggtggtggtggagggggaggacctcagagcatgagtatgccaatgggcggtgcaatgggtggtccaatgggaagtctaccacaaatgggtggtggtcccggtccaatgagtaataatatgcaggcggttcaaggattacccgcaatgggtccaggaggtggtggtggcggtggcccatccgcagaagcaccaccaggatatttccaaggccaagtctccggaaacggcggaggcggacaagactcaatgccgggaaacccctacttacaacagcagcaacagcaacaacaacaacaatacttagcggcggttatgaaccagcaacgatccatgggaaacgaacggttccagccgatgatgtacgctagaccaccgccagctgtcaactatatgccaccacaaccgcaaccgcaccaacaacatccatacccgtatccatatccgtatccaccccagtatccgcctcacaatggtgaccagtattctgattacttcaatgacgagaacacatcaagctgcaatattatgtgaacaacaacaacaaaactttccatagtttgtgtccggtctgtgattatacatggaaatgttttttttttcataattattgggggttcttagaatccttttttttcctccaacggatcaaatcctaaattatattaggatttttttttataatttgtgatagttctt

SEQ ID NO: 100993 - protein, 587 aa, Arabidopsis thaliana
  peptide (1)..(587): Ceres Seq. ID no. 13606624
MSKEEFMKIQTCVLKVNIHCDGCKQKVKKILQKIEGVFTTKIDAELGKVTVSGNVDPSVLIKKLLKSGKHAEIWGAPKGGSNNNQNQPNLANQFKAMQIDHGGKGGGGGGGGPANNNKGQKIGGGGGGGGGGGGGGGGGPPKMVIPQLTPQQMQQLNPQQLQQLQQLQQMKGFQDLKLPPQLKGGPGPGPGSVPMNKNPQMPNNPNQKAVKFNVPDDDDEEDFSDEFDDEFDEDDDEFDDDLEDDEFDDHPPPPNKMKPMMGGGNMIMPNNMMPNMMMPNAQQMLNAHKNGGGPGPAGGKIEGKGMPFPVQMGGGGGGPGGKKGGPGGGGGNMGNQNQGGGGKNGGKGGGGHPLDGKMGGGGGGPNGNKGGGGVQMNGGPNGGKKGGGGGGGGGGGPMSGGLPPGFRPMGGGGGGGGGPQSMSMPMGGAMGGPMGSLPQMGGGPGPMSNNMQAVQGLPAMGPGGGGGGGPSAEAPPGYFQGQVSGNGGGGQDSMPGNPYLQQQQQQQQQQYLAAVMNQQRSMGNERFQPMMYARPPPAVNYMPPQPQPHQQHPYPYPYPYPPQYPPHNGDQYSDYFNDENTSSCNIM

SEQ ID NO: 100994 - protein, 581 aa, Arabidopsis thaliana
  peptide (1)..(581): Ceres Seq. ID no. 13606625
MKIQTCVLKVNIHCDGCKQKVKKILQKIEGVFTTKIDAELGKVTVSGNVDPSVLIKKLLKSGKHAEIWGAPKGGSNNNQNQPNLANQFKAMQIDHGGKGGGGGGGGPANNNKGQKIGGGGGGGGGGGGGGGGGPPKMVIPQLTPQQMQQLNPQQLQQLQQLQQMKGFQDLKLPPQLKGGPGPGPGSVPMNKNPQMPNNPNQKAVKFNVPDDDDEEDFSDEFDDEFDEDDDEFDDDLEDDEFDDHPPPPNKMKPMMGGGNMIMPNNMMPNMMMPNAQQMLNAHKNGGGPGPAGGKIEGKGMPFPVQMGGGGGGPGGKKGGPGGGGGNMGNQNQGGGGKNGGKGGGGHPLDGKMGGGGGGPNGNKGGGGVQMNGGPNGGKKGGGGGGGGGGGPMSGGLPPGFRPMGGGGGGGGGPQSMSMPMGGAMGGPMGSLPQMGGGPGPMSNNMQAVQGLPAMGPGGGGGGGPSAEAPPGYFQGQVSGNGGGGQDSMPGNPYLQQQQQQQQQQYLAAVMNQQRSMGNERFQPMMYARPPPAVNYMPPQPQPHQQHPYPYPYPYPPQYPPHNGDQYSDYFNDENTSSCNIM

SEQ ID NO: 100995 - protein, 491 aa, Arabidopsis thaliana; identical to SEQ ID NO: 75851
  peptide (1)..(491): Ceres Seq. ID no. 13606626

SEQ ID NO: 100996 - DNA, 1339 bp, Arabidopsis thaliana
  misc_feature (1)..(1339): Ceres Seq. ID no. 13606634
  misc_feature (1)..(1339): Ortholog of  Ceres SEQ ID NO 13594037 as cited in SEQ ID NO 55666
  misc_feature (1)..(1339): Ortholog of  Ceres SEQ ID NO 15171501 as cited in SEQ ID NO 58322
acatagccatatatttttttggtcgtactttgtatctttggcaaaacacaaaaaacaaaaacaaaaaaactccttatatttttgtatttgatgctaattgtcgtatagatgcccaaactcaattcaacccaagctcccaatttattccttctccttctcgttatccttctttgttcaacgcaaacacaatgccacaccaaaggtctccgattacgaccaagaaaccagaagaatatgaacacgacgagtgatcggacacaaaacccggaagatgagttcatgaaatgggtgagattcgttggaagccttaaacactcagtgttcaaggcagccaagaacaaactcttcccttcttatacattaactgtccacaagaaatccaataaaggtgacttcactaaaatccaagacgccattgattctctccctctcatcaactttgttcgtgtcgtcatcaaagttcatgccggagtttacaaggagaaggtgagcatacccccactgaaggcatttataacaatagaaggagaaggagcagagaagacaacagtggaatggggagacacagcacaaacccctgactcaaaaggcaaccccatgggcacttacaactcggcctcgttcgcggtcaactctcctttctttgtcgctaagaatatcacattcaggaacacgaccccagtccccttgcccggtgcagttggtaaacaggcggtagcattgagggtgtcggcagacaatgccgcgttttttgggtgtagaatgcttggtgctcaagacactctctatgaccatttgggaagacattattacaaagattgttacattgagggatcagtggacttcatctttggaaatgccctttctctttatgaagggtgccacgtgcatgcgatagcggataagctaggagcagtgacggcacaggggaggagcagtgttctagaggacaccggattctcgttcgtaaagtgtaaggtgacagggacaggggttttgtatcttgggagggcatggggtcccttctcaagagtcgtttttgcttacacttacatggacaacatcatcctccctagaggctggtacaattggggagacccttcccgtgagatgacggtgttctatgggcagtacaagtgcacgggagcaggagcaaactatggagggagggtggcttgggcaagagagctcaccgacgaagaagctaagccttttctttctcttacctttatcgacggctctgaatggatcaaactctaaccatatacacctttttttattttctttccacctaattaataatgtacattttccctttaataaaataaaaataattttt

SEQ ID NO: 100997 - protein, 383 aa, Arabidopsis thaliana
  peptide (1)..(383): Ceres Seq. ID no. 13606635
MPKLNSTQAPNLFLLLLVILLCSTQTQCHTKGLRLRPRNQKNMNTTSDRTQNPEDEFMKWVRFVGSLKHSVFKAAKNKLFPSYTLTVHKKSNKGDFTKIQDAIDSLPLINFVRVVIKVHAGVYKEKVSIPPLKAFITIEGEGAEKTTVEWGDTAQTPDSKGNPMGTYNSASFAVNSPFFVAKNITFRNTTPVPLPGAVGKQAVALRVSADNAAFFGCRMLGAQDTLYDHLGRHYYKDCYIEGSVDFIFGNALSLYEGCHVHAIADKLGAVTAQGRSSVLEDTGFSFVKCKVTGTGVLYLGRAWGPFSRVVFAYTYMDNIILPRGWYNWGDPSREMTVFYGQYKCTGAGANYGGRVAWARELTDEEAKPFLSLTFIDGSEWIKL

SEQ ID NO: 100998 - protein, 341 aa, Arabidopsis thaliana
  peptide (1)..(341): Ceres Seq. ID no. 13606636
MNTTSDRTQNPEDEFMKWVRFVGSLKHSVFKAAKNKLFPSYTLTVHKKSNKGDFTKIQDAIDSLPLINFVRVVIKVHAGVYKEKVSIPPLKAFITIEGEGAEKTTVEWGDTAQTPDSKGNPMGTYNSASFAVNSPFFVAKNITFRNTTPVPLPGAVGKQAVALRVSADNAAFFGCRMLGAQDTLYDHLGRHYYKDCYIEGSVDFIFGNALSLYEGCHVHAIADKLGAVTAQGRSSVLEDTGFSFVKCKVTGTGVLYLGRAWGPFSRVVFAYTYMDNIILPRGWYNWGDPSREMTVFYGQYKCTGAGANYGGRVAWARELTDEEAKPFLSLTFIDGSEWIKL

SEQ ID NO: 100999 - protein, 326 aa, Arabidopsis thaliana
  peptide (1)..(326): Ceres Seq. ID no. 13606637
MKWVRFVGSLKHSVFKAAKNKLFPSYTLTVHKKSNKGDFTKIQDAIDSLPLINFVRVVIKVHAGVYKEKVSIPPLKAFITIEGEGAEKTTVEWGDTAQTPDSKGNPMGTYNSASFAVNSPFFVAKNITFRNTTPVPLPGAVGKQAVALRVSADNAAFFGCRMLGAQDTLYDHLGRHYYKDCYIEGSVDFIFGNALSLYEGCHVHAIADKLGAVTAQGRSSVLEDTGFSFVKCKVTGTGVLYLGRAWGPFSRVVFAYTYMDNIILPRGWYNWGDPSREMTVFYGQYKCTGAGANYGGRVAWARELTDEEAKPFLSLTFIDGSEWIKL

SEQ ID NO: 101000 - DNA, 1333 bp, Arabidopsis thaliana
  misc_feature (1)..(1333): Ceres Seq. ID no. 13606642
  misc_feature (1)..(1333): Ortholog of  Ceres SEQ ID NO 13598741 as cited in SEQ ID NO 62749
  misc_feature (1)..(1333): Ortholog of  Ceres SEQ ID NO 12587535 as cited in SEQ ID NO 64020
  misc_feature (1)..(1333): Ortholog of  Ceres SEQ ID NO 12586366 as cited in SEQ ID NO 68983
acagttctactatatggatgatggccctggcttcttcaaaccatctgtgtgtttagtcttctcatttgtgcacaactcaaagacaagtccactaagtttgaagcaaaatggcgatatggtttcagagaattttcctgttgcttctcgtttcctgttgcgcctcttcagattttttggaaaatccagacttcgaatctccaccgttaaacttacctacaaactcaaatgctagctctgtatcgctggatcagaacagtacactcccgggatggacattccaagggacagtgctttatgttgaactgcctgataccggacacgcggttcagctcggtgaagatggcaagatcaatcaaacattcattgccaaaggtgatgaattgaactacatcctcacattcgcactgatccacgcaggccagaactgtacaagctctgctggtctcagtgtctcggggccagacagcaatgcggtcttttcttacagacaaaactacagtaaggtttcatggcagagctacagtcataacttgggtagttgggggaatggtgagcctattaacttagttcttgaaagtcaggcaatagattctgattctgatacaaactccacatgttggcctatcattgacacattgcttatcaagactgttggtgtaacattggtccaagacagtggtaacctcttaatcaatggtggatttgagtctggacctggtttcttgcccaactcaaccgatggagttctgattgacgcggttccaagcctgattcaatcaccattaaggcagtggtctgtcataggaacagtcagatacatagactcggagcacttccatgtcccagaaggcaaagctgcaatagaaattctgtctaacacagctccatctggcatacagacagcaacaaaaggcacaagtgaaggttcaagatacaacctcacatttaccttaggcgatgctaacgatgcgtgcagaggacatttcgtggtgggtgctcaagctggctccgtaactcaaaacttcacattggagagtaatgggactggctctggtgagaagtttgggttagtgtttgaagcagacaaagatgcagcacagataagtttcaccagctactcagttacaatgacaaaagagaatgttgtttgtggtcctgtgattgatgaagtgatggtacatcctcttggtggaacagcctcagtaaaacccacttggctgctacttattttcgctttgttgtatgttgcagttctctgattgaaactgtttgggagagaggtcataaagaagatatttttgcaaggagatgtgataatcattctagcttcatg

SEQ ID NO: 101001 - protein, 383 aa, Arabidopsis thaliana
  peptide (1)..(383): Ceres Seq. ID no. 13606643
MAIWFQRIFLLLLVSCCASSDFLENPDFESPPLNLPTNSNASSVSLDQNSTLPGWTFQGTVLYVELPDTGHAVQLGEDGKINQTFIAKGDELNYILTFALIHAGQNCTSSAGLSVSGPDSNAVFSYRQNYSKVSWQSYSHNLGSWGNGEPINLVLESQAIDSDSDTNSTCWPIIDTLLIKTVGVTLVQDSGNLLINGGFESGPGFLPNSTDGVLIDAVPSLIQSPLRQWSVIGTVRYIDSEHFHVPEGKAAIEILSNTAPSGIQTATKGTSEGSRYNLTFTLGDANDACRGHFVVGAQAGSVTQNFTLESNGTGSGEKFGLVFEADKDAAQISFTSYSVTMTKENVVCGPVIDEVMVHPLGGTASVKPTWLLLIFALLYVAVL

SEQ ID NO: 101002 - DNA, 1156 bp, Arabidopsis thaliana
  misc_feature (1)..(1156): Ceres Seq. ID no. 13606660
  misc_feature (1)..(1156): Ortholog of  Ceres SEQ ID NO 14314838 as cited in SEQ ID NO 52573
aacgtagtctcaaaggtcacagcagcagcagcaacaatcagagcaacaatggagtctgctaaatcaaaaaatcccgatagctaccaaaatatcttgatgatgcgtcacggtgatcgcattgacaaaatcgatccactctggcttgatacagctgcgagaccttgggatcctcctctcgttcaagacggtatggttcgtgcgtttcaaactggtcaacggattcgatctcagatccaatttccgattcaccgtgtcttcgtctctccttttatccgatgtatacagactgcttccgaagtcatcgctgctctctccgccgtcgatttcgatcctaacgctacttcgtccaaagacgtcacttcaatcgataaatataagcttaaggtttccattgaatttggtttgagtgagatgctgaattcaattgctattaagcctgagattgctcccaaagatgggaaattcgatttcatgatttcagaacttgaagcgatttttcctgatggaatggttgatcatagtgtagatcctgtttataaagagatgccacaatgggaagagactgtggaaggctgcacagatagatttcttagtttgataaagactcttgctgataagtatccttcagagaacttgctcttggtcactcacggggaaggagtaaggactacatttgcaacctttaaaggcgtacatgtgtacgacgtagagtattgtggttgtgctgaattgagaagacaggtgtcgagtaaagatgggtctactaaagctggagactttgaggtgatcacaagtcttagtcaatgtggaatcaagtaccattccttgagcaccacagaccaaacttctgcttaagtcaatgatgttccggatgatcatggcactagtaaaccggaatcaaaccggatactggttatctagaaacaattctgtagaagatgagaaccttgccggaatactacaatagtaatgtgttgcttccgacagattggagatacggtttcgaagagagaacttctttttaagtgttgtaccggcggttgaaaatgattttgttgtttattattgattctaaacgtaattttgggcagatactattgattaaactgattttgcgtttttatttttacaatgtcatgtgttttgatgtcttctt

SEQ ID NO: 101003 - protein, 284 aa, Arabidopsis thaliana
  peptide (1)..(284): Ceres Seq. ID no. 13606661
NVVSKVTAAAATIRATMESAKSKNPDSYQNILMMRHGDRIDKIDPLWLDTAARPWDPPLVQDGMVRAFQTGQRIRSQIQFPIHRVFVSPFIRCIQTASEVIAALSAVDFDPNATSSKDVTSIDKYKLKVSIEFGLSEMLNSIAIKPEIAPKDGKFDFMISELEAIFPDGMVDHSVDPVYKEMPQWEETVEGCTDRFLSLIKTLADKYPSENLLLVTHGEGVRTTFATFKGVHVYDVEYCGCAELRRQVSSKDGSTKAGDFEVITSLSQCGIKYHSLSTTDQTSA

SEQ ID NO: 101004 - protein, 268 aa, Arabidopsis thaliana
  peptide (1)..(268): Ceres Seq. ID no. 13606662
MESAKSKNPDSYQNILMMRHGDRIDKIDPLWLDTAARPWDPPLVQDGMVRAFQTGQRIRSQIQFPIHRVFVSPFIRCIQTASEVIAALSAVDFDPNATSSKDVTSIDKYKLKVSIEFGLSEMLNSIAIKPEIAPKDGKFDFMISELEAIFPDGMVDHSVDPVYKEMPQWEETVEGCTDRFLSLIKTLADKYPSENLLLVTHGEGVRTTFATFKGVHVYDVEYCGCAELRRQVSSKDGSTKAGDFEVITSLSQCGIKYHSLSTTDQTSA

SEQ ID NO: 101005 - protein, 252 aa, Arabidopsis thaliana
  peptide (1)..(252): Ceres Seq. ID no. 13606663
MMRHGDRIDKIDPLWLDTAARPWDPPLVQDGMVRAFQTGQRIRSQIQFPIHRVFVSPFIRCIQTASEVIAALSAVDFDPNATSSKDVTSIDKYKLKVSIEFGLSEMLNSIAIKPEIAPKDGKFDFMISELEAIFPDGMVDHSVDPVYKEMPQWEETVEGCTDRFLSLIKTLADKYPSENLLLVTHGEGVRTTFATFKGVHVYDVEYCGCAELRRQVSSKDGSTKAGDFEVITSLSQCGIKYHSLSTTDQTSA

SEQ ID NO: 101006 - DNA, 857 bp, Arabidopsis thaliana
  misc_feature (1)..(857): Ceres Seq. ID no. 13606675
  misc_feature (1)..(857): Ortholog of  Ceres SEQ ID NO 13594418 as cited in SEQ ID NO 60153
ccgatggaccgccatagtcaccgactaaaaaaaccagcgaccacgtaaatctttgacgacgaggaggaggaggaggagaagaataaacggaagaaactaagagatgaatagtccaccggagaacgatctttgttcgatatgtcattcccacttcaccgctccttgtcaagccaattgttcccattggttctgcgggaactgcattatgctggtgtggaggcatggatctacattacagccatgtaaatgccctttgtgtcgtcgtcatattagtttgttggttccttcagaggacacaatcagagaccgtaatgacgctacagttaaggaggttcttggtaatcttgaaacttacaaccgactctttggcgggcgttcaagtagtttagttcagaggatgcaagacctgcccttcttactacggaggttgttgcgggaaatgatggatccacaaagaacgcttccacttgtcattagggctcgggtttatatcgcaatgattctcagtgctgtttacataatcagtccaatagatatcattccagaaggagttctgggggtagtcggtttgcttgatgatctactcatagcactgatttgtttcctccatgttgctgctctgtaccgctcggttctctatttccgtcatgccggttcgtgaatcaatgagtgtctttgacattatacgttgcagttcaagaactagagatgtgtgcttaccttttcttctgtctttgatcctttccctttacaaatacacaattgttctgtttagctaaggaaaactgaaatgtgtgatgataaagatcacagcacaaaaagcttggaagtacatatcaatcatcttcctaccactt

SEQ ID NO: 101007 - protein, 185 aa, Arabidopsis thaliana; identical to SEQ ID NO: 40575
  peptide (1)..(185): Ceres Seq. ID no. 13606676

SEQ ID NO: 101008 - protein, 151 aa, Arabidopsis thaliana; identical to SEQ ID NO: 40576
  peptide (1)..(151): Ceres Seq. ID no. 13606677

SEQ ID NO: 101009 - DNA, 528 bp, Arabidopsis thaliana
  misc_feature (1)..(528): Ceres Seq. ID no. 13606678
  misc_feature (1)..(528): Ortholog of  Ceres SEQ ID NO 15179080 as cited in SEQ ID NO 0
acgaacaacggaagaacaaaactctgagcgaatcaatcaatcggaaaaaggagataggtttcgcgaaaatggcggagaaaaaggatagtgtgccaccggaatacgatgtgaatgctaagtgggacgcatgtctcgatctcactgtccgccgcttcgtttactcttccctcggcggcgcatttgccggtcttctgttcttcaggagtcctgttacaagatgggcatcgattgctttaggtgctggaattggtattggctctgcatattcagattgttctcgtgcttttgattcaccttcttcatcttcagctaatttagcagctcccaagaataatattacagagacttctcctgtatctcaggctgcagacgagtagacaatgtcgataaagtggaagttagtaacacatccaatgatcggggtgttcagaaacagagctattatcatgcaatgctttgttgaattgtttcctaaacctgcaaagacaagagtctattgagataatgtcaaatgtaaaaacctttttt

SEQ ID NO: 101010 - protein, 124 aa, Arabidopsis thaliana; identical to SEQ ID NO: 29652
  peptide (1)..(124): Ceres Seq. ID no. 13606679

SEQ ID NO: 101011 - protein, 102 aa, Arabidopsis thaliana; identical to SEQ ID NO: 29653
  peptide (1)..(102): Ceres Seq. ID no. 13606680

SEQ ID NO: 101012 - DNA, 867 bp, Arabidopsis thaliana
  misc_feature (1)..(867): Ceres Seq. ID no. 13606681
  misc_feature (1)..(867): Ortholog of  Ceres SEQ ID NO 13638595 as cited in SEQ ID NO 52050
  misc_feature (1)..(867): Ortholog of  Ceres SEQ ID NO 14301870 as cited in SEQ ID NO 61501
  misc_feature (1)..(867): Ortholog of  Ceres SEQ ID NO 12583993 as cited in SEQ ID NO 68098
gagtagggaaaaagaaaagaaaagtagagtactatcttcctcttaaaccaaccattcaaaatgttgcgtactatcttcctcttatctcttctctttgctctatccaatgcctctgttcaagatttctgtgtcgcaaacctgaaacgcgctgaaacccctgcgggttacccttgcattcgtcccattcatgtcaaagctacagactttgtcttctctggcttaggcactcctggaaacactacaaacatcatcaacgccgctgtcacacccgctttcgcagctcagttcccgggtctgaacggtctaggcctctctacagctagacttgacttagctcctaaaggtgtgatcccaatgcacactcaccctggtgcctctgaggttctctttgtccttactggctccattaccgctgggtttgtctcctcggcaaacgctgtctacgtgcagacactcaaaccaggacaggtcatggttttcccacagggcttgcttcatttccagatcaacgcgggaaaatcctctgcttcagccgttgtcactttcaacagcgctaatccgggtctgcagattctcgacttcgcactctttgctaacagtcttcccactgaactcgtcgtgggtactactttccttgacgccactacagtcaagaagctaaagggtgttcttggaggaactggctaaaaaaagacttaggactactccttgactaaaacaccaaaacctgtttcttcatctttttttctctttaattgattcttgtcttctctgttttgtgtgccttgtaattcttcaaaacctgtcaaaattgttacattgtatgtgagttttttcaattaagatcctgagttggtcacaccgttc

SEQ ID NO: 101013 - protein, 208 aa, Arabidopsis thaliana; identical to SEQ ID NO: 23207
  peptide (1)..(208): Ceres Seq. ID no. 13606682

SEQ ID NO: 101014 - protein, 110 aa, Arabidopsis thaliana; identical to SEQ ID NO: 31047
  peptide (1)..(110): Ceres Seq. ID no. 13606683

SEQ ID NO: 101015 - DNA, 1827 bp, Arabidopsis thaliana
  misc_feature (1)..(1827): Ceres Seq. ID no. 13606699
  misc_feature (1)..(1827): Ortholog of  Ceres SEQ ID NO 15227289 as cited in SEQ ID NO 58851
  misc_feature (1)..(1827): Ortholog of  Ceres SEQ ID NO 13584416 as cited in SEQ ID NO 63441
gaggttgagagcatcttccaaaagagagagtgtttgtgtgtgtgagagagagtgagtgtgagtgagagaagaaaaaaaaaattgagagattaaaatttgagtgaaattagggtttattctcttcttgctttctttgcttcgtttcatcttcaaaccaaaagaaaaaaactcttccatgtcctgtctattcatcagtcgtctttcttgagaaaacacaaatcacgattttcttatgaagtgttgctttatgagtttatattttgccaaaactcatctaaaacgacaaacttttgtttaaaattgtatttgaaaagtgttttcaagaaaacgatatccatcaaaaatattatgattttttctgtcaattaatattctttcattcttttatagagttgatcaacttcatgggcattttttagttccctcaagttttgatcctcttattttatttctttttttgttgataaatttattttagttttgatctatggaggttgcttatttcaaacctcgttgatcacttttatttctgtataaaccaaaaaaccagtctttgaattttttctaaaaagacaggttttatttcttcaaccattttttaattataattttatataatcttgttttttgtagtacatttttttttgtatttcaggaaactccgatggcggatctcttcggtggtggccacggcggcgagcttatggaagcacttcaacctttttacaaaagtgcttccacgtctgcttcaaatcctgcgtttgcgtcctcaaacgatgcgtttgcgtctgccccaaacgacctattttcttcttcttcttactataatcctcatgcatctttattcccttcacattccacaacctcttacccggatatttattctggatccatgacctatccatcttcattcgggtcggatcttcaacaacccgaaaactaccaatctcagttccattaccaaaacactatcacttacactcaccaagacaacaacacttgcatgcttaacttcattgagccgagccaaccgggttttatgacccaaccgggtccgagttcgggttcggtttcaaaaccggctaagctctatagaggagtgaggcaaagacattggggaaaatgggtcgcggagatccgtttacccaggaaccgaacccgactttggctcggaacattcgacacggctgaagaagccgcgttggcttatgatcgcgccgcgtttaagcttcgtggtgactcggctcggcttaacttcccagctctccgataccaaaccggctcgtctccgtctgataccggcgaatatggtcctattcaagctgccgtagacgctaaactagaagccatattagctgagccgaagaatcagccgggcaaaacggagaggacgtcgaggaaacgagctaaagccgcggcttcttcagctgagcagccgtcagcgccacaacaacattccgggtcgggtgaaagtgatgggtcgggttcaccgacttcggatgttatggtgcaggagatgtgccaagagccagagatgccatggaatgaaaatttcatgctcggcaagtgtccttcttatgagatagattgggcttcaattttatcgtgaaaaattaggattcaattcatttttattcattttaacttgtttgtattttcttttaaactttagggttattagctgtgcgtaaaatttgtaatttagcattttgtatgaatgtaatgcaagtgtgtaaattatggacagctcaagcttttttgttcatgccgtaccatgtagacccttcttcttttctcttaattgaaatgaatatggttagtattact

SEQ ID NO: 101016 - protein, 314 aa, Arabidopsis thaliana
  peptide (1)..(314): Ceres Seq. ID no. 13606700
MADLFGGGHGGELMEALQPFYKSASTSASNPAFASSNDAFASAPNDLFSSSSYYNPHASLFPSHSTTSYPDIYSGSMTYPSSFGSDLQQPENYQSQFHYQNTITYTHQDNNTCMLNFIEPSQPGFMTQPGPSSGSVSKPAKLYRGVRQRHWGKWVAEIRLPRNRTRLWLGTFDTAEEAALAYDRAAFKLRGDSARLNFPALRYQTGSSPSDTGEYGPIQAAVDAKLEAILAEPKNQPGKTERTSRKRAKAAASSAEQPSAPQQHSGSGESDGSGSPTSDVMVQEMCQEPEMPWNENFMLGKCPSYEIDWASILS

SEQ ID NO: 101017 - protein, 301 aa, Arabidopsis thaliana
  peptide (1)..(301): Ceres Seq. ID no. 13606701
MEALQPFYKSASTSASNPAFASSNDAFASAPNDLFSSSSYYNPHASLFPSHSTTSYPDIYSGSMTYPSSFGSDLQQPENYQSQFHYQNTITYTHQDNNTCMLNFIEPSQPGFMTQPGPSSGSVSKPAKLYRGVRQRHWGKWVAEIRLPRNRTRLWLGTFDTAEEAALAYDRAAFKLRGDSARLNFPALRYQTGSSPSDTGEYGPIQAAVDAKLEAILAEPKNQPGKTERTSRKRAKAAASSAEQPSAPQQHSGSGESDGSGSPTSDVMVQEMCQEPEMPWNENFMLGKCPSYEIDWASILS

SEQ ID NO: 101018 - protein, 238 aa, Arabidopsis thaliana
  peptide (1)..(238): Ceres Seq. ID no. 13606702
MTYPSSFGSDLQQPENYQSQFHYQNTITYTHQDNNTCMLNFIEPSQPGFMTQPGPSSGSVSKPAKLYRGVRQRHWGKWVAEIRLPRNRTRLWLGTFDTAEEAALAYDRAAFKLRGDSARLNFPALRYQTGSSPSDTGEYGPIQAAVDAKLEAILAEPKNQPGKTERTSRKRAKAAASSAEQPSAPQQHSGSGESDGSGSPTSDVMVQEMCQEPEMPWNENFMLGKCPSYEIDWASILS

SEQ ID NO: 101019 - DNA, 1391 bp, Arabidopsis thaliana
  misc_feature (1)..(1391): Ceres Seq. ID no. 13606707
  misc_feature (1)..(1391): Ortholog of  Ceres SEQ ID NO 13592961 as cited in SEQ ID NO 20522
  misc_feature (1)..(1391): Ortholog of  Ceres SEQ ID NO 12583469 as cited in SEQ ID NO 51031
  misc_feature (1)..(1391): Ortholog of  Ceres SEQ ID NO 13597389 as cited in SEQ ID NO 63426
  misc_feature (1)..(1391): Ortholog of  Ceres SEQ ID NO 15169639 as cited in SEQ ID NO 64624
  misc_feature (1)..(1391): Ortholog of  Ceres SEQ ID NO 14303071 as cited in SEQ ID NO 67114
  misc_feature (1)..(1391): Ortholog of  Ceres SEQ ID NO 13595998 as cited in SEQ ID NO 68161
  misc_feature (1)..(1391): Ortholog of  Ceres SEQ ID NO 14303635 as cited in SEQ ID NO 68503
aataatggcctcatctcttgcattattcagtgatccaaaaagactttaaaaattgagtgacaaagacgaacgaagaccacgattagctcttcccatggcttcttcactgaagaagcttatctcaagctttctacttgtcttatactccaccaccatcattgttgcttcatcagaatctcgatgtaggcgttttaaatcgatcatcagctttggtgattccatcgcagacaccggaaattatctccatctctctgatgtcaatcaccttcctcaatccgcctttcttccttatggcgaaagcttcttccatcctccctccggtcgtgcctctaatggccgtctcatcatcgacttcattgccgaattcttgggactaccatacgtaccgccttactttggatcccaaaacgttagcttcgaacaagggatcaattttgcggtgtatggagcaaccgcattggaccgagcgtttcttttgggaaaaggaattgaatctgatttcaccaatgttagtttaagtgttcagcttgacaccttcaagcagattttgcctaacttatgcgcctcgtctactcgtgattgcaaagagatgcttggagactcgctgatactcatgggagagattggaggaaacgactataattacccattttttgaaggaaaaagtatcaatgaaatcaaagagcttgttcctctaatcgtcaaagctatttcttctgctattgtggatttgattgatttagggggcaaaacatttttggtacccggaggcttcccaacaggatgttctgcggcgtatcttactctatttcagaccgtggcagaaaaagaccaggaccctttaacaggttgttacccattgctcaacgaatttggcgagcaccacaacgaacagctaaagacagaactcaagcgactccaaaaattctatcctcatgtcaacatcatttacgctgactaccacaactccttataccggttttatcaagaaccagctaaatacgggtttaagaacaaacctttagctgcttgctgtggagtcggaggtaaatacaacttcactattggtaaggagtgtggatacgaaggagttaactattgtcaaaatccttctgagtatgtgaactgggatggttatcatttaaccgaagccgcctaccagaagatgactgagggtatactcaacggtccctatgcaactcctgctttcgactggtcctgccttggctctggtacagtggatacataaagggtattctttcagcagtaagaattcattcgttgtaaaaaatcaaagaggaagaaaattatgtgatgatgatgatgatgatgatgattaacaaaaacattgcttgtacggcaagacttgactaatgacaaaacttccgaag

SEQ ID NO: 101020 - protein, 384 aa, Arabidopsis thaliana
  peptide (1)..(384): Ceres Seq. ID no. 13606708
MASSLKKLISSFLLVLYSTTIIVASSESRCRRFKSIISFGDSIADTGNYLHLSDVNHLPQSAFLPYGESFFHPPSGRASNGRLIIDFIAEFLGLPYVPPYFGSQNVSFEQGINFAVYGATALDRAFLLGKGIESDFTNVSLSVQLDTFKQILPNLCASSTRDCKEMLGDSLILMGEIGGNDYNYPFFEGKSINEIKELVPLIVKAISSAIVDLIDLGGKTFLVPGGFPTGCSAAYLTLFQTVAEKDQDPLTGCYPLLNEFGEHHNEQLKTELKRLQKFYPHVNIIYADYHNSLYRFYQEPAKYGFKNKPLAACCGVGGKYNFTIGKECGYEGVNYCQNPSEYVNWDGYHLTEAAYQKMTEGILNGPYATPAFDWSCLGSGTVDT

SEQ ID NO: 101021 - protein, 219 aa, Arabidopsis thaliana
  peptide (1)..(219): Ceres Seq. ID no. 13606709
MLGDSLILMGEIGGNDYNYPFFEGKSINEIKELVPLIVKAISSAIVDLIDLGGKTFLVPGGFPTGCSAAYLTLFQTVAEKDQDPLTGCYPLLNEFGEHHNEQLKTELKRLQKFYPHVNIIYADYHNSLYRFYQEPAKYGFKNKPLAACCGVGGKYNFTIGKECGYEGVNYCQNPSEYVNWDGYHLTEAAYQKMTEGILNGPYATPAFDWSCLGSGTVDT

SEQ ID NO: 101022 - protein, 211 aa, Arabidopsis thaliana
  peptide (1)..(211): Ceres Seq. ID no. 13606710
MGEIGGNDYNYPFFEGKSINEIKELVPLIVKAISSAIVDLIDLGGKTFLVPGGFPTGCSAAYLTLFQTVAEKDQDPLTGCYPLLNEFGEHHNEQLKTELKRLQKFYPHVNIIYADYHNSLYRFYQEPAKYGFKNKPLAACCGVGGKYNFTIGKECGYEGVNYCQNPSEYVNWDGYHLTEAAYQKMTEGILNGPYATPAFDWSCLGSGTVDT

SEQ ID NO: 101023 - DNA, 1348 bp, Arabidopsis thaliana
  misc_feature (1)..(1348): Ceres Seq. ID no. 13606711
  misc_feature (1)..(1348): Ortholog of  Ceres SEQ ID NO 14301482 as cited in SEQ ID NO 63355
cgacggttcgtcattcttcctctaagctttatctttctgatctctgaccttgtgtctctgtgcatgtgtgtttatctgctactgtgttttgtcggtttgatctccaaaaaccagacatgaacagaggaagcttatgccctaatcccatctgtctccctcctcttgagcaatccatctccaaattcttaacacagagtggaacgtttaaagatggagatcttcgagtgaacaaagatggaatccagaccgtgtctctgtccgaaccaggagctccacctcctattgagccattggacaaccaattgagtttggcagatttagaagtgatcaaagtcattggcaaaggaagtagtggtaatgtccagttggtcaaacacaaactcactcaacagtttttcgctcttaaggtcattcaattgaacacagaagaatcaacatgtcgggcgatttctcaggagctgagaataaacttgagctcgcaatgtccatatcttgtctcatgttatcaatctttctaccacaacggtcttgtttcaatcatattggaattcatggatggtggatcccttgcagacttgttaaagaaagtcggaaaagttcctgaaaacatgctatctgccatctgcaagcgagttcttcgaggtctttgttatattcatcatgagaggcgaatcattcatcgggacttaaagccttcaaacttgctaatcaatcatagaggtgaagtcaagatcacagactttggtgtcagcaagatcttgacaagcacaagtagtcttgctaattctttcgtgggcacatacccttatatgtctccagagagaatcagcgggagtttgtacagtaacaagagcgatatttggagcttgggactggttttgctcgaatgtgcaacgggtaaattcccgtatactcctccagaacacaagaaaggatggagtagcgtgtacgagcttgtggacgccattgttgaaaacccgcctccttgtgcaccttccaatctcttttctccagagttttgctccttcatctcgcaatgtgtacaaaaagatccaagggacagaaaatcagcaaaggagcttctggaacacaagttcgtaaagatgtttgaagattcggatacaaatctctcggcttacttcaccgacgcaggatctttgattcccccacttgctaactagaaccgagtttgaacaatcttttaacctccaagttattatttcatatccactagaagagattttatgaaagataaatttacgagatgttatgacttaagagacttgtctacaaaatttgatttaatgtgtgtacttttcacatcactattataaacacaactatcatc

SEQ ID NO: 101024 - protein, 354 aa, Arabidopsis thaliana; identical to SEQ ID NO: 21698
  peptide (1)..(354): Ceres Seq. ID no. 13606712

SEQ ID NO: 101025 - protein, 209 aa, Arabidopsis thaliana; identical to SEQ ID NO: 21699
  peptide (1)..(209): Ceres Seq. ID no. 13606713

SEQ ID NO: 101026 - protein, 190 aa, Arabidopsis thaliana; identical to SEQ ID NO: 21700
  peptide (1)..(190): Ceres Seq. ID no. 13606714

SEQ ID NO: 101027 - DNA, 1342 bp, Arabidopsis thaliana
  misc_feature (1)..(1342): Ceres Seq. ID no. 13606727
  misc_feature (1)..(1342): Ortholog of  Ceres SEQ ID NO 13596816 as cited in SEQ ID NO 62287
aaaaaaaaccttcacaatctctttccctccctctctcttcctcaacatgacatcaagaacattcacaagacattccagtctcattcatgtttttctcctgctttctctcgttttctcagggaatatactacaaacagtaacgtctcttggcatcaattacggacaagttgggaacaatttgccttcaccggataaagtcattaacctcttgagatctttaaggatcacaaaaacaagaatttacgacactaaccctcaaatccttagtgcctttgcaaattcaaacatcgagatcatcgtcaccatcgaaaatcaggttttaccattactacaagatcctcaacaagctacccaatgggtagattctcacattaaaccctatgttccggccactaggattaccggaattatggtcggaaacgagcttttcaccgacgacgactctagtttaataggatacatgatgccggcgataatcaacatccacaaagccttggtccaattaggtttagatagatacattcaagtctcgtctccaagctctcttgccgtcctcggtgaatcttatcctccatctgccggaagtttcaagccggaggtttcctccgtgatgcaacaacttctagatttcttggaagccacgaaatctcctttttggataaatgcttacccttactttgcctacaaagataacccacaagaaatcccagtcgattacgttctattcaaccgtaacatcggcatgaccgatcccaacacaagactacactacgacaacatgatgtatgctcaagttgacgcagttgctttcgcggctgcgaaactagggtaccgtaacatagaagttagggttgcggaaacagggtggccttcaaaaggagatgtcggagagattggagcgtctcctgtgaatgctgccacgtataaccggaatcttatgatgaggcaattcgccggagaaggaactccagcgagacggaatgcaagactcgatgtttatatatttgcgttgttcaatgaagatatgaaaccaggtcctacttcggagaaaaactacggtatattccaaccagatggatcattagcttacaatttgggattctctacaatgtcgacaacgacggcaaattcagaatctgtcacttattcatcctctgccactaaggcaaagaggagcttggagtattggacaattttgatattggcgatggttcaagttgtaatgttgagactattttagaggaaaagttattgacaatataataacgcgattgtttaggatatttatgtaaacaatttaattataagcttgataaatataatttatattcaattcaacatt

SEQ ID NO: 101028 - protein, 412 aa, Arabidopsis thaliana
  peptide (1)..(412): Ceres Seq. ID no. 13606728
KKTFTISFPPSLFLNMTSRTFTRHSSLIHVFLLLSLVFSGNILQTVTSLGINYGQVGNNLPSPDKVINLLRSLRITKTRIYDTNPQILSAFANSNIEIIVTIENQVLPLLQDPQQATQWVDSHIKPYVPATRITGIMVGNELFTDDDSSLIGYMMPAIINIHKALVQLGLDRYIQVSSPSSLAVLGESYPPSAGSFKPEVSSVMQQLLDFLEATKSPFWINAYPYFAYKDNPQEIPVDYVLFNRNIGMTDPNTRLHYDNMMYAQVDAVAFAAAKLGYRNIEVRVAETGWPSKGDVGEIGASPVNAATYNRNLMMRQFAGEGTPARRNARLDVYIFALFNEDMKPGPTSEKNYGIFQPDGSLAYNLGFSTMSTTTANSESVTYSSSATKAKRSLEYWTILILAMVQVVMLRLF

SEQ ID NO: 101029 - protein, 397 aa, Arabidopsis thaliana
  peptide (1)..(397): Ceres Seq. ID no. 13606729
MTSRTFTRHSSLIHVFLLLSLVFSGNILQTVTSLGINYGQVGNNLPSPDKVINLLRSLRITKTRIYDTNPQILSAFANSNIEIIVTIENQVLPLLQDPQQATQWVDSHIKPYVPATRITGIMVGNELFTDDDSSLIGYMMPAIINIHKALVQLGLDRYIQVSSPSSLAVLGESYPPSAGSFKPEVSSVMQQLLDFLEATKSPFWINAYPYFAYKDNPQEIPVDYVLFNRNIGMTDPNTRLHYDNMMYAQVDAVAFAAAKLGYRNIEVRVAETGWPSKGDVGEIGASPVNAATYNRNLMMRQFAGEGTPARRNARLDVYIFALFNEDMKPGPTSEKNYGIFQPDGSLAYNLGFSTMSTTTANSESVTYSSSATKAKRSLEYWTILILAMVQVVMLRLF

SEQ ID NO: 101030 - protein, 276 aa, Arabidopsis thaliana
  peptide (1)..(276): Ceres Seq. ID no. 13606730
MVGNELFTDDDSSLIGYMMPAIINIHKALVQLGLDRYIQVSSPSSLAVLGESYPPSAGSFKPEVSSVMQQLLDFLEATKSPFWINAYPYFAYKDNPQEIPVDYVLFNRNIGMTDPNTRLHYDNMMYAQVDAVAFAAAKLGYRNIEVRVAETGWPSKGDVGEIGASPVNAATYNRNLMMRQFAGEGTPARRNARLDVYIFALFNEDMKPGPTSEKNYGIFQPDGSLAYNLGFSTMSTTTANSESVTYSSSATKAKRSLEYWTILILAMVQVVMLRLF

SEQ ID NO: 101031 - DNA, 1328 bp, Arabidopsis thaliana
  misc_feature (1)..(1328): Ceres Seq. ID no. 13606731
  misc_feature (1)..(1328): Ortholog of  Ceres SEQ ID NO 15171293 as cited in SEQ ID NO 51744
aaagtctctctaggcctctaggaatttttttgagtgttgagtaaataaaaatggagataacaaacgtgatggaatatgagaagatcgcaaaggagaaattaccaaagatggtttatgattactatgcatctggtgctgaagatcaatggactcttcaagagaatcgaaacgctttctctaggattctatttaggcctcggattcttatcgatgtaagcaagattgatgtgagcacaacggttttagggtttaatatttctatgccaattatgattgctcctactgcaatgcagaaaatggctcatcctgatggcgagcttgcaaccgcgagagctacttctgctgctggaacaatcatgactttatcttcatgggctacttgtagtgttgaggaagttgcttcaaccggaccagggattcgttttttccaactttatgtttataaggatagaaatgtggttatacagcttgtgaaacgagctgaagaagctggattcaaagctattgctcttactgtagatactccaaggcttggacgcagagaatctgacatcaaaaacagattcgcgcttcctcgaggtctaacgttgaagaacttcgaagggttggatcttgggaaaatagacaagacgaatgactcagggctagcttcatatgttgctggtcaagttgatcaatcacttagctggaaggatataaaatggctccaatctatcacaagcttgccaattcttgtcaagggtgttattacagctgaggatgcaagaattgctgttgaatatggagctgcagggataatagtctctaaccacggagctcgtcagctagattatgttcctgcaactatagtggccttagaagaggtggttaaagccgtggagggtcggattccggtttttcttgacggtggggttcgccgtggaaccgatgtctttaaggcattggctcttggcgcttcaggtgtctttgtcgggaggccgagcttgttctcgcttgcagcggatggagaagcgggagttaggaagatgctacaaatgctaagagacgagtttgagcttacaatggcactaagtggttgccgttcactgagagagatcagccgaacccacatcaagactgattgggacactcctcattacctctcggccaagctgtagggaatcttattcacttcttcaatttaagagtcaccactcatcagagagatgaaaagatagatggatgtttgaatttgtgatccaataaagtattcccatccaactatataatcgaatactttcgttttgtagatgtagttaaatggtaacaatatattaatcttttatatg

SEQ ID NO: 101032 - protein, 368 aa, Arabidopsis thaliana
  peptide (1)..(368): Ceres Seq. ID no. 13606732
MEITNVMEYEKIAKEKLPKMVYDYYASGAEDQWTLQENRNAFSRILFRPRILIDVSKIDVSTTVLGFNISMPIMIAPTAMQKMAHPDGELATARATSAAGTIMTLSSWATCSVEEVASTGPGIRFFQLYVYKDRNVVIQLVKRAEEAGFKAIALTVDTPRLGRRESDIKNRFALPRGLTLKNFEGLDLGKIDKTNDSGLASYVAGQVDQSLSWKDIKWLQSITSLPILVKGVITAEDARIAVEYGAAGIIVSNHGARQLDYVPATIVALEEVVKAVEGRIPVFLDGGVRRGTDVFKALALGASGVFVGRPSLFSLAADGEAGVRKMLQMLRDEFELTMALSGCRSLREISRTHIKTDWDTPHYLSAKL

SEQ ID NO: 101033 - protein, 362 aa, Arabidopsis thaliana
  peptide (1)..(362): Ceres Seq. ID no. 13606733
MEYEKIAKEKLPKMVYDYYASGAEDQWTLQENRNAFSRILFRPRILIDVSKIDVSTTVLGFNISMPIMIAPTAMQKMAHPDGELATARATSAAGTIMTLSSWATCSVEEVASTGPGIRFFQLYVYKDRNVVIQLVKRAEEAGFKAIALTVDTPRLGRRESDIKNRFALPRGLTLKNFEGLDLGKIDKTNDSGLASYVAGQVDQSLSWKDIKWLQSITSLPILVKGVITAEDARIAVEYGAAGIIVSNHGARQLDYVPATIVALEEVVKAVEGRIPVFLDGGVRRGTDVFKALALGASGVFVGRPSLFSLAADGEAGVRKMLQMLRDEFELTMALSGCRSLREISRTHIKTDWDTPHYLSAKL

SEQ ID NO: 101034 - protein, 349 aa, Arabidopsis thaliana
  peptide (1)..(349): Ceres Seq. ID no. 13606734
MVYDYYASGAEDQWTLQENRNAFSRILFRPRILIDVSKIDVSTTVLGFNISMPIMIAPTAMQKMAHPDGELATARATSAAGTIMTLSSWATCSVEEVASTGPGIRFFQLYVYKDRNVVIQLVKRAEEAGFKAIALTVDTPRLGRRESDIKNRFALPRGLTLKNFEGLDLGKIDKTNDSGLASYVAGQVDQSLSWKDIKWLQSITSLPILVKGVITAEDARIAVEYGAAGIIVSNHGARQLDYVPATIVALEEVVKAVEGRIPVFLDGGVRRGTDVFKALALGASGVFVGRPSLFSLAADGEAGVRKMLQMLRDEFELTMALSGCRSLREISRTHIKTDWDTPHYLSAKL

SEQ ID NO: 101035 - DNA, 1954 bp, Arabidopsis thaliana
  misc_feature (1)..(1954): Ceres Seq. ID no. 13606739
  misc_feature (1)..(1954): Ortholog of  Ceres SEQ ID NO 15171446 as cited in SEQ ID NO 51590
  misc_feature (1)..(1954): Ortholog of  Ceres SEQ ID NO 14310907 as cited in SEQ ID NO 54338
gcagaatcttaaactctgcttctctctaatggcggcgacacatcttcacataccgccaaatcctaaaacccaaacgtctcaccaaaaccctcccttttggttctcttctaaaacaggaatctacaccagcaaattcccttccctacacctccccgtcgacccaaatctcgacgccgtctccgctcttttctcacacaaacaccacggcgatacagcgctcatcgattccttaaccgggttctcaatatctcacactgagctacagattatggttcaatcaatggcggctgggatctatcacgttttaggtgttcgtcaaggtgacgttgtatcactcgtcttgcctaattccgtctattttccgatgattttcctctctttgatctcgcttggtgctattgttactaccatgaatccttcgagtagtttaggagagattaagaagcaagttagtgagtgtagtgttggattagcttttacttctactgaaaacgttgagaagctgagttctttgggggttagtgtgattagtgtatctgaaagttacgattttgattcgattcgtatcgaaaacccgaagttttactccattatgaaagaaagttttgggtttgtaccaaaaccgttgattaagcaagacgatgtagctgcaattatgtattcatctggaacaactggagctagtaaaggagttttgttaactcataggaatttgatagcatcaatggagctttttgtgaggtttgaagcttctcagtacgaatatccgggatcgagtaatgtttatctagcagctttgcctttgtgccatatctacgggttatcactctttgtgatgggattgttgtctctgggatcaactattgttgttatgaagaggtttgatgcttctgatgttgttaatgtaattgaaaggtttaagatcactcatttcccggttgttccacctatgttgatggcattgacaaagaaggcaaaaggagtttgtggtgaagtgtttaaaagtttgaagcaagtttcttctggagcagctcctttgagtaggaagttcattgaagatttccttcagactcttcctcatgtcgatttgattcagggatatggaatgactgaatcaactgcagttggaacacggggcttcaactcggaaaagcttagtaggtattcttctgtgggactactggctcctaatatgcaagccaaggtagtagattggagctctggttctttccttccaccaggaaaccgaggagagctctggatacaaggtcccggtgtcatgaaaggatacttgaataacccaaaagcaactcagatgagtatagttgaagatagttggctacgtactggggatattgcttattttgatgaagatggttacttgtttattgttgaccgtattaaggagattataaagtacaaaggctttcagatcgctccagcagatttggaggctgttcttgtttcacatcccttgattatcgacgctgcagtaacagctgccccaaatgaagaatgtggagagattccggtagcattcgttgtccggagacaagaaacaacactttcagaagaagatgtaataagctatgtagcttctcaggttgcaccctacaggaaggtgaggaaagtggtgatggtcaactctataccaaaatctccaactgggaagatattgagaaaggaactaaagagaattcttacaaactctgtttcttcaagactatgattctttcttcatttgtttggtaataagtagcagacagagagatccactaatatagccttcataactcaattcattggttttgtagcatcaaaagaaataaacagacacattctttgattctcagtgaataaagcattgtaacccaatacggaaacaaaaattctttctgagcccaaaatgtaattttagccttagtattttatttacataaaagtccttttaacc

SEQ ID NO: 101036 - protein, 575 aa, Arabidopsis thaliana
  peptide (1)..(575): Ceres Seq. ID no. 13606740
QNLKLCFSLMAATHLHIPPNPKTQTSHQNPPFWFSSKTGIYTSKFPSLHLPVDPNLDAVSALFSHKHHGDTALIDSLTGFSISHTELQIMVQSMAAGIYHVLGVRQGDVVSLVLPNSVYFPMIFLSLISLGAIVTTMNPSSSLGEIKKQVSECSVGLAFTSTENVEKLSSLGVSVISVSESYDFDSIRIENPKFYSIMKESFGFVPKPLIKQDDVAAIMYSSGTTGASKGVLLTHRNLIASMELFVRFEASQYEYPGSSNVYLAALPLCHIYGLSLFVMGLLSLGSTIVVMKRFDASDVVNVIERFKITHFPVVPPMLMALTKKAKGVCGEVFKSLKQVSSGAAPLSRKFIEDFLQTLPHVDLIQGYGMTESTAVGTRGFNSEKLSRYSSVGLLAPNMQAKVVDWSSGSFLPPGNRGELWIQGPGVMKGYLNNPKATQMSIVEDSWLRTGDIAYFDEDGYLFIVDRIKEIIKYKGFQIAPADLEAVLVSHPLIIDAAVTAAPNEECGEIPVAFVVRRQETTLSEEDVISYVASQVAPYRKVRKVVMVNSIPKSPTGKILRKELKRILTNSVSSRL

SEQ ID NO: 101037 - protein, 566 aa, Arabidopsis thaliana
  peptide (1)..(566): Ceres Seq. ID no. 13606741
MAATHLHIPPNPKTQTSHQNPPFWFSSKTGIYTSKFPSLHLPVDPNLDAVSALFSHKHHGDTALIDSLTGFSISHTELQIMVQSMAAGIYHVLGVRQGDVVSLVLPNSVYFPMIFLSLISLGAIVTTMNPSSSLGEIKKQVSECSVGLAFTSTENVEKLSSLGVSVISVSESYDFDSIRIENPKFYSIMKESFGFVPKPLIKQDDVAAIMYSSGTTGASKGVLLTHRNLIASMELFVRFEASQYEYPGSSNVYLAALPLCHIYGLSLFVMGLLSLGSTIVVMKRFDASDVVNVIERFKITHFPVVPPMLMALTKKAKGVCGEVFKSLKQVSSGAAPLSRKFIEDFLQTLPHVDLIQGYGMTESTAVGTRGFNSEKLSRYSSVGLLAPNMQAKVVDWSSGSFLPPGNRGELWIQGPGVMKGYLNNPKATQMSIVEDSWLRTGDIAYFDEDGYLFIVDRIKEIIKYKGFQIAPADLEAVLVSHPLIIDAAVTAAPNEECGEIPVAFVVRRQETTLSEEDVISYVASQVAPYRKVRKVVMVNSIPKSPTGKILRKELKRILTNSVSSRL

SEQ ID NO: 101038 - protein, 486 aa, Arabidopsis thaliana
  peptide (1)..(486): Ceres Seq. ID no. 13606742
MVQSMAAGIYHVLGVRQGDVVSLVLPNSVYFPMIFLSLISLGAIVTTMNPSSSLGEIKKQVSECSVGLAFTSTENVEKLSSLGVSVISVSESYDFDSIRIENPKFYSIMKESFGFVPKPLIKQDDVAAIMYSSGTTGASKGVLLTHRNLIASMELFVRFEASQYEYPGSSNVYLAALPLCHIYGLSLFVMGLLSLGSTIVVMKRFDASDVVNVIERFKITHFPVVPPMLMALTKKAKGVCGEVFKSLKQVSSGAAPLSRKFIEDFLQTLPHVDLIQGYGMTESTAVGTRGFNSEKLSRYSSVGLLAPNMQAKVVDWSSGSFLPPGNRGELWIQGPGVMKGYLNNPKATQMSIVEDSWLRTGDIAYFDEDGYLFIVDRIKEIIKYKGFQIAPADLEAVLVSHPLIIDAAVTAAPNEECGEIPVAFVVRRQETTLSEEDVISYVASQVAPYRKVRKVVMVNSIPKSPTGKILRKELKRILTNSVSSRL

SEQ ID NO: 101039 - DNA, 1132 bp, Arabidopsis thaliana
  misc_feature (1)..(1132): Ceres Seq. ID no. 13606777
  misc_feature (1)..(1132): Ortholog of  Ceres SEQ ID NO 14305022 as cited in SEQ ID NO 53586
  misc_feature (1)..(1132): Ortholog of  Ceres SEQ ID NO 12506279 as cited in SEQ ID NO 55440
  misc_feature (1)..(1132): Ortholog of  Ceres SEQ ID NO 13654847 as cited in SEQ ID NO 62459
  misc_feature (1)..(1132): Ortholog of  Ceres SEQ ID NO 15174357 as cited in SEQ ID NO 0
tcatcgctgtctggaacagcgatgaagattaatttgtaatataaaatacctccacgaaaaaagaaaacccaactcattaagcaaactcggatctccttctcttctctctctcgctaagaactatagaagatgggattgttctcccacaagatctccagagatgatctgaaaccaggcgatcacatctattcttggcgtaacgcttatatctactctcatcacggagtctacgtaggagatgagaaagtcattcatttcactcgtggaggtggtctagaattcggaacaggaacagttttggacaagatcatcgatatttcaataccaaatcatggaagaagagacaaaaagtgtattgattgtggagatcaatccaatctcggtggtgtaatctcttcttgtcttgattgttttctcgccggaggaaatctacatctcttcgaatacagtgcctctccgtctatctttctagccaaacgaggtggtacatgcacgatagcatcttcagatccttgtgatgaagtcatttctcgtgctaaatttctccttttgcaaaatggatttggtgagtacgatcttttagacaacaattgtgaagattttgcgatttattgcaaaactggtttgtttgtgttgtcggttgctaccaagtttggatgtagtggtcaagccaattctgtatctgcagctggtggtgttgttgctttgacgcttaaggttttaggtgtgaaaaagaagagtagtagtggtcatgaagatgactctgtggtttctgttgtaaaccagtttatttcttcgacagttaaatatgtagttcctggtattggtggtttggctttggctgaatatggtaattactgtattggtcgtctgttttacgacattggtgttagaaaagatgcttgtaaggtttctgttgaagagcttgtagcatttgtaggagccaagcaaaacatcttggaaggcaagaagtctaattagttagcactttgttgtgcattatgtatgtttgatgactaattgttgagtatggagagagtgattttgcttttctgatttcattgtattgtggaaactgtattttaagtatttgtaaagtaaaaattacagttaaaataaatttcttgtttcc

SEQ ID NO: 101040 - protein, 283 aa, Arabidopsis thaliana
  peptide (1)..(283): Ceres Seq. ID no. 13606778
MGLFSHKISRDDLKPGDHIYSWRNAYIYSHHGVYVGDEKVIHFTRGGGLEFGTGTVLDKIIDISIPNHGRRDKKCIDCGDQSNLGGVISSCLDCFLAGGNLHLFEYSASPSIFLAKRGGTCTIASSDPCDEVISRAKFLLLQNGFGEYDLLDNNCEDFAIYCKTGLFVLSVATKFGCSGQANSVSAAGGVVALTLKVLGVKKKSSSGHEDDSVVSVVNQFISSTVKYVVPGIGGLALAEYGNYCIGRLFYDIGVRKDACKVSVEELVAFVGAKQNILEGKKSN

SEQ ID NO: 101041 - DNA, 3062 bp, Arabidopsis thaliana
  misc_feature (1)..(3062): Ceres Seq. ID no. 13606782
  misc_feature (1)..(3062): Ortholog of  Ceres SEQ ID NO 13581686 as cited in SEQ ID NO 57695
  misc_feature (1)..(3062): Ortholog of  Ceres SEQ ID NO 15224315 as cited in SEQ ID NO 66131
ataggctggtttatatattttcaataggttaaattaatttcatattgttagtgtatgcttttggtattccggtgttaattaatttaatcatttacataagttcgtctctctggttttcaacattcttcttcttcttcttcgtcttcttcaaagatgcataaatatatttcttaaaccagaggttgatgatgaatcgaagtgaaatgcaaaagttaggtttcgaacacgtgagatactacacagagtcgccgtacaacagaggagagtcgtcggcgaacgtggcgacgacaagcaactattacggtgaagatgaaccatacgtggagatcacgctagatatccacgacgattccgtctccgtgtacggcttgaagtcaccgaaccatcgaggggccgggtctaattatgaggatcaatcgcttctcagacaaggtcgttcagggaggagtaactcggttttgaaacgcttggcttcttctgtttccaccggaataacacgagttgcttcttctgtttcttcgtcttccgcgagaaaaccaccgcggccgcagctggcaaagctgcgccgttcgaaatctagagcagagttagctctcaaaggtcttaaattcatcaccaaaactgatggtgtcactggttggcctgaggttgagaaacggttttatgtgatgacaatgactactaacggattattacaccgatctagattcggtgaatgtatagggatgaaatcgacagagtttgcgttggcattgttcgatgctttagcgaggagggaaaacgtaagcggagattcaataaacattaatgagcttaaagagttctggaagcagatcactgatcaagattttgattcaaggctacgaactttcttcgccatggtcgataaggattcggatgggcggttgaatgaagccgaagtaagagagattataactttaagtgcttctgcaaacgagctggataacattcggagacaagctgatgaatatgctgctttaattatggaagaactagatccttatcattatgggtacatcatgatagagaatctcgagatacttctattgcaagcgccgatgcaggatgtgagagatggagagggtaagaagctaagcaagatgctaagtcagaatctcatggttccgcagagtaggaatctcggggcgcgtttttgcagagggatgaagtattttttgtttgataattggaagagagtgtgggtgatggctctatggataggtgctatggcgggtttgttcacgtggaagtttatggagtatcgaaaaagatccgcttacgaagtcatgggagtttgtgtttgtatagctaaaggagctgcagagacgcttaaactaaacatggctatgattttgttaccagtttgtaggaacaccatcacttggctccggaccaaaaccaagttaagtgctattgttcctttcgatgacagcctcaattttcacaaggtcatagctataggaatttcagttggagttggaatccatgctacatctcacttagcatgtgattttccccggctgatagctgcagatgaagatcagtatgagccaatggagaagtattttgggccacagacaaagagatatttggactttgttcaatcggtagaaggagttaccgggattggaatggttgtactaatgaccatagcctttacattggctacaacatggttcagacgtaataagctcaaccttcctggaccactgaagaaaataacaggcttcaatgccttctggtactctcaccacttatttgttatcgtctactcgcttcttgtcgttcatggattctacgtatacctcatcatcgagccatggtacaagaaaacgacatggatgtatttgatggtaccggtggttctttacttgtgtgaaaggctgattcgtgcattcaggtcaagcgtcgaggctgtttcagtgctaaaggttgctgtgttaccagggaatgtcttgtcgcttcacttgtcaagaccaagcaacttcagatacaagagtggacaatacatgtatctcaactgttctgcagtttctacattagaatggcatccattctcaattacctcagctccaggagatgactacctcagtgtccacatcagggttttaggagactggactaagcaattaagatcattattctctgaggtgtgcaagccacgccctcctgatgaacacagactgaacagagccgactcgaagcactgggattacatccctgactttccaagaatcctaattgatggtccatatggagcaccagcacaagactacaagaagtttgaagttgttctgctagtgggtctaggaatcggtgccactccgatgatcagcatagtgagtgacataatcaataacttgaaaggcgtggaagaaggcagtaaccgaagacagtcaccgatccataatatggtcacacctcctgtttctccatcaagaaaaagtgagacgttcagaaccaagagagcttacttctactgggtcacaagagagcaggggtcgtttgactggttcaagaacgtgatggacgaagtgactgaaacagaccgcaaaaacgtaattgagctgcataattactgcaccagcgtttacgaggaaggggacgcgaggtctgcacttatcacgatgctccagtctctaaaccatgctaagcatggagtggacgttgtgtcaggaacacgtgtcatgtcccatttcgctaggccaaactggagaagcgttttcaaaaggatcgctgtgaatcatcctaagactagagtcggagtgttttattgtggagcagctgggttagtgaaagagttacgacacttatcactggatttctctcataagacctccaccaagttcatcttccataaagagaatttctaaaaaaataagtttaaaaatatatatatttcacaagagtatttgatatagtttaaattgtacatatatagtgagatttaatatagttttggtttttgtacaaaaaaagaaaagaacagtagatcatgtttgtatcctaatacgcaaactacagaatattacctttactcc

SEQ ID NO: 101042 - protein, 902 aa, Arabidopsis thaliana
  peptide (1)..(902): Ceres Seq. ID no. 13606783
MMNRSEMQKLGFEHVRYYTESPYNRGESSANVATTSNYYGEDEPYVEITLDIHDDSVSVYGLKSPNHRGAGSNYEDQSLLRQGRSGRSNSVLKRLASSVSTGITRVASSVSSSSARKPPRPQLAKLRRSKSRAELALKGLKFITKTDGVTGWPEVEKRFYVMTMTTNGLLHRSRFGECIGMKSTEFALALFDALARRENVSGDSININELKEFWKQITDQDFDSRLRTFFAMVDKDSDGRLNEAEVREIITLSASANELDNIRRQADEYAALIMEELDPYHYGYIMIENLEILLLQAPMQDVRDGEGKKLSKMLSQNLMVPQSRNLGARFCRGMKYFLFDNWKRVWVMALWIGAMAGLFTWKFMEYRKRSAYEVMGVCVCIAKGAAETLKLNMAMILLPVCRNTITWLRTKTKLSAIVPFDDSLNFHKVIAIGISVGVGIHATSHLACDFPRLIAADEDQYEPMEKYFGPQTKRYLDFVQSVEGVTGIGMVVLMTIAFTLATTWFRRNKLNLPGPLKKITGFNAFWYSHHLFVIVYSLLVVHGFYVYLIIEPWYKKTTWMYLMVPVVLYLCERLIRAFRSSVEAVSVLKVAVLPGNVLSLHLSRPSNFRYKSGQYMYLNCSAVSTLEWHPFSITSAPGDDYLSVHIRVLGDWTKQLRSLFSEVCKPRPPDEHRLNRADSKHWDYIPDFPRILIDGPYGAPAQDYKKFEVVLLVGLGIGATPMISIVSDIINNLKGVEEGSNRRQSPIHNMVTPPVSPSRKSETFRTKRAYFYWVTREQGSFDWFKNVMDEVTETDRKNVIELHNYCTSVYEEGDARSALITMLQSLNHAKHGVDVVSGTRVMSHFARPNWRSVFKRIAVNHPKTRVGVFYCGAAGLVKELRHLSLDFSHKTSTKFIFHKENF

SEQ ID NO: 101043 - protein, 901 aa, Arabidopsis thaliana
  peptide (1)..(901): Ceres Seq. ID no. 13606784
MNRSEMQKLGFEHVRYYTESPYNRGESSANVATTSNYYGEDEPYVEITLDIHDDSVSVYGLKSPNHRGAGSNYEDQSLLRQGRSGRSNSVLKRLASSVSTGITRVASSVSSSSARKPPRPQLAKLRRSKSRAELALKGLKFITKTDGVTGWPEVEKRFYVMTMTTNGLLHRSRFGECIGMKSTEFALALFDALARRENVSGDSININELKEFWKQITDQDFDSRLRTFFAMVDKDSDGRLNEAEVREIITLSASANELDNIRRQADEYAALIMEELDPYHYGYIMIENLEILLLQAPMQDVRDGEGKKLSKMLSQNLMVPQSRNLGARFCRGMKYFLFDNWKRVWVMALWIGAMAGLFTWKFMEYRKRSAYEVMGVCVCIAKGAAETLKLNMAMILLPVCRNTITWLRTKTKLSAIVPFDDSLNFHKVIAIGISVGVGIHATSHLACDFPRLIAADEDQYEPMEKYFGPQTKRYLDFVQSVEGVTGIGMVVLMTIAFTLATTWFRRNKLNLPGPLKKITGFNAFWYSHHLFVIVYSLLVVHGFYVYLIIEPWYKKTTWMYLMVPVVLYLCERLIRAFRSSVEAVSVLKVAVLPGNVLSLHLSRPSNFRYKSGQYMYLNCSAVSTLEWHPFSITSAPGDDYLSVHIRVLGDWTKQLRSLFSEVCKPRPPDEHRLNRADSKHWDYIPDFPRILIDGPYGAPAQDYKKFEVVLLVGLGIGATPMISIVSDIINNLKGVEEGSNRRQSPIHNMVTPPVSPSRKSETFRTKRAYFYWVTREQGSFDWFKNVMDEVTETDRKNVIELHNYCTSVYEEGDARSALITMLQSLNHAKHGVDVVSGTRVMSHFARPNWRSVFKRIAVNHPKTRVGVFYCGAAGLVKELRHLSLDFSHKTSTKFIFHKENF

SEQ ID NO: 101044 - protein, 896 aa, Arabidopsis thaliana
  peptide (1)..(896): Ceres Seq. ID no. 13606785
MQKLGFEHVRYYTESPYNRGESSANVATTSNYYGEDEPYVEITLDIHDDSVSVYGLKSPNHRGAGSNYEDQSLLRQGRSGRSNSVLKRLASSVSTGITRVASSVSSSSARKPPRPQLAKLRRSKSRAELALKGLKFITKTDGVTGWPEVEKRFYVMTMTTNGLLHRSRFGECIGMKSTEFALALFDALARRENVSGDSININELKEFWKQITDQDFDSRLRTFFAMVDKDSDGRLNEAEVREIITLSASANELDNIRRQADEYAALIMEELDPYHYGYIMIENLEILLLQAPMQDVRDGEGKKLSKMLSQNLMVPQSRNLGARFCRGMKYFLFDNWKRVWVMALWIGAMAGLFTWKFMEYRKRSAYEVMGVCVCIAKGAAETLKLNMAMILLPVCRNTITWLRTKTKLSAIVPFDDSLNFHKVIAIGISVGVGIHATSHLACDFPRLIAADEDQYEPMEKYFGPQTKRYLDFVQSVEGVTGIGMVVLMTIAFTLATTWFRRNKLNLPGPLKKITGFNAFWYSHHLFVIVYSLLVVHGFYVYLIIEPWYKKTTWMYLMVPVVLYLCERLIRAFRSSVEAVSVLKVAVLPGNVLSLHLSRPSNFRYKSGQYMYLNCSAVSTLEWHPFSITSAPGDDYLSVHIRVLGDWTKQLRSLFSEVCKPRPPDEHRLNRADSKHWDYIPDFPRILIDGPYGAPAQDYKKFEVVLLVGLGIGATPMISIVSDIINNLKGVEEGSNRRQSPIHNMVTPPVSPSRKSETFRTKRAYFYWVTREQGSFDWFKNVMDEVTETDRKNVIELHNYCTSVYEEGDARSALITMLQSLNHAKHGVDVVSGTRVMSHFARPNWRSVFKRIAVNHPKTRVGVFYCGAAGLVKELRHLSLDFSHKTSTKFIFHKENF

SEQ ID NO: 101045 - DNA, 772 bp, Arabidopsis thaliana
  misc_feature (1)..(772): Ceres Seq. ID no. 13606786
  misc_feature (1)..(772): Ortholog of  Ceres SEQ ID NO 15171175 as cited in SEQ ID NO 57476
  misc_feature (1)..(772): Ortholog of  Ceres SEQ ID NO 15178436 as cited in SEQ ID NO 57919
  misc_feature (1)..(772): Ortholog of  Ceres SEQ ID NO 13655808 as cited in SEQ ID NO 64901
gacaccaacacaaacttaatctatgtaataacctacacatctctctctaaatccaatggcttatcagattgatcagaagatgattcacgatcaagaaccaatggctgagatcatgccaaatgtcataacggcgatgtcatctcttctacaaagggtgtcggagacgaacgacgatctgagccgtccgttcagggagcacaagaggatctcagctttcaatgcagtgaccaaaccttctatatcaatcagaagctatatggagaggatattcaagtacgcagattgcagcgactcgtgttacatagtcgcgtatatatatttggatcggttcatacaaaagcagccattgttgcccattgattcctctaatgtccatagactcatcatcaccagcgtcttggtctctgctaagttcatggatgacttgtgttacaataatgcattctatgcgaaagttggaggaataaccacagaggagatgaacttgttagagctggacttcttatttggaattggattccaattgaatgtgacaatttctacttataatgactattgttcttcacttcaaagagagatggttatgaggacgatgtactctccacttttggaacctgcttttttagttagaagttttcataagaatcttctaaagaatttgtacgacgaagatcatcgtaatagtcaagtcaccagtgctgtttgatacattggaatactagatcatctaacaaatggaaccttttaacggaaatgtaacaatttttttgag

SEQ ID NO: 101046 - protein, 216 aa, Arabidopsis thaliana
  peptide (1)..(216): Ceres Seq. ID no. 13606787
MAYQIDQKMIHDQEPMAEIMPNVITAMSSLLQRVSETNDDLSRPFREHKRISAFNAVTKPSISIRSYMERIFKYADCSDSCYIVAYIYLDRFIQKQPLLPIDSSNVHRLIITSVLVSAKFMDDLCYNNAFYAKVGGITTEEMNLLELDFLFGIGFQLNVTISTYNDYCSSLQREMVMRTMYSPLLEPAFLVRSFHKNLLKNLYDEDHRNSQVTSAV

SEQ ID NO: 101047 - protein, 208 aa, Arabidopsis thaliana
  peptide (1)..(208): Ceres Seq. ID no. 13606788
MIHDQEPMAEIMPNVITAMSSLLQRVSETNDDLSRPFREHKRISAFNAVTKPSISIRSYMERIFKYADCSDSCYIVAYIYLDRFIQKQPLLPIDSSNVHRLIITSVLVSAKFMDDLCYNNAFYAKVGGITTEEMNLLELDFLFGIGFQLNVTISTYNDYCSSLQREMVMRTMYSPLLEPAFLVRSFHKNLLKNLYDEDHRNSQVTSAV

SEQ ID NO: 101048 - protein, 201 aa, Arabidopsis thaliana
  peptide (1)..(201): Ceres Seq. ID no. 13606789
MAEIMPNVITAMSSLLQRVSETNDDLSRPFREHKRISAFNAVTKPSISIRSYMERIFKYADCSDSCYIVAYIYLDRFIQKQPLLPIDSSNVHRLIITSVLVSAKFMDDLCYNNAFYAKVGGITTEEMNLLELDFLFGIGFQLNVTISTYNDYCSSLQREMVMRTMYSPLLEPAFLVRSFHKNLLKNLYDEDHRNSQVTSAV

SEQ ID NO: 101049 - DNA, 715 bp, Arabidopsis thaliana
  misc_feature (1)..(715): Ceres Seq. ID no. 13606793
  misc_feature (1)..(715): Ortholog of  Ceres SEQ ID NO 12471935 as cited in SEQ ID NO 122
  misc_feature (1)..(715): Ortholog of  Ceres SEQ ID NO 13594582 as cited in SEQ ID NO 51986
  misc_feature (1)..(715): Ortholog of  Ceres SEQ ID NO 13661310 as cited in SEQ ID NO 61077
  misc_feature (1)..(715): Ortholog of  Ceres SEQ ID NO 13599572 as cited in SEQ ID NO 0
aattccacaatcatccgatatcaaacaagctatggcgccctttccactctctttgatttttggaaagaaaaaacgtcgtcgcgacgacgagatacgaagacaaaagccgacgctcaagggtgttatgacggctttttttgccactgaagctgcaatatgcctcttgttgctggccggtatatctctaaccggcacagccgtggcactattcgcgtccatgccgctattcctcgtttttagccccgttcttgtacccgcgggtattgccaccactattcttgcttcaggtttaatggccggaggcacctctggtgtgtcgggtctcaccatcttaatgtggctctacaagaaatatacgggtagagactttccaattaaaattccaggtgctgccgcagcaggtggagctgccccagccgctcccgctgcccctgcccctgctgcacctgccgctaaaccagcagctaaaccagcagctaaaccgggcgcgtgaaaattagtcaaggacatagacaaggatgcatgacgatatggaaaaatttgctctacaaccattgaaattccataaattaaagatatttatccacttcttttttttgctaagtactaattattacgtactgatgaaactaaatttctcaatcgtcattctattgatgtatgccgtgctacagaaacaataacatatatatgcatgtttattgtttaatatttt

SEQ ID NO: 101050 - protein, 163 aa, Arabidopsis thaliana
  peptide (1)..(163): Ceres Seq. ID no. 13606794
IPQSSDIKQAMAPFPLSLIFGKKKRRRDDEIRRQKPTLKGVMTAFFATEAAICLLLLAGISLTGTAVALFASMPLFLVFSPVLVPAGIATTILASGLMAGGTSGVSGLTILMWLYKKYTGRDFPIKIPGAAAAGGAAPAAPAAPAPAAPAAKPAAKPAAKPGA

SEQ ID NO: 101051 - protein, 153 aa, Arabidopsis thaliana
  peptide (1)..(153): Ceres Seq. ID no. 13606795
MAPFPLSLIFGKKKRRRDDEIRRQKPTLKGVMTAFFATEAAICLLLLAGISLTGTAVALFASMPLFLVFSPVLVPAGIATTILASGLMAGGTSGVSGLTILMWLYKKYTGRDFPIKIPGAAAAGGAAPAAPAAPAPAAPAAKPAAKPAAKPGA

SEQ ID NO: 101052 - protein, 122 aa, Arabidopsis thaliana
  peptide (1)..(122): Ceres Seq. ID no. 13606796
MTAFFATEAAICLLLLAGISLTGTAVALFASMPLFLVFSPVLVPAGIATTILASGLMAGGTSGVSGLTILMWLYKKYTGRDFPIKIPGAAAAGGAAPAAPAAPAPAAPAAKPAAKPAAKPGA

SEQ ID NO: 101053 - DNA, 1114 bp, Arabidopsis thaliana
  misc_feature (1)..(1114): Ceres Seq. ID no. 13606820
  misc_feature (1)..(1114): Ortholog of  Ceres SEQ ID NO 13664220 as cited in SEQ ID NO 61151
  misc_feature (1)..(1114): Ortholog of  Ceres SEQ ID NO 13597477 as cited in SEQ ID NO 65160
atgatgaggtcgtttgtctcgttgatttctcttctccttcttctctcattttcttcatctgttctctcaaccaaaaagtcatcatttcaaaaacttccggtgccaggaaacagaacaggccctgaagctttcgcttttgattccaccggaaaaggattctacaccggagtcaccggcggtaaaatcctaaaatatcttccaaagaaaggttatgtcgactttgcccagatcacaaactcttcgaagtcttcgttgtgcgacggagcacttggaaccactaacgtcgaaaaatgtggtcgaccagccggaatagccttcaacacgaaaacaggtgatctttacgtcgcagatgctgcattgggtctccacgtcatccctcgccgtgggggtttggctaagaagatcgccgacagtgtcggcggcaagccctttttgtttcttgacgggcttgacgtagatcccactaccggcgtcgtctatttcacttccttcagctcaacatttggccctagggatgtgttgaaagcagtggcaacaaaagactcgaccggtaagttcttcaaatacgatccatcaaaaaaggtcgtgactgtattgatggaaggtcttagcggctcagccggatgtgccgttagctcagatggttcattcgtgctggttggtcagttcacaaaaagtaacatcaagaggtattggatcaaaggatccaaagctggtacttctgaagacttcaccaactcggtctcgaaccctgacaacatcaagaggatcggttctactggaaacttttgggttgcttcggtcgtgaactcagccaccggaccgacaaacccttcggcggttaaagtcagttctgccggtaaagtgcttcagaccattcccctaaaagacaagtttggggatactttggttagtgaagttaacgaatacaaaggacagctttacatcggagctctttttggtcctttcgccggaattcttaagctttaaagtgaacatgttattagtatgggttagaattaaagtgattgaatcgaaataaatatggttacaaagtcttgacggatcaatgtacgctcatgttgattctgttcaaataaatatgatttttttt

SEQ ID NO: 101054 - protein, 329 aa, Arabidopsis thaliana
  peptide (1)..(329): Ceres Seq. ID no. 13606821
MMRSFVSLISLLLLLSFSSSVLSTKKSSFQKLPVPGNRTGPEAFAFDSTGKGFYTGVTGGKILKYLPKKGYVDFAQITNSSKSSLCDGALGTTNVEKCGRPAGIAFNTKTGDLYVADAALGLHVIPRRGGLAKKIADSVGGKPFLFLDGLDVDPTTGVVYFTSFSSTFGPRDVLKAVATKDSTGKFFKYDPSKKVVTVLMEGLSGSAGCAVSSDGSFVLVGQFTKSNIKRYWIKGSKAGTSEDFTNSVSNPDNIKRIGSTGNFWVASVVNSATGPTNPSAVKVSSAGKVLQTIPLKDKFGDTLVSEVNEYKGQLYIGALFGPFAGILKL

SEQ ID NO: 101055 - protein, 328 aa, Arabidopsis thaliana; identical to SEQ ID NO: 88599
  peptide (1)..(328): Ceres Seq. ID no. 13606822

SEQ ID NO: 101056 - DNA, 1662 bp, Arabidopsis thaliana
  misc_feature (1)..(1662): Ceres Seq. ID no. 13606823
  misc_feature (1)..(1662): Ortholog of  Ceres SEQ ID NO 13594209 as cited in SEQ ID NO 59089
  misc_feature (1)..(1662): Ortholog of  Ceres SEQ ID NO 13664173 as cited in SEQ ID NO 61223
  misc_feature (1)..(1662): Ortholog of  Ceres SEQ ID NO 15169599 as cited in SEQ ID NO 66096
  misc_feature (1)..(1662): Ortholog of  Ceres SEQ ID NO 13502874 as cited in SEQ ID NO 66298
  misc_feature (1)..(1662): Ortholog of  Ceres SEQ ID NO 12614124 as cited in SEQ ID NO 68392
  misc_feature (1)..(1662): Ortholog of  Ceres SEQ ID NO 14308011 as cited in SEQ ID NO 69234
aaacctgtattttatcaattaccacactttgtctaagcaaaatggatttattactcatatccttaaccactatcataatcgccgcctacatgcaaaatctacgacgtcggggatccaacataccgccgggaccaccaacgcgatttctggtcggaaaccttcatcaactgaaaccattatggacgcagtctttctccgagtggtcacagacttatggccccatcatatcggtgtggttaggatcacagctagctgttgtggtctcgagctctgacttagccaaacaagtgttgagagacaaagactaccaactctgtaaccgacacagaaccgcaaggatgactcagaacggcagcgatcttatttggtctgactacggagcacattatgtgaaaatgagaaaactctgtacactcgagctcttttctttgaaaagcatagagtgtttcaggtcgatgagagagatggaagtaagttccatggttaagtcgattttcaatgacttcatgagcgatgatcagaaaccagtggtgttgaggaactatctagattctgttgctttgaacattgtttcaagattagttatcgggaaaacattcgaacccaaagatggaagagagtttagatcaattgtagaaagggagactcgcttgcccggcgcaaccaagatgcttgattacaccgtttggcttaaacgtctttcgtcatggttcactagcgacaaggcgttcatgaagcacatggctcggaaaagaaattggtttaaacgagctgtaatggatgaagtatatggaggaagagatcaaaagtgttttgttcagagtctgttagagttgaaagagaaggatgagctgaccgaggagactgtgatgggactggtctggaacatgttaactgcaggagctgacacaaccgccataactattgaatgggcaatggcagagatgatcagatgcccgaccgtgaaagaaaaggtgcaggatgagcttgattccgtggttggatccggacggttaatgtctgatgcagatatcccaaaactgccgtttctgcaatgcgtactcaaagaagctctccggcttcaccctccaacaccattgatgcttccacacaaggccagcgaatcagttcaggtaggtgggtacaaagttcctaagggagccacggtttatgtcaacgtgcaggcgattgctcgagatcctgcaaactggagtaacccagatgagtttagaccagagaggtttcttgtggaggaaacggacgttaaaggtcaagactttcgggttcttccgtttgggtcgggaagacgggtgtgtccagccgctcaactcagcctcaatatgatgacattagcactaggtagtttgttgcattgtttctcatggacatcctctacacctcgagaacacattgacatgaccgagaagcctggattagtttgttacatgaaggctccattgcaggctctagcttcgtccaggctgccacaagagttatacctttaacttttaactgagatagattatattaatcaacataagataaagagagattctcaattgcgaaaaacagatgtagttatggcaagatttaggacatggatgatgacatggttcgtacaaacagaatgtagctattgatagtaaataaactaaatattcc

SEQ ID NO: 101057 - protein, 500 aa, Arabidopsis thaliana; identical to SEQ ID NO: 43749
  peptide (1)..(500): Ceres Seq. ID no. 13606824

SEQ ID NO: 101058 - protein, 487 aa, Arabidopsis thaliana; identical to SEQ ID NO: 43750
  peptide (1)..(487): Ceres Seq. ID no. 13606825

SEQ ID NO: 101059 - protein, 471 aa, Arabidopsis thaliana; identical to SEQ ID NO: 43751
  peptide (1)..(471): Ceres Seq. ID no. 13606826

SEQ ID NO: 101060 - DNA, 775 bp, Arabidopsis thaliana
  misc_feature (1)..(775): Ceres Seq. ID no. 13606831
  misc_feature (1)..(775): Ortholog of  Ceres SEQ ID NO 12556792 as cited in SEQ ID NO 37
  misc_feature (1)..(775): Ortholog of  Ceres SEQ ID NO 13594143 as cited in SEQ ID NO 58945
  misc_feature (1)..(775): Ortholog of  Ceres SEQ ID NO 12590595 as cited in SEQ ID NO 0
  misc_feature (1)..(775): Ortholog of  Ceres SEQ ID NO 15179171 as cited in SEQ ID NO 0
acacaatcattcgttctctctctcaaagtctcaatccatctccagagagtagtgtgtttttagtggaggaagaatcagattcaaaagccaaaatcaaagcttggtgatgggatctggagctggcaatttcctcaaggttcttctcaggaacttcgatgttcttgctgggcctgtggttagtctcgtttatcctctatatgcttcagttcaagcgattgaaactcaatctcatgctgatgacaaacaatggctaacttattgggtcctttattcattacttacactcatcgagctcacattcgccaaactcatcgaatggttaccgatatggtcatacatgaagctgatcttgacttgctggcttgttattccctactttagtggcgctgcttatgtctatgaacattttgtgagaccggtgtttgttaaccctcggagcattaacatttggtatgtgccaaagaagatggatatcttcagaaaaccagacgatgtgttaacagctgctgagaagtacattgcagagaatggacctgatgcttttgagaagatcttaagccgggctgataaatcaaaaagatataataagcatgaatatgaaagctatgaaacgatgtatggtgagggttatcagtactaagagaaatttgaaaaagcttttaattttagaatgtgtgaagcaacttcatgtctttgttgtttgtttatgcttcctttttgtggatctctctcgtgtaaaaaagttgctaattaaaataaagatgctttctgctcc

SEQ ID NO: 101061 - protein, 177 aa, Arabidopsis thaliana; identical to SEQ ID NO: 24967
  peptide (1)..(177): Ceres Seq. ID no. 13606832

SEQ ID NO: 101062 - protein, 100 aa, Arabidopsis thaliana; identical to SEQ ID NO: 24968
  peptide (1)..(100): Ceres Seq. ID no. 13606833

SEQ ID NO: 101063 - DNA, 1078 bp, Arabidopsis thaliana
  misc_feature (1)..(1078): Ceres Seq. ID no. 13606841
  misc_feature (1)..(1078): Ortholog of  Ceres SEQ ID NO 13594560 as cited in SEQ ID NO 51329
  misc_feature (1)..(1078): Ortholog of  Ceres SEQ ID NO 12613701 as cited in SEQ ID NO 67983
atctcataaaaacaaaaacaacaacacacatttcaaagaactctgaaatggcaaaccaaaaagggttacatgtagtgatgatgatcatcactgtttggcttctttatgcagcacctaatatccatggatggggaaaagaaggtcatgaaatcatctgtaaaatcgctcagactaggttggatgaaacagcagcaaaggccgtgaaagagctgttacctgaatctgcagaaggagacctctcaagcttgtgtctttgggctgatcgtgtcaagttcagataccactggtcttctcctcttcattacatcaacactcctgatgcatgctcataccaatacaatagggactgcaaggacgaatctggagagaaaggaagatgtgttgcgggagccatttacaactacaccacacagcttctttcctacaaaactgcagcttcatctcagtcacaatacaacttaaccgaggccctgctcttcgtgtcccatttcatgggtgatatccatcagcctctacatgtgagttatgcttcagacaaaggaggtaacaccatcgaagtacattggtacacgagaaaagctaacctccaccatatatgggattccaacattatcgaaacagctgaagcagatctctataactctgcactagaaggaatggtggatgcactcaaaaagaatatcacgacagaatgggcagatcaagttaagagatgggagacctgcacaaagaagacagcatgtccagacatatacgcatccgaaggaattcaagcagcctgtgactgggcatacaagggggtaacggaaggagacactctagaagatgaatacttctattcacgtctaccgatagtgtatcagcggttagcacagggaggggtgagactagcagctaccctaaacaggattttcggttgaagctgaagttacagcataatgattggtctaagcctgtcttcatattagattaaaaactgcattattgaaacaaggaaatagcaatcacaagccccgaacacggcaatgctctttcattatcaaacaaaataaattatgtttactcacaaagtttcttc

SEQ ID NO: 101064 - protein, 305 aa, Arabidopsis thaliana
  peptide (1)..(305): Ceres Seq. ID no. 13606842
LIKTKTTTHISKNSEMANQKGLHVVMMIITVWLLYAAPNIHGWGKEGHEIICKIAQTRLDETAAKAVKELLPESAEGDLSSLCLWADRVKFRYHWSSPLHYINTPDACSYQYNRDCKDESGEKGRCVAGAIYNYTTQLLSYKTAASSQSQYNLTEALLFVSHFMGDIHQPLHVSYASDKGGNTIEVHWYTRKANLHHIWDSNIIETAEADLYNSALEGMVDALKKNITTEWADQVKRWETCTKKTACPDIYASEGIQAACDWAYKGVTEGDTLEDEYFYSRLPIVYQRLAQGGVRLAATLNRIFG

SEQ ID NO: 101065 - protein, 290 aa, Arabidopsis thaliana
  peptide (1)..(290): Ceres Seq. ID no. 13606843
MANQKGLHVVMMIITVWLLYAAPNIHGWGKEGHEIICKIAQTRLDETAAKAVKELLPESAEGDLSSLCLWADRVKFRYHWSSPLHYINTPDACSYQYNRDCKDESGEKGRCVAGAIYNYTTQLLSYKTAASSQSQYNLTEALLFVSHFMGDIHQPLHVSYASDKGGNTIEVHWYTRKANLHHIWDSNIIETAEADLYNSALEGMVDALKKNITTEWADQVKRWETCTKKTACPDIYASEGIQAACDWAYKGVTEGDTLEDEYFYSRLPIVYQRLAQGGVRLAATLNRIFG

SEQ ID NO: 101066 - protein, 280 aa, Arabidopsis thaliana
  peptide (1)..(280): Ceres Seq. ID no. 13606844
MMIITVWLLYAAPNIHGWGKEGHEIICKIAQTRLDETAAKAVKELLPESAEGDLSSLCLWADRVKFRYHWSSPLHYINTPDACSYQYNRDCKDESGEKGRCVAGAIYNYTTQLLSYKTAASSQSQYNLTEALLFVSHFMGDIHQPLHVSYASDKGGNTIEVHWYTRKANLHHIWDSNIIETAEADLYNSALEGMVDALKKNITTEWADQVKRWETCTKKTACPDIYASEGIQAACDWAYKGVTEGDTLEDEYFYSRLPIVYQRLAQGGVRLAATLNRIFG

SEQ ID NO: 101067 - DNA, 1255 bp, Arabidopsis thaliana
  misc_feature (1)..(1255): Ceres Seq. ID no. 13606856
  misc_feature (1)..(1255): Ortholog of  Ceres SEQ ID NO 13502952 as cited in SEQ ID NO 62271
  misc_feature (1)..(1255): Ortholog of  Ceres SEQ ID NO 13502973 as cited in SEQ ID NO 68052
  misc_feature (1)..(1255): Ortholog of  Ceres SEQ ID NO 13596000 as cited in SEQ ID NO 68188
atcacaacacaacacaaacaaaccatttacataaaacaaaaacaatttaatacttcttagtgtgtaaatgtgtgattctttcatcaataacaaaatgacatcgatattattcatgctcgtgagtctaacaattctttccatgaatctaaaagtctctcaagccacatctcgtgtcaccttccacgagccgatcgttgctgaacaccatcagcaatggatgactcggttctctcgagtttacagtgacgagctcgagaaacaaatgagattcgatgtgttcaagaaaaacttgaagttcattgagaaatttaataagaaaggggatagaacctacaagcttggtgtcaacgagtttgcggattggaccagagaggaattcattgccactcacaccggcctcaagggggttaacgggattccatcctctgaatttgtcgatgaaatgataccttcttggaattggaatgtcagtgatgtcgctggccgtgagaccaaagattggagatacgaaggagctgtaacacctgttaaataccaaggccaatgtggatgttgttgggcattctcaagcgtcgcagcggtggaaggtttgacaaagattgttggaaacaacctagtatcattgtctgaacaacaacttctagattgcgacagagagcgtgacaacggttgcaacggtggaataatgtcagacgctttcagctatataatcaaaaaccgaggcattgcctcagaggcatcatacccttaccaagcggcagaggggacatgccggtacaatgggaaaccctccgcatggatcagagggttccagaccgttccaagcaacaacgagcgtgcattgctcgaggctgtatccaagcagcctgtctcagtgtccattgacgcggatgggcccggtttcatgcattactcagggggagtgtacgatgagccgtactgtgggaccaacgtgaaccatgcagtgacgttcgttggatacggaacgagcccagaggggatcaagtactggctggctaagaactcgtggggtgagacttggggagagaatggttacattaggatccgtagagatgtggcatggcctcaaggcatgtgtggtgtggctcagtatgctttttatccggttgcctaactaaacggcagacgacttttgttatataaaagtgatattattgttttaaacattttaaacaacaaaatggtgatatatcttgttatatagtttggtttatgaactctttagatgtggtct

SEQ ID NO: 101068 - protein, 355 aa, Arabidopsis thaliana
  peptide (1)..(355): Ceres Seq. ID no. 13606857
MCDSFINNKMTSILFMLVSLTILSMNLKVSQATSRVTFHEPIVAEHHQQWMTRFSRVYSDELEKQMRFDVFKKNLKFIEKFNKKGDRTYKLGVNEFADWTREEFIATHTGLKGVNGIPSSEFVDEMIPSWNWNVSDVAGRETKDWRYEGAVTPVKYQGQCGCCWAFSSVAAVEGLTKIVGNNLVSLSEQQLLDCDRERDNGCNGGIMSDAFSYIIKNRGIASEASYPYQAAEGTCRYNGKPSAWIRGFQTVPSNNERALLEAVSKQPVSVSIDADGPGFMHYSGGVYDEPYCGTNVNHAVTFVGYGTSPEGIKYWLAKNSWGETWGENGYIRIRRDVAWPQGMCGVAQYAFYPVA

SEQ ID NO: 101069 - protein, 346 aa, Arabidopsis thaliana
  peptide (1)..(346): Ceres Seq. ID no. 13606858
MTSILFMLVSLTILSMNLKVSQATSRVTFHEPIVAEHHQQWMTRFSRVYSDELEKQMRFDVFKKNLKFIEKFNKKGDRTYKLGVNEFADWTREEFIATHTGLKGVNGIPSSEFVDEMIPSWNWNVSDVAGRETKDWRYEGAVTPVKYQGQCGCCWAFSSVAAVEGLTKIVGNNLVSLSEQQLLDCDRERDNGCNGGIMSDAFSYIIKNRGIASEASYPYQAAEGTCRYNGKPSAWIRGFQTVPSNNERALLEAVSKQPVSVSIDADGPGFMHYSGGVYDEPYCGTNVNHAVTFVGYGTSPEGIKYWLAKNSWGETWGENGYIRIRRDVAWPQGMCGVAQYAFYPVA

SEQ ID NO: 101070 - protein, 340 aa, Arabidopsis thaliana
  peptide (1)..(340): Ceres Seq. ID no. 13606859
MLVSLTILSMNLKVSQATSRVTFHEPIVAEHHQQWMTRFSRVYSDELEKQMRFDVFKKNLKFIEKFNKKGDRTYKLGVNEFADWTREEFIATHTGLKGVNGIPSSEFVDEMIPSWNWNVSDVAGRETKDWRYEGAVTPVKYQGQCGCCWAFSSVAAVEGLTKIVGNNLVSLSEQQLLDCDRERDNGCNGGIMSDAFSYIIKNRGIASEASYPYQAAEGTCRYNGKPSAWIRGFQTVPSNNERALLEAVSKQPVSVSIDADGPGFMHYSGGVYDEPYCGTNVNHAVTFVGYGTSPEGIKYWLAKNSWGETWGENGYIRIRRDVAWPQGMCGVAQYAFYPVA

SEQ ID NO: 101071 - DNA, 724 bp, Arabidopsis thaliana
  misc_feature (1)..(724): Ceres Seq. ID no. 13606860
  misc_feature (1)..(724): Ortholog of  Ceres SEQ ID NO 12557888 as cited in SEQ ID NO 76
  misc_feature (1)..(724): Ortholog of  Ceres SEQ ID NO 15179616 as cited in SEQ ID NO 1061
  misc_feature (1)..(724): Ortholog of  Ceres SEQ ID NO 13664090 as cited in SEQ ID NO 61005
  misc_feature (1)..(724): Ortholog of  Ceres SEQ ID NO 15174400 as cited in SEQ ID NO 0
atggccaaattcttcattgtcttccttgcctctgccctatgtttcaccaccctcgttcacttcaccgcagctgatgccgacgactttgacaaattccacatcaagggctccgtctactgcgacacatgccgtgtccaattcatcacccgtatcagcaaatttctcgagggggcaaaggtaaagcttgagtgcaagggtcgtgagaaccagacagtgaccctaaccaaagaagccgtgaccgacaacgccggtaactaccagatggaagtaatgggtgaccacgaagaggaagtgtgcgagatcgtcctcctccaatcacctgacccagagtgtggagacgtgaacaaccaagaattcctaagaaacgcagccagaatcagtctcacggccaatgatggcattgtctccaacgagactcgaaccattaacccacttgggttcatgaggaagactcctctcgctgaatgccctcaagttttcaaggagcttggaatcgtccctgacgtcaccttctaagcttaatatacatatatacacacccatatacatcgatctctcaaagtctcaacactttcaatttttttgatgactctttttaatatataaaacatttatttatgttttttatgtgtctgtctgagtttactaattaaccatgtttttttttcgttgttattgttttatttttgggagttcttttttacgaatgatttgattaccttcc

SEQ ID NO: 101072 - protein, 171 aa, Arabidopsis thaliana
  peptide (1)..(171): Ceres Seq. ID no. 13606861
MAKFFIVFLASALCFTTLVHFTAADADDFDKFHIKGSVYCDTCRVQFITRISKFLEGAKVKLECKGRENQTVTLTKEAVTDNAGNYQMEVMGDHEEEVCEIVLLQSPDPECGDVNNQEFLRNAARISLTANDGIVSNETRTINPLGFMRKTPLAECPQVFKELGIVPDVTF

SEQ ID NO: 101073 - DNA, 854 bp, Arabidopsis thaliana
  misc_feature (1)..(854): Ceres Seq. ID no. 13606870
  misc_feature (1)..(854): Ortholog of  Ceres SEQ ID NO 14306264 as cited in SEQ ID NO 1386
  misc_feature (1)..(854): Ortholog of  Ceres SEQ ID NO 15179159 as cited in SEQ ID NO 0
aaaattgtaaccaagaaaataaaattaaggatggctttgagcggcggcgatgatcaggtacctcctggaggtccgatgacagtttcaacacgtctgattgatgccggatcgacgatcatgcagcggcgattaccggtgaagcagatgaacactcatgtctctacttttgcgatatatggtggtgacatgtcccggctaatagggactcaccactatgtccaccgcgtcaacgacgagttccttcagtgtgctgtttacgcctctgaccgctccgatgcacctctaatcggaattgaatatgtaatatccgaccgattatatgaaactttgtctgaggatgagcaaaagctttggcactctcatgcatatgaggttaagtcaggctcgtgggcttatccacgattgcctgaggttgtggctgctccggagctcaagaacatagccaaaacgtacggaaagttttggtgcacctggcagatagaccgaggtgacaagttaccaatgggtgcacccgaactaatgatgtcacctcagggggtggggcaaggggtactaaggccagagttggtgaagagaagagatgagaagtacaacatttcgacagatgatttgaaacacacgagagcggagattgctgaaccggagtggatcaatccgatggctgactactggaagcaacatggtaagtgttttgtactcgatattgcgactgtcgaaatgaaccgtcacgcgcaattcccgtgaacaatgtcctctcatggctcacttgtatgagtgatgaagttgatatagaaatcgaatgtatatagaataatgttttactcgatttcaattacgtcaagaaaatcttaaat

SEQ ID NO: 101074 - protein, 247 aa, Arabidopsis thaliana
  peptide (1)..(247): Ceres Seq. ID no. 13606871
KIVTKKIKLRMALSGGDDQVPPGGPMTVSTRLIDAGSTIMQRRLPVKQMNTHVSTFAIYGGDMSRLIGTHHYVHRVNDEFLQCAVYASDRSDAPLIGIEYVISDRLYETLSEDEQKLWHSHAYEVKSGSWAYPRLPEVVAAPELKNIAKTYGKFWCTWQIDRGDKLPMGAPELMMSPQGVGQGVLRPELVKRRDEKYNISTDDLKHTRAEIAEPEWINPMADYWKQHGKCFVLDIATVEMNRHAQFP

SEQ ID NO: 101075 - protein, 237 aa, Arabidopsis thaliana
  peptide (1)..(237): Ceres Seq. ID no. 13606872
MALSGGDDQVPPGGPMTVSTRLIDAGSTIMQRRLPVKQMNTHVSTFAIYGGDMSRLIGTHHYVHRVNDEFLQCAVYASDRSDAPLIGIEYVISDRLYETLSEDEQKLWHSHAYEVKSGSWAYPRLPEVVAAPELKNIAKTYGKFWCTWQIDRGDKLPMGAPELMMSPQGVGQGVLRPELVKRRDEKYNISTDDLKHTRAEIAEPEWINPMADYWKQHGKCFVLDIATVEMNRHAQFP

SEQ ID NO: 101076 - protein, 222 aa, Arabidopsis thaliana
  peptide (1)..(222): Ceres Seq. ID no. 13606873
MTVSTRLIDAGSTIMQRRLPVKQMNTHVSTFAIYGGDMSRLIGTHHYVHRVNDEFLQCAVYASDRSDAPLIGIEYVISDRLYETLSEDEQKLWHSHAYEVKSGSWAYPRLPEVVAAPELKNIAKTYGKFWCTWQIDRGDKLPMGAPELMMSPQGVGQGVLRPELVKRRDEKYNISTDDLKHTRAEIAEPEWINPMADYWKQHGKCFVLDIATVEMNRHAQFP

SEQ ID NO: 101077 - DNA, 1408 bp, Arabidopsis thaliana
  misc_feature (1)..(1408): Ceres Seq. ID no. 13606878
  misc_feature (1)..(1408): Ortholog of  Ceres SEQ ID NO 14313583 as cited in SEQ ID NO 55431
  misc_feature (1)..(1408): Ortholog of  Ceres SEQ ID NO 12617090 as cited in SEQ ID NO 64005
  misc_feature (1)..(1408): Ortholog of  Ceres SEQ ID NO 13597233 as cited in SEQ ID NO 64370
  misc_feature (1)..(1408): Ortholog of  Ceres SEQ ID NO 14302844 as cited in SEQ ID NO 65379
  misc_feature (1)..(1408): Ortholog of  Ceres SEQ ID NO 15226354 as cited in SEQ ID NO 0
agttcctaaatcataactacaaaaacttttccttcttcttcctcaacctttgcttcaatcttcaacaactttctttttataaagattttgcaagttaagtgtaaacctacaaaaaccaaacatggtggttttgccacagccagtcactttagataaccacatctccctaatccccacatacaaaccggttccggttctcacttcccattcaatccccgtcgtcaacctagccgatccggaagcgaaaacccgaatcgtaaaagcctgcgaggagttcgggttcttcaaggtcgtaaaccacggagtccgacccgaactcatgactcggttagagcaggaggctattggcttcttcggcttgcctcagtctcttaaaaaccgggccggtccacctgaaccgtacggttatggtaataaacggattggaccaaacggtgacgttggttggattgagtatctcctcctcaatgctaatcctcagctctcctctcctaaaacctccgccgttttccgtcaaacccctcaaattttccgtgagtcggtggaggagtacatgaaggagattaaggaagtgtcgtacaaggtgttggagatggttgccgaagaactagggatagagccaagggacactctgagtaaaatgctgagagatgagaagagtgactcgtgcctgagactaaaccattatccggcggcggaggaagaggcggagaagatggtgaaggtggggtttggggaacacacagacccacagataatctcagtgctaagatctaataacacggcgggtcttcaaatctgtgtgaaagatggaagttgggtcgctgtccctcctgatcactcttctttcttcattaatgttggagatgctcttcaggttatgactaacgggaggttcaagagtgttaaacacagggtcttagccgatacaaggagatcgaggatttcaatgatatatttcggcggaccgccattgagccagaagatcgcaccattgccatgccttgtccctgagcaagatgattggctttacaaagaattcacttggtctcaatacaaatcttctgcttacaagtctaagcttggtgattatagacttggtctctttgagaaacaacctcttctcaatcataaaacccttgtatgagagtagtcatgatgatctttatcatcctttgtacgatagaaagtcataatcacaaaaagaaggaaatggatagtgttttggattagcttttttatgtttggtatgtttttcattaggtacaaaagctttaggctttgcttagagtttgacccaaccaaacctaacttttgtatcttctcgtcttcttcttctttttgccataatttgtttatctttcttgtaacaattagctagtgtttattttctctttatgtttcatct

SEQ ID NO: 101078 - protein, 341 aa, Arabidopsis thaliana
  peptide (1)..(341): Ceres Seq. ID no. 13606879
MVVLPQPVTLDNHISLIPTYKPVPVLTSHSIPVVNLADPEAKTRIVKACEEFGFFKVVNHGVRPELMTRLEQEAIGFFGLPQSLKNRAGPPEPYGYGNKRIGPNGDVGWIEYLLLNANPQLSSPKTSAVFRQTPQIFRESVEEYMKEIKEVSYKVLEMVAEELGIEPRDTLSKMLRDEKSDSCLRLNHYPAAEEEAEKMVKVGFGEHTDPQIISVLRSNNTAGLQICVKDGSWVAVPPDHSSFFINVGDALQVMTNGRFKSVKHRVLADTRRSRISMIYFGGPPLSQKIAPLPCLVPEQDDWLYKEFTWSQYKSSAYKSKLGDYRLGLFEKQPLLNHKTLV

SEQ ID NO: 101079 - protein, 275 aa, Arabidopsis thaliana
  peptide (1)..(275): Ceres Seq. ID no. 13606880
MTRLEQEAIGFFGLPQSLKNRAGPPEPYGYGNKRIGPNGDVGWIEYLLLNANPQLSSPKTSAVFRQTPQIFRESVEEYMKEIKEVSYKVLEMVAEELGIEPRDTLSKMLRDEKSDSCLRLNHYPAAEEEAEKMVKVGFGEHTDPQIISVLRSNNTAGLQICVKDGSWVAVPPDHSSFFINVGDALQVMTNGRFKSVKHRVLADTRRSRISMIYFGGPPLSQKIAPLPCLVPEQDDWLYKEFTWSQYKSSAYKSKLGDYRLGLFEKQPLLNHKTLV

SEQ ID NO: 101080 - protein, 197 aa, Arabidopsis thaliana
  peptide (1)..(197): Ceres Seq. ID no. 13606881
MKEIKEVSYKVLEMVAEELGIEPRDTLSKMLRDEKSDSCLRLNHYPAAEEEAEKMVKVGFGEHTDPQIISVLRSNNTAGLQICVKDGSWVAVPPDHSSFFINVGDALQVMTNGRFKSVKHRVLADTRRSRISMIYFGGPPLSQKIAPLPCLVPEQDDWLYKEFTWSQYKSSAYKSKLGDYRLGLFEKQPLLNHKTLV

SEQ ID NO: 101081 - DNA, 1702 bp, Arabidopsis thaliana
  misc_feature (1)..(1702): Ceres Seq. ID no. 13606882
  misc_feature (1)..(1702): Ortholog of  Ceres SEQ ID NO 14302458 as cited in SEQ ID NO 66127
agaggaattagagaaagcaagctttgtgtctgtaaatataaagagatagagaaaagatttggcattggcaatggattacgagaggatacagaaagtgcagaagagtataatctcgccaacgaagctgagaatgaagctaatgggtccactcaataacatgaagcgagaaggatccaagtccaacagtaactcttcaagaacatctccttctcgtcttcagattccagatgactccgagttctccaagaacagcttgttagcttctaactcttattcagacgacgatgtggcagctacaactacggatatagaagtagctaagctgccaaatgagccggttttgtatccaaccgagaacgataatcaaggctcaaaagatcggtgtgaaggtgttgttccaagggaaaatgatcagcctagactgcagcaatttaggaaaggggacttgaatatggcttctcctcatataatgagacctcaagaagatgaaaaccttgattatgacagtaacgctagctcttcaagcttcgagtttcaccgagctcgtggtgagcgttcgaatcagaatcatggctcaagaggatatccttcaagacaaatgccatctaaatggaatgatgctgagaagtggataatgagcagacagaacatggtgatgaggaagaacggtcaagggaaccgaatacctgtgagaattgtgcctgataatgcaggttacgagcataacaaatctaggatggatctgtgccaatcctcacaagttgatgggtttgagaagttccctaatgttgttccctcggcgccacatcctattctaactcaagagtatggaggagactcgttgattgaccaatccacacaaagcaatgatcttgcggattcatcacatgatcatacaacaggtggtcctgcgattcgttcggtatgtatgagagatatgggaaccgaaatgacacctataccgagtcaagaaccttcaagatctgtgacaccagttggtgcaacaactcctcttcgtagcccgacttcatctctcccttctactcctagaggtggccaaccagaggaatcttctatgtcgaaaaacacaagaagagaactatctgaggaggaagagaaagcgaagacgcgaagagagattgtagctcttggagttcagctagggaagatgaacatcgccgcttgggcaagtaaagaagaagaggagaacaagaaaaacaatggagatgcagaggaggcacagaagattgagtttgaaaaacgagcgactgcatgggaagaagcagagaaatccaaacataatgcgaggtataagcgtgaggaaatcagaatccaagcttgggaaagtcaggagaaagccaaactcgaagcagaaatgcgacgtatagaggctaaagttgagcagatgaaagctgaagctgaagcaaagataatgaagaaaattgcgttggctaagcaaaggtcagaagagaaacgggctttggcggaagctagaaaaacccgtgatgctgagaaggcagtggctgaagcccaatatattcgggaaactggtagaataccggcatcaagttacaagatatgttgtggttggttctcatgaggcattggattgagtttttggtcttctgagtaaaccatgattggattctcaaagcccctttgtgtaatatagaaatggaatgcatattatgttgcatagact

SEQ ID NO: 101082 - protein, 509 aa, Arabidopsis thaliana
  peptide (1)..(509): Ceres Seq. ID no. 13606883
MDYERIQKVQKSIISPTKLRMKLMGPLNNMKREGSKSNSNSSRTSPSRLQIPDDSEFSKNSLLASNSYSDDDVAATTTDIEVAKLPNEPVLYPTENDNQGSKDRCEGVVPRENDQPRLQQFRKGDLNMASPHIMRPQEDENLDYDSNASSSSFEFHRARGERSNQNHGSRGYPSRQMPSKWNDAEKWIMSRQNMVMRKNGQGNRIPVRIVPDNAGYEHNKSRMDLCQSSQVDGFEKFPNVVPSAPHPILTQEYGGDSLIDQSTQSNDLADSSHDHTTGGPAIRSVCMRDMGTEMTPIPSQEPSRSVTPVGATTPLRSPTSSLPSTPRGGQPEESSMSKNTRRELSEEEEKAKTRREIVALGVQLGKMNIAAWASKEEEENKKNNGDAEEAQKIEFEKRATAWEEAEKSKHNARYKREEIRIQAWESQEKAKLEAEMRRIEAKVEQMKAEAEAKIMKKIALAKQRSEEKRALAEARKTRDAEKAVAEAQYIRETGRIPASSYKICCGWFS

SEQ ID NO: 101083 - protein, 489 aa, Arabidopsis thaliana
  peptide (1)..(489): Ceres Seq. ID no. 13606884
MKLMGPLNNMKREGSKSNSNSSRTSPSRLQIPDDSEFSKNSLLASNSYSDDDVAATTTDIEVAKLPNEPVLYPTENDNQGSKDRCEGVVPRENDQPRLQQFRKGDLNMASPHIMRPQEDENLDYDSNASSSSFEFHRARGERSNQNHGSRGYPSRQMPSKWNDAEKWIMSRQNMVMRKNGQGNRIPVRIVPDNAGYEHNKSRMDLCQSSQVDGFEKFPNVVPSAPHPILTQEYGGDSLIDQSTQSNDLADSSHDHTTGGPAIRSVCMRDMGTEMTPIPSQEPSRSVTPVGATTPLRSPTSSLPSTPRGGQPEESSMSKNTRRELSEEEEKAKTRREIVALGVQLGKMNIAAWASKEEEENKKNNGDAEEAQKIEFEKRATAWEEAEKSKHNARYKREEIRIQAWESQEKAKLEAEMRRIEAKVEQMKAEAEAKIMKKIALAKQRSEEKRALAEARKTRDAEKAVAEAQYIRETGRIPASSYKICCGWFS

SEQ ID NO: 101084 - protein, 486 aa, Arabidopsis thaliana
  peptide (1)..(486): Ceres Seq. ID no. 13606885
MGPLNNMKREGSKSNSNSSRTSPSRLQIPDDSEFSKNSLLASNSYSDDDVAATTTDIEVAKLPNEPVLYPTENDNQGSKDRCEGVVPRENDQPRLQQFRKGDLNMASPHIMRPQEDENLDYDSNASSSSFEFHRARGERSNQNHGSRGYPSRQMPSKWNDAEKWIMSRQNMVMRKNGQGNRIPVRIVPDNAGYEHNKSRMDLCQSSQVDGFEKFPNVVPSAPHPILTQEYGGDSLIDQSTQSNDLADSSHDHTTGGPAIRSVCMRDMGTEMTPIPSQEPSRSVTPVGATTPLRSPTSSLPSTPRGGQPEESSMSKNTRRELSEEEEKAKTRREIVALGVQLGKMNIAAWASKEEEENKKNNGDAEEAQKIEFEKRATAWEEAEKSKHNARYKREEIRIQAWESQEKAKLEAEMRRIEAKVEQMKAEAEAKIMKKIALAKQRSEEKRALAEARKTRDAEKAVAEAQYIRETGRIPASSYKICCGWFS

SEQ ID NO: 101085 - DNA, 1514 bp, Arabidopsis thaliana
  misc_feature (1)..(1514): Ceres Seq. ID no. 13606886
  misc_feature (1)..(1514): Ortholog of  Ceres SEQ ID NO 15176596 as cited in SEQ ID NO 55168
  misc_feature (1)..(1514): Ortholog of  Ceres SEQ ID NO 14301576 as cited in SEQ ID NO 62362
aattaattaattaagaagtctgagagcgtcagttggaggagtccaaaagaggagaagaaggaagcttggcctttgaggagattcaaaggatcgtgttgcttactgtatttaaaaaccctagagttcatcatcatcttcctctcattattgattgctctaatcaggttccgacgagactaataatcctttctcagatcgataacaatgtctcactctgctgtttctcaggctggtgctgtctcagtttcaattgaaaaccaacgttctcttagaagatccgtcttcaagaacaatagcataagcttcaacagcaagtcatggtcatcttctttagcattgaaccagaagacaacaagcataagagatgggaaacggtacccgagcacgacaatatgtatgtcggttcaacaaacaagtagttccaaggttactgtctctcctatagagttggaagaccctaaggatcctcctttgaacttgtacaaacccaaggagtcttacaccgctaagattgtctctgtggagcgagtagttggcccgaaagcccctggagaaacttgtcatatcgtcatcgatcatgatggtaaccttccttactgggaaggacagagttacggtgtgattcctccaggtgagaacccgaagaaaccgggagcgccacacaatgtgcgcctttactcaattgcatcaacaaggtacggagatttctttgacggtaaaacagcgagtttgtgtgtacgtagagctgtttattacgaccctgagactggaaaagaagatccttcaaagaacggagtctgcagcaacttcctatgtgattcaaagcccggtgacaagattcaaatcaccggtccatctgggaaggtaatgctattacccgagagtgatccaaacgcgacacacataatgatagccacgggaacaggagtggctccatacagaggctacttacgtcgaatgttcatggaaaacgtcccaaacaagacatttagcggcttagcttggctcttcttaggcgtggccaacaccgatagccttctctatgacgaagagtttaccaagtacctaaaagaccatccagacaactttaggttcgacaaggcattgagcagagaggagaagaacaagaaaggtggaaagatgtacgtgcaggacaagattgaagaatatagtgatgagatcttcaagcttttggacaatggagctcatatttacttctgtgggcttaaaggaatgatgcctgggattcaagatacacttaagagagttgcagaagagagaggtgagagctgggacttgaagctttctcagctcaggaagaacaagcagtggcacgttgaagtctattgagctctttatttgtatttgctgtttttgatttttgatttaagaatcgtaataaatttgaatttggtgtttttctacttttcaaacatgatatgatgataatatctgaaatttgttggttttgagaagagaatattctcagagaataatcaatatatcatttatgt

SEQ ID NO: 101086 - protein, 381 aa, Arabidopsis thaliana
  peptide (1)..(381): Ceres Seq. ID no. 13606887
MSHSAVSQAGAVSVSIENQRSLRRSVFKNNSISFNSKSWSSSLALNQKTTSIRDGKRYPSTTICMSVQQTSSSKVTVSPIELEDPKDPPLNLYKPKESYTAKIVSVERVVGPKAPGETCHIVIDHDGNLPYWEGQSYGVIPPGENPKKPGAPHNVRLYSIASTRYGDFFDGKTASLCVRRAVYYDPETGKEDPSKNGVCSNFLCDSKPGDKIQITGPSGKVMLLPESDPNATHIMIATGTGVAPYRGYLRRMFMENVPNKTFSGLAWLFLGVANTDSLLYDEEFTKYLKDHPDNFRFDKALSREEKNKKGGKMYVQDKIEEYSDEIFKLLDNGAHIYFCGLKGMMPGIQDTLKRVAEERGESWDLKLSQLRKNKQWHVEVY

SEQ ID NO: 101087 - protein, 317 aa, Arabidopsis thaliana; identical to SEQ ID NO: 25346
  peptide (1)..(317): Ceres Seq. ID no. 13606888

SEQ ID NO: 101088 - DNA, 1404 bp, Arabidopsis thaliana
  misc_feature (1)..(1404): Ceres Seq. ID no. 13606889
  misc_feature (1)..(1404): Ortholog of  Ceres SEQ ID NO 13639177 as cited in SEQ ID NO 55952
  misc_feature (1)..(1404): Ortholog of  Ceres SEQ ID NO 13590991 as cited in SEQ ID NO 60658
gcaggactaaaatcccaacacctccctcctgagttctttgattaaatccccaatttcaattttagggttttgattcccattgtttcttttgatttatcttcattccggaaattgctccggtgaaacagcagccaccgccacatctttctccttctccggcaagcaacttcattccggattttcgtctgagacttcattcttgtctccctcttcgaccaaactgacacttattccgacaaaaccctctgattagaccgtcggaatggaatcacgggttttgttctctagtcaattcaacttcccggtgaattcaccgtttaagacccgtgaaacctcgattgctccgctcacaccttcccggaatgttctctccttctctttccgtagtcccgcagagagatgtgcgatgaggattgtaccgcttgtaaaagctgcttcgtctactccacagatagtagcggaggtcgatggttcgtctcacgaaccaagaaggaagaagcttgctgtgtttgtgtcgggaggtggttcaaatttcaggaagattcatgagggatgcagtgatggttctgttaatggtgatgttgttttgttggtcactaacaaaaaagattgtggaggtgctgagtatgcaagaagtaatggaattcctgttttagtattcccaaaagcgaaacgagaaccatctgatggactctctccttcagaacttgtagatgtactaaggaaatatggtgtagactttgttcttttagctggatatttgaaacttataccggtcgagctggtccaagcttttcctaaacggattctaaatattcatcctgctcttcttccggctttcggaggcaaaggtctttatggtataaaagtgcataaagctgttctagaatcgggagctagatattcgggtccgacaattcacttcgtcaatgaggagtacgatacaggtcggatacttgctcaaagtgcagtccgtgtgattgctaatgatacaccagaagaattggccaaaagggttcttcatgaggaacacaaactgtatgtcgaggtggtgggtgcgatttgcgaagagcggattaaatggagagaagacggtgtccctctcattcaaaacaaacaaaaccctgacgagtactattagattctcaacaaatgaagttattcattggatgttagattagtcacattttcaaaacaaagtgtttcaacataggttatgtagaagaagtttttttgcccgaagtatagattgagacatgtttctgatactaaattttgtttcggttgggtcagaatcatatggaaggagatgaaattcgagtcaggagacagcattttaatgcttgtgttgtataataccaacagtctttattcaattttttcctagaatgttttattaccttg

SEQ ID NO: 101089 - protein, 292 aa, Arabidopsis thaliana
  peptide (1)..(292): Ceres Seq. ID no. 13606890
MESRVLFSSQFNFPVNSPFKTRETSIAPLTPSRNVLSFSFRSPAERCAMRIVPLVKAASSTPQIVAEVDGSSHEPRRKKLAVFVSGGGSNFRKIHEGCSDGSVNGDVVLLVTNKKDCGGAEYARSNGIPVLVFPKAKREPSDGLSPSELVDVLRKYGVDFVLLAGYLKLIPVELVQAFPKRILNIHPALLPAFGGKGLYGIKVHKAVLESGARYSGPTIHFVNEEYDTGRILAQSAVRVIANDTPEELAKRVLHEEHKLYVEVVGAICEERIKWREDGVPLIQNKQNPDEYY

SEQ ID NO: 101090 - protein, 244 aa, Arabidopsis thaliana
  peptide (1)..(244): Ceres Seq. ID no. 13606891
MRIVPLVKAASSTPQIVAEVDGSSHEPRRKKLAVFVSGGGSNFRKIHEGCSDGSVNGDVVLLVTNKKDCGGAEYARSNGIPVLVFPKAKREPSDGLSPSELVDVLRKYGVDFVLLAGYLKLIPVELVQAFPKRILNIHPALLPAFGGKGLYGIKVHKAVLESGARYSGPTIHFVNEEYDTGRILAQSAVRVIANDTPEELAKRVLHEEHKLYVEVVGAICEERIKWREDGVPLIQNKQNPDEYY

SEQ ID NO: 101091 - DNA, 1544 bp, Arabidopsis thaliana
  misc_feature (1)..(1544): Ceres Seq. ID no. 13606925
  misc_feature (1)..(1544): Ortholog of  Ceres SEQ ID NO 12465151 as cited in SEQ ID NO 67782
attcttcctctctctttttgggcgggaaactgtaccagaaaaaaacctcaagagtgagaactgagaagaagaacgatcgagagcgagagagagagtgatggcggcagaagagggtaaagatgaggcgggattggatcaggtggaagaagagttctctatttggaaaaggaacacaccttttctctacgatcttatgatctctcacccactagaatggccttctcttactctccactgggttccttcgacgccgattccgtactcgaaagatccttactttgccgtccataagcttatccttgggactcatacctccggtggtgcccaagattttctaatggtcgccgatgtcgttattccgacacccgacgctgaaccaggattaggtggaagagatcaggaacctatcgtccctaaggtggagattaagcagaagatacgtgttgatggagaagtgaacagagcgaggtgtatgccacaaaagccaactcttgtgggtgctaaaacaagtggctctgaggtgtttctgtttgattacgccagactctctggaaagccccaaacaagtgagtgtgatcctgatctgaggctaatgggacatgaacaagaaggttatggattggcttggagttcctttaaggagggttatcttttgagtggctcacaagatcagagaatctgcctttgggatgtctcagcgactgccactgataaagttttgaacccaatgcatgtgtatgagggacatcaaagtatcatcgaagatgtagcatggcacatgaagaatgaaaacatattcgggtctgcgggtgatgattgtcaattggtgatatgggacttacggactaaccaaatgcaacaccaagtcaaagttcacgagagagagataaactatctttctttcaatcccttcaatgaatgggtactagccacagcttcctcagactcaactgtcgccttgtttgaccttcgtaagctgactgcgccattacatgtcctgagcaaacacgagggagaagttttccaagtggagtgggatcccaaccatgaaacagtgcttgcatcttctggcgaggacagaagactcatggtctgggatatcaacagggttggggatgagcagcttgaaatagagttggatgcagaagatggtccacctgagctgctcttctctcatggaggccacaaggccaagatatcagactttgcctggaacaaggacgagccttgggtcatctcaagtgtagctgaagacaacagtcttcaagtctggcaaatggcggaaagcatctaccgcgaagatgacgaggatgaggatgatgatgatgaaggcaaccaaaatgcacaacattccaatgaaaaccagaaatgattcaagtctttggcggatgatgatgacttacaattgttgttgttaacgtgtttgagccaatatataataaacaagtttggtgtatgtgctaccctaagtatgaaacgctcgtttattccaggacgtctgttatgattcttgagtttaataatagttcagtaaaccctattgc

SEQ ID NO: 101092 - protein, 424 aa, Arabidopsis thaliana
  peptide (1)..(424): Ceres Seq. ID no. 13606926
MAAEEGKDEAGLDQVEEEFSIWKRNTPFLYDLMISHPLEWPSLTLHWVPSTPIPYSKDPYFAVHKLILGTHTSGGAQDFLMVADVVIPTPDAEPGLGGRDQEPIVPKVEIKQKIRVDGEVNRARCMPQKPTLVGAKTSGSEVFLFDYARLSGKPQTSECDPDLRLMGHEQEGYGLAWSSFKEGYLLSGSQDQRICLWDVSATATDKVLNPMHVYEGHQSIIEDVAWHMKNENIFGSAGDDCQLVIWDLRTNQMQHQVKVHEREINYLSFNPFNEWVLATASSDSTVALFDLRKLTAPLHVLSKHEGEVFQVEWDPNHETVLASSGEDRRLMVWDINRVGDEQLEIELDAEDGPPELLFSHGGHKAKISDFAWNKDEPWVISSVAEDNSLQVWQMAESIYREDDEDEDDDDEGNQNAQHSNENQK

SEQ ID NO: 101093 - protein, 392 aa, Arabidopsis thaliana
  peptide (1)..(392): Ceres Seq. ID no. 13606927
MISHPLEWPSLTLHWVPSTPIPYSKDPYFAVHKLILGTHTSGGAQDFLMVADVVIPTPDAEPGLGGRDQEPIVPKVEIKQKIRVDGEVNRARCMPQKPTLVGAKTSGSEVFLFDYARLSGKPQTSECDPDLRLMGHEQEGYGLAWSSFKEGYLLSGSQDQRICLWDVSATATDKVLNPMHVYEGHQSIIEDVAWHMKNENIFGSAGDDCQLVIWDLRTNQMQHQVKVHEREINYLSFNPFNEWVLATASSDSTVALFDLRKLTAPLHVLSKHEGEVFQVEWDPNHETVLASSGEDRRLMVWDINRVGDEQLEIELDAEDGPPELLFSHGGHKAKISDFAWNKDEPWVISSVAEDNSLQVWQMAESIYREDDEDEDDDDEGNQNAQHSNENQK

SEQ ID NO: 101094 - protein, 344 aa, Arabidopsis thaliana
  peptide (1)..(344): Ceres Seq. ID no. 13606928
MVADVVIPTPDAEPGLGGRDQEPIVPKVEIKQKIRVDGEVNRARCMPQKPTLVGAKTSGSEVFLFDYARLSGKPQTSECDPDLRLMGHEQEGYGLAWSSFKEGYLLSGSQDQRICLWDVSATATDKVLNPMHVYEGHQSIIEDVAWHMKNENIFGSAGDDCQLVIWDLRTNQMQHQVKVHEREINYLSFNPFNEWVLATASSDSTVALFDLRKLTAPLHVLSKHEGEVFQVEWDPNHETVLASSGEDRRLMVWDINRVGDEQLEIELDAEDGPPELLFSHGGHKAKISDFAWNKDEPWVISSVAEDNSLQVWQMAESIYREDDEDEDDDDEGNQNAQHSNENQK

SEQ ID NO: 101095 - DNA, 1948 bp, Arabidopsis thaliana
  misc_feature (1)..(1948): Ceres Seq. ID no. 13606944
  misc_feature (1)..(1948): Ortholog of  Ceres SEQ ID NO 15175771 as cited in SEQ ID NO 55443
atggcagaggaatttggcaaagggcattggctaaaaataataagacactcgttagagtgctcgtccctcgtgcccttacctgcctaattccaactatctggcaaaatcatgactttgatccaagatgccgagttgaaaccaaggatgggttcttttaagaagaggagctcttctaagaatttgaggtattcaatgacaaagagaagaagaagtagcaaagtgatgtctgtggagatcatcgaagatgtgcatgacgcagaggagttgaaagccgttgatgcttttcgccaatcgcttattctcgatgagctactcccggagaaacacgatgactaccatatgatgcttagatttttgaaggctagaaaatttgatcttgagaaaaccaaacagatgtggactgaaatgcttagatggaggaaagaatttggtgctgatactgtcatggaggagtttgatttcaaggaaattgatgaagtgttgaaatactaccctcaaggacaccatggagttgacaaggaaggacgacctgtgtacattgagaggcttggtttagtagattctaccaagttgatgcaagtcacaaccatggataggtatgtcaactaccatgttatggagtttgagaggaccttcaatgttaagttcccagcgtgctctatcgccgcgaagaagcacattgatcagagcacaactattcttgatgtccaaggagtgggactgaaaaacttcaacaaggctgctagagacttgattactcgtcttcaaaaggtcgatggtgacaactatcctgagaccttgaacaggatgtttatcatcaatgctggctcaggattcagaatgttgtggaacacggttaagtccttccttgacccgaagactacagcaaaaatccatgttcttggcaacaagtaccaaagcaagttgcttgagataattgatgaaagtgaacttcctgagtttcttggaggttcatgtacttgtgctgacaatggtggctgcatgcgctctgacaaaggcccatggaaaaatccagagatcatgaagagagttcacaatggtgatcacaaatgctcaaaaggatcccaagctgaaaactctggagagaagaccatccctgaggaagatgactctacaacagagccggcttctgaagaggaaaaggcttcaaaagaggtcgaaattgtcccggccgctcacccagcttggaacatgccagaagctcacaaattttccctctcaaagaaagaagtttacgccattcaagaggcgtgcaacaacgctacaacagaaggagggaggtcacctattttcacaggggtcatggctcttgtgatgggtgttgtcactatgattaaagtgactaaaaacgtcccaaggaaactaaccgagtcaaccttgtactcgagccccgtgtactgcgatgatgcatcaatgaacaagagtgcgatgcagtcagagaaaatgactgtacctgcaatctcaggggaagatttcatggccattatgaaacgaatggctgagttggaacagaaagtgaccgtcttaagcgcgcagccaacagttatgcctccggataaggaagagatgcttaacgctgccattagccggtccaatgtattggagcaagagcttgctgccaccaagaaggctttggatgattctcttggtcgtcaggaggagcttgtggcgtacatcgagaaaaagaagaagaagaagaagctgttcaactactggtgagagaagaaccatgaagcgaaggcttagtggtggctttatttgtttgattgtatccaaaatatctctgaccaaaatcatcaaagccaagcttattgtaaaaccaatttcttgtgtttcttattattaaagaatggtgaaaagaaagaaagttttgttctttctcttgtgtatattatcaaaataccatgtacatcaaattgcaattttc

SEQ ID NO: 101096 - protein, 543 aa, Arabidopsis thaliana
  peptide (1)..(543): Ceres Seq. ID no. 13606945
MTLIQDAELKPRMGSFKKRSSSKNLRYSMTKRRRSSKVMSVEIIEDVHDAEELKAVDAFRQSLILDELLPEKHDDYHMMLRFLKARKFDLEKTKQMWTEMLRWRKEFGADTVMEEFDFKEIDEVLKYYPQGHHGVDKEGRPVYIERLGLVDSTKLMQVTTMDRYVNYHVMEFERTFNVKFPACSIAAKKHIDQSTTILDVQGVGLKNFNKAARDLITRLQKVDGDNYPETLNRMFIINAGSGFRMLWNTVKSFLDPKTTAKIHVLGNKYQSKLLEIIDESELPEFLGGSCTCADNGGCMRSDKGPWKNPEIMKRVHNGDHKCSKGSQAENSGEKTIPEEDDSTTEPASEEEKASKEVEIVPAAHPAWNMPEAHKFSLSKKEVYAIQEACNNATTEGGRSPIFTGVMALVMGVVTMIKVTKNVPRKLTESTLYSSPVYCDDASMNKSAMQSEKMTVPAISGEDFMAIMKRMAELEQKVTVLSAQPTVMPPDKEEMLNAAISRSNVLEQELAATKKALDDSLGRQEELVAYIEKKKKKKKLFNYW

SEQ ID NO: 101097 - protein, 531 aa, Arabidopsis thaliana
  peptide (1)..(531): Ceres Seq. ID no. 13606946
MGSFKKRSSSKNLRYSMTKRRRSSKVMSVEIIEDVHDAEELKAVDAFRQSLILDELLPEKHDDYHMMLRFLKARKFDLEKTKQMWTEMLRWRKEFGADTVMEEFDFKEIDEVLKYYPQGHHGVDKEGRPVYIERLGLVDSTKLMQVTTMDRYVNYHVMEFERTFNVKFPACSIAAKKHIDQSTTILDVQGVGLKNFNKAARDLITRLQKVDGDNYPETLNRMFIINAGSGFRMLWNTVKSFLDPKTTAKIHVLGNKYQSKLLEIIDESELPEFLGGSCTCADNGGCMRSDKGPWKNPEIMKRVHNGDHKCSKGSQAENSGEKTIPEEDDSTTEPASEEEKASKEVEIVPAAHPAWNMPEAHKFSLSKKEVYAIQEACNNATTEGGRSPIFTGVMALVMGVVTMIKVTKNVPRKLTESTLYSSPVYCDDASMNKSAMQSEKMTVPAISGEDFMAIMKRMAELEQKVTVLSAQPTVMPPDKEEMLNAAISRSNVLEQELAATKKALDDSLGRQEELVAYIEKKKKKKKLFNYW

SEQ ID NO: 101098 - protein, 515 aa, Arabidopsis thaliana
  peptide (1)..(515): Ceres Seq. ID no. 13606947
MTKRRRSSKVMSVEIIEDVHDAEELKAVDAFRQSLILDELLPEKHDDYHMMLRFLKARKFDLEKTKQMWTEMLRWRKEFGADTVMEEFDFKEIDEVLKYYPQGHHGVDKEGRPVYIERLGLVDSTKLMQVTTMDRYVNYHVMEFERTFNVKFPACSIAAKKHIDQSTTILDVQGVGLKNFNKAARDLITRLQKVDGDNYPETLNRMFIINAGSGFRMLWNTVKSFLDPKTTAKIHVLGNKYQSKLLEIIDESELPEFLGGSCTCADNGGCMRSDKGPWKNPEIMKRVHNGDHKCSKGSQAENSGEKTIPEEDDSTTEPASEEEKASKEVEIVPAAHPAWNMPEAHKFSLSKKEVYAIQEACNNATTEGGRSPIFTGVMALVMGVVTMIKVTKNVPRKLTESTLYSSPVYCDDASMNKSAMQSEKMTVPAISGEDFMAIMKRMAELEQKVTVLSAQPTVMPPDKEEMLNAAISRSNVLEQELAATKKALDDSLGRQEELVAYIEKKKKKKKLFNYW

SEQ ID NO: 101099 - DNA, 1612 bp, Arabidopsis thaliana
  misc_feature (1)..(1612): Ceres Seq. ID no. 13606952
  misc_feature (1)..(1612): Ortholog of  Ceres SEQ ID NO 13597407 as cited in SEQ ID NO 64106
  misc_feature (1)..(1612): Ortholog of  Ceres SEQ ID NO 14303309 as cited in SEQ ID NO 67739
atggccgatcaaatctccggcgagaagccggccggagttaatagattcgctcttcaatgtgctatcgtcgcctccatcgtctccatcatctttggttacgatactggtgttatgagtggagcgatggtgtttatagaagaagatttgaagacaaacgacgttcaaatagaagttctcactggaattctcaacctttgtgcccttgtcggatcattgctcgccggaagaacgtcggacataatcggacggcgttacacaatcgtcttggcctcaatactattcatgttaggctcaatattgatgggttggggtccgaattatccggttctcctatccggtagatgcaccgctggactcggagtcggttttgctctgatggttgctccggtttactctgccgagatcgcaactgcttcacatagaggactcttagcttctcttcctcacctttgtatcagtatagggattttactaggttatatcgtgaattacttcttctccaagttacctatgcatatcggttggagactcatgctcggtatagccgcggttccgtccctagtgctagcgttcgggatcttgaaaatgccggaatctccacggtggttgattatgcaaggccgtcttaaggaaggcaaggagatattggaattggtatctaattcccctgaagaagcagaactccgctttcaagacatcaaagctgctgcgggaatcgacccgaaatgcgtagacgatgttgtgaaaatggagggtaagaagactcatggtgaaggagtgtggaaagagctcattctaagaccaactcctgcagtgagacgtgttcttttaactgctcttgggattcatttcttccaacacgcctccggaatcgaagcagtgcttttatacggtccgaggatctttaagaaagcaggaatcacgactaaagacaagcttttcttggttactatcggtgtcggaatcatgaaaacgacgtttattttcactgcgactttattgttagacaaggtaggtcgaaggaagcttttgttgaccagcgttggaggaatggtcattgcgttgacaatgttgggatttgggcttacaatggcccaaaatgctggcgggaaattagcgtgggctttagtactgagcatagttgcggcttatagtttcgtggcgtttttctctattgggctcggcccaataacttgggtctacagttctgaggttttcccgttgaagcttagggcacaaggagcgagtctcggcgttgcggtgaacagagtaatgaacgccaccgtgtcgatgtcgtttttgtcgttgactagtgcgataaccaccggtggagctttctttatgttcgccggagttgcggcagtggcgtggaatttcttcttcttcctcttgccggagacgaaaggaaaatcacttgaagaaatcgaagcgctttttcaaagagacggtgataaagtacgcggcgaaaacggtgcagcttagcatgatgaatataatgttatcattaaatgaaacgacagcgtttggggtttctcactcattacacgacgtcgtttagttgtacttttgtgtggcttttatcaaattataaatcaacggtcaagattgacgc

SEQ ID NO: 101100 - protein, 493 aa, Arabidopsis thaliana
  peptide (1)..(493): Ceres Seq. ID no. 13606953
MADQISGEKPAGVNRFALQCAIVASIVSIIFGYDTGVMSGAMVFIEEDLKTNDVQIEVLTGILNLCALVGSLLAGRTSDIIGRRYTIVLASILFMLGSILMGWGPNYPVLLSGRCTAGLGVGFALMVAPVYSAEIATASHRGLLASLPHLCISIGILLGYIVNYFFSKLPMHIGWRLMLGIAAVPSLVLAFGILKMPESPRWLIMQGRLKEGKEILELVSNSPEEAELRFQDIKAAAGIDPKCVDDVVKMEGKKTHGEGVWKELILRPTPAVRRVLLTALGIHFFQHASGIEAVLLYGPRIFKKAGITTKDKLFLVTIGVGIMKTTFIFTATLLLDKVGRRKLLLTSVGGMVIALTMLGFGLTMAQNAGGKLAWALVLSIVAAYSFVAFFSIGLGPITWVYSSEVFPLKLRAQGASLGVAVNRVMNATVSMSFLSLTSAITTGGAFFMFAGVAAVAWNFFFFLLPETKGKSLEEIEALFQRDGDKVRGENGAA

SEQ ID NO: 101101 - protein, 456 aa, Arabidopsis thaliana
  peptide (1)..(456): Ceres Seq. ID no. 13606954
MSGAMVFIEEDLKTNDVQIEVLTGILNLCALVGSLLAGRTSDIIGRRYTIVLASILFMLGSILMGWGPNYPVLLSGRCTAGLGVGFALMVAPVYSAEIATASHRGLLASLPHLCISIGILLGYIVNYFFSKLPMHIGWRLMLGIAAVPSLVLAFGILKMPESPRWLIMQGRLKEGKEILELVSNSPEEAELRFQDIKAAAGIDPKCVDDVVKMEGKKTHGEGVWKELILRPTPAVRRVLLTALGIHFFQHASGIEAVLLYGPRIFKKAGITTKDKLFLVTIGVGIMKTTFIFTATLLLDKVGRRKLLLTSVGGMVIALTMLGFGLTMAQNAGGKLAWALVLSIVAAYSFVAFFSIGLGPITWVYSSEVFPLKLRAQGASLGVAVNRVMNATVSMSFLSLTSAITTGGAFFMFAGVAAVAWNFFFFLLPETKGKSLEEIEALFQRDGDKVRGENGAA

SEQ ID NO: 101102 - protein, 452 aa, Arabidopsis thaliana
  peptide (1)..(452): Ceres Seq. ID no. 13606955
MVFIEEDLKTNDVQIEVLTGILNLCALVGSLLAGRTSDIIGRRYTIVLASILFMLGSILMGWGPNYPVLLSGRCTAGLGVGFALMVAPVYSAEIATASHRGLLASLPHLCISIGILLGYIVNYFFSKLPMHIGWRLMLGIAAVPSLVLAFGILKMPESPRWLIMQGRLKEGKEILELVSNSPEEAELRFQDIKAAAGIDPKCVDDVVKMEGKKTHGEGVWKELILRPTPAVRRVLLTALGIHFFQHASGIEAVLLYGPRIFKKAGITTKDKLFLVTIGVGIMKTTFIFTATLLLDKVGRRKLLLTSVGGMVIALTMLGFGLTMAQNAGGKLAWALVLSIVAAYSFVAFFSIGLGPITWVYSSEVFPLKLRAQGASLGVAVNRVMNATVSMSFLSLTSAITTGGAFFMFAGVAAVAWNFFFFLLPETKGKSLEEIEALFQRDGDKVRGENGAA

SEQ ID NO: 101103 - DNA, 973 bp, Arabidopsis thaliana
  misc_feature (1)..(973): Ceres Seq. ID no. 13606956
  misc_feature (1)..(973): Ortholog of  Ceres SEQ ID NO 15175666 as cited in SEQ ID NO 54985
  misc_feature (1)..(973): Ortholog of  Ceres SEQ ID NO 14310460 as cited in SEQ ID NO 55105
  misc_feature (1)..(973): Ortholog of  Ceres SEQ ID NO 13597740 as cited in SEQ ID NO 64482
  misc_feature (1)..(973): Ortholog of  Ceres SEQ ID NO 15179888 as cited in SEQ ID NO 66879
  misc_feature (1)..(973): Ortholog of  Ceres SEQ ID NO 13596056 as cited in SEQ ID NO 68307
  misc_feature (1)..(973): Ortholog of  Ceres SEQ ID NO 12388689 as cited in SEQ ID NO 0
attcatcggtctgagttattttgcttgctctttgaaattctgacaatggcagtgaacgttgatgcagagtacctcaaagagatagagaaaactcgtagagaccttcgagctctcatctcttccagaaactgtgctcccattatgctccgtcttgcatggcatgatgcaggaacctatgatgccaagaagaaaaccggaggtgccaatggatctatcagattcaaggaagagctaaaccgtccacacaacaaaggtttggagaaggcagtcgccttctgcgaggaagtaaaggctaagcatcccagagtctcttacgcagacctttatcagctcgctggagttgttgcagtggaggttactggcggccctgcaatcccatttacaccaggccgtaaggatgctgattccgcggacgatggagaacttccaaatccaaatgaaggtgcctcacatttaagaactctcttctctcgtatgggtctattggatagagacattgtagctctctctggaggtcacactttgggacgtgcacataaggagagatcagattttgaaggtccttggacacaggaccctctcaagtttgataactcgtatttcgtagagcttctaaaaggggagactccgggattgctacaacttaaaaccgacaaggctctacttgatgatcccaagttccacccttttgttaagctgtatgcaaaggacgaggatatgttcttcaaagcctatgcaatttcacacaagaaactctcagaactaggatttaatccgccaagaagaattccttcagcagtgacgcagcagacgcttggaatcgctgttgctgcagctgtggtgatctttacaatatgctatgaagcaagcagaagaggcaagtgaggaagtttcgcagatgcaataagggacgagagaaaaatgttaattgaatgtatgcaataaatacaaagattcatgcaatgttacctcc

SEQ ID NO: 101104 - protein, 294 aa, Arabidopsis thaliana
  peptide (1)..(294): Ceres Seq. ID no. 13606957
IHRSELFCLLFEILTMAVNVDAEYLKEIEKTRRDLRALISSRNCAPIMLRLAWHDAGTYDAKKKTGGANGSIRFKEELNRPHNKGLEKAVAFCEEVKAKHPRVSYADLYQLAGVVAVEVTGGPAIPFTPGRKDADSADDGELPNPNEGASHLRTLFSRMGLLDRDIVALSGGHTLGRAHKERSDFEGPWTQDPLKFDNSYFVELLKGETPGLLQLKTDKALLDDPKFHPFVKLYAKDEDMFFKAYAISHKKLSELGFNPPRRIPSAVTQQTLGIAVAAAVVIFTICYEASRRGK

SEQ ID NO: 101105 - protein, 279 aa, Arabidopsis thaliana
  peptide (1)..(279): Ceres Seq. ID no. 13606958
MAVNVDAEYLKEIEKTRRDLRALISSRNCAPIMLRLAWHDAGTYDAKKKTGGANGSIRFKEELNRPHNKGLEKAVAFCEEVKAKHPRVSYADLYQLAGVVAVEVTGGPAIPFTPGRKDADSADDGELPNPNEGASHLRTLFSRMGLLDRDIVALSGGHTLGRAHKERSDFEGPWTQDPLKFDNSYFVELLKGETPGLLQLKTDKALLDDPKFHPFVKLYAKDEDMFFKAYAISHKKLSELGFNPPRRIPSAVTQQTLGIAVAAAVVIFTICYEASRRGK

SEQ ID NO: 101106 - protein, 247 aa, Arabidopsis thaliana
  peptide (1)..(247): Ceres Seq. ID no. 13606959
MLRLAWHDAGTYDAKKKTGGANGSIRFKEELNRPHNKGLEKAVAFCEEVKAKHPRVSYADLYQLAGVVAVEVTGGPAIPFTPGRKDADSADDGELPNPNEGASHLRTLFSRMGLLDRDIVALSGGHTLGRAHKERSDFEGPWTQDPLKFDNSYFVELLKGETPGLLQLKTDKALLDDPKFHPFVKLYAKDEDMFFKAYAISHKKLSELGFNPPRRIPSAVTQQTLGIAVAAAVVIFTICYEASRRGK

SEQ ID NO: 101107 - DNA, 4777 bp, Arabidopsis thaliana
  misc_feature (1)..(4777): Ceres Seq. ID no. 13606964
  misc_feature (1)..(4777): Ortholog of  Ceres SEQ ID NO 14310527 as cited in SEQ ID NO 59097
atgtcgaatccgatgttcccggagaaatgggaggagagctcaacaagtaaaagcagcagaagagttcataaaaggagagagaggaagatgtggaagaaacccatcaagctttctagatttcccagtttcggtttctccggttccgacttcactcttgatcagattccggccatcttctccggctacactgccgagtctgaagattcctcttcctccgagatgtctgatgattccagaacttactcgaaatcatctgatgagaatgaggagcttgaccaggcaagtctcacaatctgttctgaaaggccaagatcggtgaagagacgagcgaaatcgaagagtatttcacgaatttcaagcatgaaggttcttaggagacagtcaacgaggacattatatggagcaggacagagattgaagaagatgagatctatgaagcgtttaacttcaaattcgagacaaattctaaggaaaaagaatcttgataggggagattttggattgttacagcctcattacttgagaccaacgagttcttctgcttcaaagaatgtcgaaaacaatcagaagaatcttggagcagctaggttgaagagaatagcaagcttgagatacaatggtttgcttaaagctacatgttcttcagctatgaaaggttcttcttctaagaggagtaatgatgtttgcacttataggtattgttctctgcatggtaggcgtcatagccacgctgcggataacaatgctggtgttccatctttgaagcggtttgtgtcgatgaggaggaagtttatgaataggcagaagagtgtgaaccggaggttggtgttattgaagaggactttgagtagaaagagagggcctttaggtggtcgggttgtgactgatcaagaatcaaaggaggtggatgataatgtagatggagattctgatgaagaggtgtttgaagaagaggtttccagctctgtggatggtggaaatgataatgaatcgattggaagatctagtgagacagtaatggttgatgttgatgataatgtggatagaggaatggatgcaatggagactgttgcatcaaaggttcaggaatctaaaacggagactgtaggtgccacactatggcgcgctatatgtgagcaaactgtgacgggtcacgatcatgatgatggtaaggtcgatggaacgacgagtgatggaactgtgggagataatgaagaagtttgcagagaaggttcctctggagaattgagagaagaggatggaaagaaaaccgaatatgtatggaatgaaactgtaacgctcgttaagcaagcgtttgatgagatacttgcggaaatcaccgatgatgactcgtctgatgatatttctatgacgaaggatgaagctttagaggttggattgggggaagaagatgtaggagcggattcgagtgattcaagttgctcggatatgcagcctgttatagaaagagatacacatttgtctgtgattgcttctacttttcatatgagagatgaatttggtcatcagagaggtcccaagaagtggagttacttgaaaagagtaatacttctcaagagatttctcaagtctttggaccgaaaagagaggcgtaagttatctgatggcaaagagagtgaaacaataatgcggttgagaagagagctggttggggagaggaagaatgcagaagaatggatgcttgatcacgcacttaggcaagtcatttcgacacttgctccatcgcagaaaaagaaagtaaaacatcttgttaaagcttttgaaagtttaatcccaatggatggtggttctagaggtcatgatgatcttgtaagtcctgcaagagaagagaacgaaacagtgaactcgcaaacgcaaacgatcttgagagacaataaagacgctactgatatactagaagtttcaccagcaaaggatcttgaagaaacaaacttaacttgtgaagcatcatcctttttgtctattgatatgaaatctgatgaagagaacgaaacagtgaactcaccaacgatctggagagacaatgaagacactactgatctactggaagttgtaccagcaaaggatcttgaagaaacaaacttaactagtgaatcatcatcatctctgtgtattggtatgaaatctgatgaagctttggaatcaacagcagatgcaagtttatgtaatcatcttgctgtggaagaagaagtagatgggttggctttgggttcgtttatagaagaagaagaaaagaagggagaatctgaaaagcaaaatctttctacatggaggaaccttatacagaagcacatggtcatgagagacaacagcgagggaaatcgtaatgaaactgagcaagaacacaagtggtcctatggaactgatcagatgacaggtattgatgatgctaatgctgcagctgttaaatcgattcagctagcatttgaaacgattctctcggagatacctgactcatcgtccgacgaagagagtgtttcggaatcatctaactctcttaaagaggagaaagaacatcaaggagagaccaagaggagctggaacagcttgagaaaggttatacttttgaaaagatttgtgaaaagcttggagaaagtacaggttcctaatccgagaaagatgcgtaatcttcctgttgagtctgcatttgaggcagaaaatgtattcctgagacaccgatcaataatggaaggaacaagaacagaaggagaggaaatgatgctggattatgctctgagacaagcgatatcaagattggctcctatacagagaaagaaggtagacctccttgtgcaagcctttgatattgtccttgatggccatgatacacctaaacaaaccaagaacagtgatactccccggaacaatgatgaaactaaagaaggaaaaccgagagtagaggaaggttgtgaagtcaacaaagatgagcagaagattaaaaatgtctttgcaagatttcaggtacatcaaaaagacttgaaaggagaagaggaggttcataatacgcctaaggaatccagaaatttgcctcctatcagaaattttaaacagcgaatcgtggttgagaaagggaaagactcgagaatgtggaagctcatctataaacacatggtaacagagaaagaaggaattgattctgcaaatgctgaatcagtggcttcagttgaaagtgaatatgatgatgaggctggtggtcttcagattgatgcaagaagaagcggaacagttacacttgttagagaagcgcttgagaaaattctctctgaaattccggataactcatctgatgatcagtctatggacagtgatataactacggagcaagaactatttgaaagaaactctcaagtcagtgaagaaaagagtgaagtttcttcagctaccttcaaaccaaagtttactgagaaaagagtgaagggatggaacaatgtgaagaaagtcattcttctaaagcgatttgttagtgacttaggaagtctgacaagactcagccccaagacacctcgtgttttgccatgggaacccgatccagaaaccgaaaagatccgtttgaggcatcaggaaatcggagggaagaggaattcagaggaatggatgctcgattatgctctacgacaagccatatcgacattagcaccgtctcagaaaagaaaagtctctcttcttgcacaagctttcgacactataagcttacaagatatggggagtggttcaaccccggggtcagcagcatcgtccaggaacatctctcgtcaatccagcatttcttctatggcggcccattatgaaaatgaagctaatgctgagatcattagaggaaaactgagaaatctccaagaagatctcaaagagagtgcaaaacttgatggtgtatccaaagatttggaagagaaacaacagtgctcgagcttgtggcggatattatgcaaacagatggaagacaacgagaaaaaccaaacattgcctgaagaaacaagaaaagaagaagaagaagaagaactgaaagaagacacaagtgtggatggtgaaaagatggaactttaccaaaccgaagcagtggaactattaggagaagtcatagatggaatctctcttgaagagagtcaagatcagaacctaaacaatgaagaaacaagacagaagagtgaaactctacaggtctcaaaagtgaggattgaccgatggagcaacctcaaaagagcgattttgcttaggagattcgtcaaagccttagagaatgtaaggaaattcaacccaagagagcctcggttcttgcctccgaaccccgaagttgaagcggaaaaggtgaatcttaggcatcaagaaacccaaaacaagaaaaatggcgatgaatggatggtcgataacgcacttcaaggagtggtttcgaagctaacaccagctcgcaaacttaaagttcagttattggtgcaagcgtttgagtcactttcggctacagggaactgagaccaagcaatatttcttattacaaagtttccagttcataagcttcagaaaacaaagaaccatgaagaacaatatctaaaagactaatcaaggaaccggaagataactaaagacattttatttgctcttgcaaattatctcatgtgtttctttgtcttttgttcttgcattgattcattattttgattaaaatggattcaattacagagttgtcaaacctctttgagtttcgtctatatacacattctcttgattttgatgatataaaagaaataaaacaacagtgtat

SEQ ID NO: 101108 - protein, 1495 aa, Arabidopsis thaliana
  peptide (1)..(1495): Ceres Seq. ID no. 13606965
MSNPMFPEKWEESSTSKSSRRVHKRRERKMWKKPIKLSRFPSFGFSGSDFTLDQIPAIFSGYTAESEDSSSSEMSDDSRTYSKSSDENEELDQASLTICSERPRSVKRRAKSKSISRISSMKVLRRQSTRTLYGAGQRLKKMRSMKRLTSNSRQILRKKNLDRGDFGLLQPHYLRPTSSSASKNVENNQKNLGAARLKRIASLRYNGLLKATCSSAMKGSSSKRSNDVCTYRYCSLHGRRHSHAADNNAGVPSLKRFVSMRRKFMNRQKSVNRRLVLLKRTLSRKRGPLGGRVVTDQESKEVDDNVDGDSDEEVFEEEVSSSVDGGNDNESIGRSSETVMVDVDDNVDRGMDAMETVASKVQESKTETVGATLWRAICEQTVTGHDHDDGKVDGTTSDGTVGDNEEVCREGSSGELREEDGKKTEYVWNETVTLVKQAFDEILAEITDDDSSDDISMTKDEALEVGLGEEDVGADSSDSSCSDMQPVIERDTHLSVIASTFHMRDEFGHQRGPKKWSYLKRVILLKRFLKSLDRKERRKLSDGKESETIMRLRRELVGERKNAEEWMLDHALRQVISTLAPSQKKKVKHLVKAFESLIPMDGGSRGHDDLVSPAREENETVNSQTQTILRDNKDATDILEVSPAKDLEETNLTCEASSFLSIDMKSDEENETVNSPTIWRDNEDTTDLLEVVPAKDLEETNLTSESSSSLCIGMKSDEALESTADASLCNHLAVEEEVDGLALGSFIEEEEKKGESEKQNLSTWRNLIQKHMVMRDNSEGNRNETEQEHKWSYGTDQMTGIDDANAAAVKSIQLAFETILSEIPDSSSDEESVSESSNSLKEEKEHQGETKRSWNSLRKVILLKRFVKSLEKVQVPNPRKMRNLPVESAFEAENVFLRHRSIMEGTRTEGEEMMLDYALRQAISRLAPIQRKKVDLLVQAFDIVLDGHDTPKQTKNSDTPRNNDETKEGKPRVEEGCEVNKDEQKIKNVFARFQVHQKDLKGEEEVHNTPKESRNLPPIRNFKQRIVVEKGKDSRMWKLIYKHMVTEKEGIDSANAESVASVESEYDDEAGGLQIDARRSGTVTLVREALEKILSEIPDNSSDDQSMDSDITTEQELFERNSQVSEEKSEVSSATFKPKFTEKRVKGWNNVKKVILLKRFVSDLGSLTRLSPKTPRVLPWEPDPETEKIRLRHQEIGGKRNSEEWMLDYALRQAISTLAPSQKRKVSLLAQAFDTISLQDMGSGSTPGSAASSRNISRQSSISSMAAHYENEANAEIIRGKLRNLQEDLKESAKLDGVSKDLEEKQQCSSLWRILCKQMEDNEKNQTLPEETRKEEEEEELKEDTSVDGEKMELYQTEAVELLGEVIDGISLEESQDQNLNNEETRQKSETLQVSKVRIDRWSNLKRAILLRRFVKALENVRKFNPREPRFLPPNPEVEAEKVNLRHQETQNKKNGDEWMVDNALQGVVSKLTPARKLKVQLLVQAFESLSATGN

SEQ ID NO: 101109 - protein, 1491 aa, Arabidopsis thaliana
  peptide (1)..(1491): Ceres Seq. ID no. 13606966
MFPEKWEESSTSKSSRRVHKRRERKMWKKPIKLSRFPSFGFSGSDFTLDQIPAIFSGYTAESEDSSSSEMSDDSRTYSKSSDENEELDQASLTICSERPRSVKRRAKSKSISRISSMKVLRRQSTRTLYGAGQRLKKMRSMKRLTSNSRQILRKKNLDRGDFGLLQPHYLRPTSSSASKNVENNQKNLGAARLKRIASLRYNGLLKATCSSAMKGSSSKRSNDVCTYRYCSLHGRRHSHAADNNAGVPSLKRFVSMRRKFMNRQKSVNRRLVLLKRTLSRKRGPLGGRVVTDQESKEVDDNVDGDSDEEVFEEEVSSSVDGGNDNESIGRSSETVMVDVDDNVDRGMDAMETVASKVQESKTETVGATLWRAICEQTVTGHDHDDGKVDGTTSDGTVGDNEEVCREGSSGELREEDGKKTEYVWNETVTLVKQAFDEILAEITDDDSSDDISMTKDEALEVGLGEEDVGADSSDSSCSDMQPVIERDTHLSVIASTFHMRDEFGHQRGPKKWSYLKRVILLKRFLKSLDRKERRKLSDGKESETIMRLRRELVGERKNAEEWMLDHALRQVISTLAPSQKKKVKHLVKAFESLIPMDGGSRGHDDLVSPAREENETVNSQTQTILRDNKDATDILEVSPAKDLEETNLTCEASSFLSIDMKSDEENETVNSPTIWRDNEDTTDLLEVVPAKDLEETNLTSESSSSLCIGMKSDEALESTADASLCNHLAVEEEVDGLALGSFIEEEEKKGESEKQNLSTWRNLIQKHMVMRDNSEGNRNETEQEHKWSYGTDQMTGIDDANAAAVKSIQLAFETILSEIPDSSSDEESVSESSNSLKEEKEHQGETKRSWNSLRKVILLKRFVKSLEKVQVPNPRKMRNLPVESAFEAENVFLRHRSIMEGTRTEGEEMMLDYALRQAISRLAPIQRKKVDLLVQAFDIVLDGHDTPKQTKNSDTPRNNDETKEGKPRVEEGCEVNKDEQKIKNVFARFQVHQKDLKGEEEVHNTPKESRNLPPIRNFKQRIVVEKGKDSRMWKLIYKHMVTEKEGIDSANAESVASVESEYDDEAGGLQIDARRSGTVTLVREALEKILSEIPDNSSDDQSMDSDITTEQELFERNSQVSEEKSEVSSATFKPKFTEKRVKGWNNVKKVILLKRFVSDLGSLTRLSPKTPRVLPWEPDPETEKIRLRHQEIGGKRNSEEWMLDYALRQAISTLAPSQKRKVSLLAQAFDTISLQDMGSGSTPGSAASSRNISRQSSISSMAAHYENEANAEIIRGKLRNLQEDLKESAKLDGVSKDLEEKQQCSSLWRILCKQMEDNEKNQTLPEETRKEEEEEELKEDTSVDGEKMELYQTEAVELLGEVIDGISLEESQDQNLNNEETRQKSETLQVSKVRIDRWSNLKRAILLRRFVKALENVRKFNPREPRFLPPNPEVEAEKVNLRHQETQNKKNGDEWMVDNALQGVVSKLTPARKLKVQLLVQAFESLSATGN

SEQ ID NO: 101110 - protein, 1466 aa, Arabidopsis thaliana
  peptide (1)..(1466): Ceres Seq. ID no. 13606967
MWKKPIKLSRFPSFGFSGSDFTLDQIPAIFSGYTAESEDSSSSEMSDDSRTYSKSSDENEELDQASLTICSERPRSVKRRAKSKSISRISSMKVLRRQSTRTLYGAGQRLKKMRSMKRLTSNSRQILRKKNLDRGDFGLLQPHYLRPTSSSASKNVENNQKNLGAARLKRIASLRYNGLLKATCSSAMKGSSSKRSNDVCTYRYCSLHGRRHSHAADNNAGVPSLKRFVSMRRKFMNRQKSVNRRLVLLKRTLSRKRGPLGGRVVTDQESKEVDDNVDGDSDEEVFEEEVSSSVDGGNDNESIGRSSETVMVDVDDNVDRGMDAMETVASKVQESKTETVGATLWRAICEQTVTGHDHDDGKVDGTTSDGTVGDNEEVCREGSSGELREEDGKKTEYVWNETVTLVKQAFDEILAEITDDDSSDDISMTKDEALEVGLGEEDVGADSSDSSCSDMQPVIERDTHLSVIASTFHMRDEFGHQRGPKKWSYLKRVILLKRFLKSLDRKERRKLSDGKESETIMRLRRELVGERKNAEEWMLDHALRQVISTLAPSQKKKVKHLVKAFESLIPMDGGSRGHDDLVSPAREENETVNSQTQTILRDNKDATDILEVSPAKDLEETNLTCEASSFLSIDMKSDEENETVNSPTIWRDNEDTTDLLEVVPAKDLEETNLTSESSSSLCIGMKSDEALESTADASLCNHLAVEEEVDGLALGSFIEEEEKKGESEKQNLSTWRNLIQKHMVMRDNSEGNRNETEQEHKWSYGTDQMTGIDDANAAAVKSIQLAFETILSEIPDSSSDEESVSESSNSLKEEKEHQGETKRSWNSLRKVILLKRFVKSLEKVQVPNPRKMRNLPVESAFEAENVFLRHRSIMEGTRTEGEEMMLDYALRQAISRLAPIQRKKVDLLVQAFDIVLDGHDTPKQTKNSDTPRNNDETKEGKPRVEEGCEVNKDEQKIKNVFARFQVHQKDLKGEEEVHNTPKESRNLPPIRNFKQRIVVEKGKDSRMWKLIYKHMVTEKEGIDSANAESVASVESEYDDEAGGLQIDARRSGTVTLVREALEKILSEIPDNSSDDQSMDSDITTEQELFERNSQVSEEKSEVSSATFKPKFTEKRVKGWNNVKKVILLKRFVSDLGSLTRLSPKTPRVLPWEPDPETEKIRLRHQEIGGKRNSEEWMLDYALRQAISTLAPSQKRKVSLLAQAFDTISLQDMGSGSTPGSAASSRNISRQSSISSMAAHYENEANAEIIRGKLRNLQEDLKESAKLDGVSKDLEEKQQCSSLWRILCKQMEDNEKNQTLPEETRKEEEEEELKEDTSVDGEKMELYQTEAVELLGEVIDGISLEESQDQNLNNEETRQKSETLQVSKVRIDRWSNLKRAILLRRFVKALENVRKFNPREPRFLPPNPEVEAEKVNLRHQETQNKKNGDEWMVDNALQGVVSKLTPARKLKVQLLVQAFESLSATGN

SEQ ID NO: 101111 - DNA, 2325 bp, Arabidopsis thaliana
  misc_feature (1)..(2325): Ceres Seq. ID no. 13606983
  misc_feature (1)..(2325): Ortholog of  Ceres SEQ ID NO 13598865 as cited in SEQ ID NO 0
aatcgcctctctaaccacaaatcctaaaagtctaaacgaaaacagaacacatgaatctctccttcctctgcatctcaattccacttcgccatttttaaagctttttacgtaaataataagaaaccatggagaagaacgacaaggaccctgatcatgatgacaaatccaagggagatgagaaaggcgacgtcgtttcggatgctcatccctcagatgatgcgcatcatcaggatggtatcagtaacgaaaatgtagatgttgttggtaatgcggagacagatcatcaagatccaggagataacaatgtcgacaaggtttcacaaggagaagaagcaccagagattcgtcaaaccttggagtctttgtctgaagaactcgatcagtttctcccgactctttcccttcacatggaggagcacaaagatagcaccgaggagaaaggagaggatggttactttcagatcccacagtttgttgggaaattcttggatctttttgaggaaaaactctccaaatatgactctggtgagcctaagactgtgtggtaccaagatcctgaagaggtgtcttcgcttttggaggcagtggatcgtgtctcaaagcttatggggctattgctcaacaccaagtcctgtttggaccatcatgagtccttgatcaaccatgcgggatctattcagcagcgtgcaatggctttcttggaagacgaattccgcatcattttagaagaatctgtgaccaaagagtctgtggttgtcaccgatgacagcaacagccagaggaggagcactgccgatcagcaagaccaccagaacgatgtggtggtctcacaagaccacgaccagatgctcgttccggaatgcggtgatcaggagattgaataccctggttaccctgaggatgtggttgtggtgctgaggaaaatagcggaaaagatgaaagcaggagggtatggatgggaatgtagagaggtttatttggttgggaggaggaacatcttgatgcgcactttgaaacaagattgtgagtttgagaaagttagcatcgacgaggtgcagaaaatgagctgggacacgctcgagagagagatccctatttggaacaagactttcaaggactgctcttctctcttcttccctggtgagctaaaacttgcagagaggatattcccaggggacgaggggaacttattctgtattgtcacacacggtctggccatccagttcttaggtttcgcagaggccgtagccatgacaaggcgctccactgaaaagctcttcaagatcctcgacatctatgagactctgcgggatagttttccggccatggaggagctgtttccggaggaactccggagcgagctgaggaacgaggtgaccagtgctcgctcccgacttggagagactgcgattcacattttctgtgatctggagcactccatcaaatcagattcaagcaagacccctgtgccaggaggggcagtgcatccattgacgaggtacaccatgaactacctcaagtactcgtgcgaatacaaggacacattggaacaagtgttcaagagtcactcgaagatggagcgagaggaggaggaacctgtggagagcggaaactcggccttcgcaagccagctgatgaggataatggagctactcgacggaaacctggagacaaagtcaaaacagtacaaagacataccattgagctgcatcttcatgatgaacaacgggagatacatagtgcagaagatcaaaggatcggcggagatacacgaggtgatgggtgacacatggtgcaggaggaggtcgtcagagctaaggaactatcacaaaaactatcagagggagacgtgggggaagctactggggttcttagggcacgaggggctcatgcacaacggcaagatagtcaagcccaatctcaaggagaggttcaagagcttcaacgcaacatttgacgagatacacaagacacagaccacatgggtagtcaacgacgagcagctgcagagtgagctaagggtctccataactgcagtcatgatacctgcctacagggccttcatggccaggtttggacagtacttggatcctggtcgccagaccgagaagtatgtcaagtatcagcctgaagatatcgaggatctcatcgaccagctctttgaaggcaacacctcctcctcttctactgccaccgccaggcgaagaacatagcttctttcttttcttcttttttcttttgcaacaacactttttcctgattttctcaaaatttttcatgtcttcttcaactgtttttgtctgaatgccacaacttggatgaccc

SEQ ID NO: 101112 - protein, 695 aa, Arabidopsis thaliana
  peptide (1)..(695): Ceres Seq. ID no. 13606984
MEKNDKDPDHDDKSKGDEKGDVVSDAHPSDDAHHQDGISNENVDVVGNAETDHQDPGDNNVDKVSQGEEAPEIRQTLESLSEELDQFLPTLSLHMEEHKDSTEEKGEDGYFQIPQFVGKFLDLFEEKLSKYDSGEPKTVWYQDPEEVSSLLEAVDRVSKLMGLLLNTKSCLDHHESLINHAGSIQQRAMAFLEDEFRIILEESVTKESVVVTDDSNSQRRSTADQQDHQNDVVVSQDHDQMLVPECGDQEIEYPGYPEDVVVVLRKIAEKMKAGGYGWECREVYLVGRRNILMRTLKQDCEFEKVSIDEVQKMSWDTLEREIPIWNKTFKDCSSLFFPGELKLAERIFPGDEGNLFCIVTHGLAIQFLGFAEAVAMTRRSTEKLFKILDIYETLRDSFPAMEELFPEELRSELRNEVTSARSRLGETAIHIFCDLEHSIKSDSSKTPVPGGAVHPLTRYTMNYLKYSCEYKDTLEQVFKSHSKMEREEEEPVESGNSAFASQLMRIMELLDGNLETKSKQYKDIPLSCIFMMNNGRYIVQKIKGSAEIHEVMGDTWCRRRSSELRNYHKNYQRETWGKLLGFLGHEGLMHNGKIVKPNLKERFKSFNATFDEIHKTQTTWVVNDEQLQSELRVSITAVMIPAYRAFMARFGQYLDPGRQTEKYVKYQPEDIEDLIDQLFEGNTSSSSTATARRRT

SEQ ID NO: 101113 - protein, 601 aa, Arabidopsis thaliana
  peptide (1)..(601): Ceres Seq. ID no. 13606985
MEEHKDSTEEKGEDGYFQIPQFVGKFLDLFEEKLSKYDSGEPKTVWYQDPEEVSSLLEAVDRVSKLMGLLLNTKSCLDHHESLINHAGSIQQRAMAFLEDEFRIILEESVTKESVVVTDDSNSQRRSTADQQDHQNDVVVSQDHDQMLVPECGDQEIEYPGYPEDVVVVLRKIAEKMKAGGYGWECREVYLVGRRNILMRTLKQDCEFEKVSIDEVQKMSWDTLEREIPIWNKTFKDCSSLFFPGELKLAERIFPGDEGNLFCIVTHGLAIQFLGFAEAVAMTRRSTEKLFKILDIYETLRDSFPAMEELFPEELRSELRNEVTSARSRLGETAIHIFCDLEHSIKSDSSKTPVPGGAVHPLTRYTMNYLKYSCEYKDTLEQVFKSHSKMEREEEEPVESGNSAFASQLMRIMELLDGNLETKSKQYKDIPLSCIFMMNNGRYIVQKIKGSAEIHEVMGDTWCRRRSSELRNYHKNYQRETWGKLLGFLGHEGLMHNGKIVKPNLKERFKSFNATFDEIHKTQTTWVVNDEQLQSELRVSITAVMIPAYRAFMARFGQYLDPGRQTEKYVKYQPEDIEDLIDQLFEGNTSSSSTATARRRT

SEQ ID NO: 101114 - protein, 535 aa, Arabidopsis thaliana
  peptide (1)..(535): Ceres Seq. ID no. 13606986
MGLLLNTKSCLDHHESLINHAGSIQQRAMAFLEDEFRIILEESVTKESVVVTDDSNSQRRSTADQQDHQNDVVVSQDHDQMLVPECGDQEIEYPGYPEDVVVVLRKIAEKMKAGGYGWECREVYLVGRRNILMRTLKQDCEFEKVSIDEVQKMSWDTLEREIPIWNKTFKDCSSLFFPGELKLAERIFPGDEGNLFCIVTHGLAIQFLGFAEAVAMTRRSTEKLFKILDIYETLRDSFPAMEELFPEELRSELRNEVTSARSRLGETAIHIFCDLEHSIKSDSSKTPVPGGAVHPLTRYTMNYLKYSCEYKDTLEQVFKSHSKMEREEEEPVESGNSAFASQLMRIMELLDGNLETKSKQYKDIPLSCIFMMNNGRYIVQKIKGSAEIHEVMGDTWCRRRSSELRNYHKNYQRETWGKLLGFLGHEGLMHNGKIVKPNLKERFKSFNATFDEIHKTQTTWVVNDEQLQSELRVSITAVMIPAYRAFMARFGQYLDPGRQTEKYVKYQPEDIEDLIDQLFEGNTSSSSTATARRRT

SEQ ID NO: 101115 - DNA, 1793 bp, Arabidopsis thaliana
  misc_feature (1)..(1793): Ceres Seq. ID no. 13606995
  misc_feature (1)..(1793): Ortholog of  Ceres SEQ ID NO 14310592 as cited in SEQ ID NO 55379
atggggagtgaagtcaaccgtccactagctgattttccagcaaatatctgggaagatccattaacttctttctcaaagtctgacctcggaactgagacgttcaaagagaagcatagtacgctaaaggaggcggtgaaggaagcttttatgtcttccaaagcgaatccgatagagaacatcaaattcatcgatgctctatgtcgccttggtgtctcctatcactttgagaaagatatcgtagaacaattggataagtcatttgattgtcttgattttcctcagatggtaagacaagagggatgcgatttgtacacggttggaataattttccaagttttcaggcaattcggctttaaactttctgccgatgtgtttgagaagttcaaggacgaaaatgggaagttcaaaggacacttggtgacagatgcatacgggatgttaagtttgtacgaagctgcacaatggggcactcacggagaagacattattgacgaagctctcgctttctcacgttctcatttagaagaaatttcgtctcggtctagccctcatctcgcaattcgcatcaagaatgctctaaaacatccataccataaaggcatctctaggatagaaacaagacaatatatctcatactacgaggaggaagagtcgtgcgacccaacattacttgagttcgcaaagatagattttaatttgctgcaaatattacaccgcgaagagcttgcttgcgtcacaaggtggcaccatgaaatggagtttaaatctaaagtaacatacacaaggcataggataacagaggcatacttgtggtcacttggaacatatttcgagcctcaatattctcaagcacgagttataaccactatggcactaatcttattcacagcgcttgatgatatgtatgatgcatatggcacaatggaggaacttgagcttttcactgatgcaatggatgagtatagcatttgtaacataataccgatacccgatagcatgaagttcatttacaatgtgacggtagaattctatgataaactcgacgaggaacttgagaaagaaggaaggtcagggtgcggtttccatcttaagaaatcattgcaaaaaacagcaaatggatatatgcaagaagcaaaatggttgaaaaaggattacattgctacatttgatgagtataaagagaatgcaatcttgtcttcaggttattatgccttgatagcgatgacattcgtgagaatgacagatgtcgcaaaacttgatgcttttgaatggttaagctcacatcctaaaattagggtagcttctgagataataagtcgattcacagatgacatttcaagctacgaatttgaacacaaacgggagcatgtagcgactggcattgattgttatatgcagcaatttggtgtttccaaggaaagagctgtggaagtgatgggaaacattgtttcagatgcatggaaggacttgaaccaagagctaatgaggcctcacgtgtttcctttccctcttttgatgcgagttcttaacctttcgcgagtcatcgatgtattctataggtaccaagatgcttacaccaaccccaagctcttgaaggagcacattgtttctttgctcattgaaactatacccatttgagaatgactatcccaatccatggaattgattcacttcaatgatggttggatagttattttatttatgttgtatgtttatttgtattctggtagttacttttttttttgtatcattgtttgtgtacttttgttggtgaatccatttgaatttgaatt

SEQ ID NO: 101116 - protein, 545 aa, Arabidopsis thaliana
  peptide (1)..(545): Ceres Seq. ID no. 13606996
MGSEVNRPLADFPANIWEDPLTSFSKSDLGTETFKEKHSTLKEAVKEAFMSSKANPIENIKFIDALCRLGVSYHFEKDIVEQLDKSFDCLDFPQMVRQEGCDLYTVGIIFQVFRQFGFKLSADVFEKFKDENGKFKGHLVTDAYGMLSLYEAAQWGTHGEDIIDEALAFSRSHLEEISSRSSPHLAIRIKNALKHPYHKGISRIETRQYISYYEEEESCDPTLLEFAKIDFNLLQILHREELACVTRWHHEMEFKSKVTYTRHRITEAYLWSLGTYFEPQYSQARVITTMALILFTALDDMYDAYGTMEELELFTDAMDEYSICNIIPIPDSMKFIYNVTVEFYDKLDEELEKEGRSGCGFHLKKSLQKTANGYMQEAKWLKKDYIATFDEYKENAILSSGYYALIAMTFVRMTDVAKLDAFEWLSSHPKIRVASEIISRFTDDISSYEFEHKREHVATGIDCYMQQFGVSKERAVEVMGNIVSDAWKDLNQELMRPHVFPFPLLMRVLNLSRVIDVFYRYQDAYTNPKLLKEHIVSLLIETIPI

SEQ ID NO: 101117 - protein, 496 aa, Arabidopsis thaliana
  peptide (1)..(496): Ceres Seq. ID no. 13606997
MSSKANPIENIKFIDALCRLGVSYHFEKDIVEQLDKSFDCLDFPQMVRQEGCDLYTVGIIFQVFRQFGFKLSADVFEKFKDENGKFKGHLVTDAYGMLSLYEAAQWGTHGEDIIDEALAFSRSHLEEISSRSSPHLAIRIKNALKHPYHKGISRIETRQYISYYEEEESCDPTLLEFAKIDFNLLQILHREELACVTRWHHEMEFKSKVTYTRHRITEAYLWSLGTYFEPQYSQARVITTMALILFTALDDMYDAYGTMEELELFTDAMDEYSICNIIPIPDSMKFIYNVTVEFYDKLDEELEKEGRSGCGFHLKKSLQKTANGYMQEAKWLKKDYIATFDEYKENAILSSGYYALIAMTFVRMTDVAKLDAFEWLSSHPKIRVASEIISRFTDDISSYEFEHKREHVATGIDCYMQQFGVSKERAVEVMGNIVSDAWKDLNQELMRPHVFPFPLLMRVLNLSRVIDVFYRYQDAYTNPKLLKEHIVSLLIETIPI

SEQ ID NO: 101118 - protein, 451 aa, Arabidopsis thaliana
  peptide (1)..(451): Ceres Seq. ID no. 13606998
MVRQEGCDLYTVGIIFQVFRQFGFKLSADVFEKFKDENGKFKGHLVTDAYGMLSLYEAAQWGTHGEDIIDEALAFSRSHLEEISSRSSPHLAIRIKNALKHPYHKGISRIETRQYISYYEEEESCDPTLLEFAKIDFNLLQILHREELACVTRWHHEMEFKSKVTYTRHRITEAYLWSLGTYFEPQYSQARVITTMALILFTALDDMYDAYGTMEELELFTDAMDEYSICNIIPIPDSMKFIYNVTVEFYDKLDEELEKEGRSGCGFHLKKSLQKTANGYMQEAKWLKKDYIATFDEYKENAILSSGYYALIAMTFVRMTDVAKLDAFEWLSSHPKIRVASEIISRFTDDISSYEFEHKREHVATGIDCYMQQFGVSKERAVEVMGNIVSDAWKDLNQELMRPHVFPFPLLMRVLNLSRVIDVFYRYQDAYTNPKLLKEHIVSLLIETIPI

SEQ ID NO: 101119 - DNA, 1223 bp, Arabidopsis thaliana
  misc_feature (1)..(1223): Ceres Seq. ID no. 13606999
  misc_feature (1)..(1223): Ortholog of  Ceres SEQ ID NO 14311163 as cited in SEQ ID NO 56498
  misc_feature (1)..(1223): Ortholog of  Ceres SEQ ID NO 13584722 as cited in SEQ ID NO 65484
  misc_feature (1)..(1223): Ortholog of  Ceres SEQ ID NO 13599293 as cited in SEQ ID NO 0
agtccctctctaaacgcataatcttacaataaaatggtgaaactcgcgacggcgcgtgagattagaacgtacggccctcggcttgggaggagcagagccgagtacatcaacgcaggtctatacttgtttgcaaccgtggtgctcatcggcggtttcacagcgacaggattctcatgggaaccaagatccggcctcgtccttattctcttagctctcgttcttataaccgccgtgaatgttcatgatcttgtggctcatctagctggaatcgattaccggttaaggttaatggagtatgatttgcaactggggctagtggaatttgcagtccctctggttcagatagcgggttcggtagtgtttttcttgggaatctttttcgtcttccatcaggctgagacaaaacgtggatacagtggaagagagcatcatgcattaaacttgctgatagcgggtccgttactttggttgataggatcgattcacaactcatgccaaatctacgagagagcggatagtcatgttcaaattctacagcagtgtgtttacattcctttcttggttggatcccttctattcttggtttccgcagttctcaatagcctcgacatatccgggtcatctcgtagtggattgaagcttcttggggaaagatggatttggcttgggatttccggggctatatgtttgtttgtgggaggattgctgaacgttgttaaggtttttaacttcgtccagatctctgggctccgcctcgagaaactacggggtggagctcaagaccgacttcttgaagggagagaaggatatctccctcttgttgctgaagaagaaagaataaggaaaatggaagctgatcacgaagcttctagtagagccaaaccccgggcacacacaacctccaaagccggagagggagctacagagaccgtggtggtatcatctccgacaccatacaaggatgttctcgttggacagatctgaggaagattagtcatgtttaaatgttcttttgtactccatatttgtttttagctgcggagaccacatattttgccgttcaacatatgttatgtgattcgtttcctttttggtcagtctttatgaatattgaaataggttacaatacatcaagactttagaagaagatttgtacactagaagaatattgatcttctttatgaataatgaaatagggtctttatacctatttctatttgacc

SEQ ID NO: 101120 - protein, 316 aa, Arabidopsis thaliana
  peptide (1)..(316): Ceres Seq. ID no. 13607000
MVKLATAREIRTYGPRLGRSRAEYINAGLYLFATVVLIGGFTATGFSWEPRSGLVLILLALVLITAVNVHDLVAHLAGIDYRLRLMEYDLQLGLVEFAVPLVQIAGSVVFFLGIFFVFHQAETKRGYSGREHHALNLLIAGPLLWLIGSIHNSCQIYERADSHVQILQQCVYIPFLVGSLLFLVSAVLNSLDISGSSRSGLKLLGERWIWLGISGAICLFVGGLLNVVKVFNFVQISGLRLEKLRGGAQDRLLEGREGYLPLVAEEERIRKMEADHEASSRAKPRAHTTSKAGEGATETVVVSSPTPYKDVLVGQI

SEQ ID NO: 101121 - protein, 231 aa, Arabidopsis thaliana
  peptide (1)..(231): Ceres Seq. ID no. 13607001
MEYDLQLGLVEFAVPLVQIAGSVVFFLGIFFVFHQAETKRGYSGREHHALNLLIAGPLLWLIGSIHNSCQIYERADSHVQILQQCVYIPFLVGSLLFLVSAVLNSLDISGSSRSGLKLLGERWIWLGISGAICLFVGGLLNVVKVFNFVQISGLRLEKLRGGAQDRLLEGREGYLPLVAEEERIRKMEADHEASSRAKPRAHTTSKAGEGATETVVVSSPTPYKDVLVGQI

SEQ ID NO: 101122 - DNA, 1288 bp, Arabidopsis thaliana
  misc_feature (1)..(1288): Ceres Seq. ID no. 13607002
  misc_feature (1)..(1288): Ortholog of  Ceres SEQ ID NO 14308359 as cited in SEQ ID NO 55097
  misc_feature (1)..(1288): Ortholog of  Ceres SEQ ID NO 13581611 as cited in SEQ ID NO 59028
  misc_feature (1)..(1288): Ortholog of  Ceres SEQ ID NO 13596689 as cited in SEQ ID NO 62728
  misc_feature (1)..(1288): Ortholog of  Ceres SEQ ID NO 14302142 as cited in SEQ ID NO 0
atgggtggtgagagtaatgaaggaggagagatgggctttaagcatggagatgatgagagtggtgggatctctagagttggaattacatcaatgcccttgtatgcaaaggcagatcctttcttctcttctgcagattgggatccagttgtcaatgctgctgctgctggcttctccagctctcattaccatccttccatggcgatggataatccagggatgagttgcttctctcattaccaacccggttctgtttccggttttgcagcagacatgcctgctagtcttcttccgtttggtgattgtggtggtggtcaaattggtcattttcttggttcagacaagaaaggggaaagattgatcagagctggagaatcatctcatgaggatcatcatcaggtttcagatgatgctgttcttggtgcttccccagttgggaaaagaaggctacctgaagccgaatcacaatggaacaagaaagctgtggaggaatttcaagaagaccctcaaaggggaaatgatcagagccagaagaagcataaaaatgatcagagtaaagagacggtgaacaaggagagctcacaaagtgaagaagcaccgaaagaaaactacattcatatgagggcaagaagaggtcaagccactaatagtcacagtcttgcagagcgggttagaagagaaaagatcagtgaaaggatgagattgcttcaagaacttgttcccggatgcaacaagatcaccggaaaagcggttatgctcgatgaaataatcaactatgttcagtcattgcaacagcaagttgagtttttgtctatgaaacttgcgacggtgaatccagagatcaatattgatatagacaggattctcgccaaagatcttctgcagtcaagagacagaaacactcctacactcgggctgaatccttttgccggttttcaagggaacataccaaacctttctgccaccacaaatccacaatacaacccactacctcagacaacactagagagtgaactacaaaacctttaccagatgggattcgtctcaaatccatcgactatgtccagtttctcacctaatggtcgattgaagcctgagctctagtacttcaaggacacggaaaatttgcagggagtttgtatagaagatggctttggttctaagtatcatatgtgttcgttcttccatattatttgttctaagcacaaggatttggattctcagttgttgttgtttttgcttttcctcaacgaagaatacatttattatatatggaaatcagatttatctc

SEQ ID NO: 101123 - protein, 366 aa, Arabidopsis thaliana; identical to SEQ ID NO: 100890
  peptide (1)..(366): Ceres Seq. ID no. 13607003

SEQ ID NO: 101124 - protein, 356 aa, Arabidopsis thaliana; identical to SEQ ID NO: 100891
  peptide (1)..(356): Ceres Seq. ID no. 13607004

SEQ ID NO: 101125 - protein, 336 aa, Arabidopsis thaliana; identical to SEQ ID NO: 100892
  peptide (1)..(336): Ceres Seq. ID no. 13607005

SEQ ID NO: 101126 - DNA, 1060 bp, Arabidopsis thaliana
  misc_feature (1)..(1060): Ceres Seq. ID no. 13607014
  misc_feature (1)..(1060): Ortholog of  Ceres SEQ ID NO 14305750 as cited in SEQ ID NO 52458
  misc_feature (1)..(1060): Ortholog of  Ceres SEQ ID NO 12608276 as cited in SEQ ID NO 57871
  misc_feature (1)..(1060): Ortholog of  Ceres SEQ ID NO 13598492 as cited in SEQ ID NO 63882
  misc_feature (1)..(1060): Ortholog of  Ceres SEQ ID NO 13657914 as cited in SEQ ID NO 66230
  misc_feature (1)..(1060): Ortholog of  Ceres SEQ ID NO 13595877 as cited in SEQ ID NO 67702
atggattccgaaatcgcattcgactattctccgaggtttcgtatattcaagaacggtggcatcgaacgcctcgtacccgaaacattcgtcccaccgtcactaaatcccgaaaacggcgtcgtatctaaagatgccgtctattcaccggagaaaaacctctctctccgcatttacctccctcaaaattccgtctatgaaaccggcgagaagaaaatcccactactcgtctactttcatggcggaggattcatcatggaaacagctttctctccaatttaccacacttttctcacatcggcagtttcagccaccgattgcatcgctgtctcagtagaataccgtcgtgcacctgagcatccgattccaaccttgtacgaagattcatgggacgcgattcaatggatcttcactcatatcacaagatctggtcctgaagattggctaaacaaacacgccgatttcagtaaagtctttctcgccggagatagcgccggagctaacatcgcgcatcacatggcgattagagtagacaaagagaaactccccccggaaaatttcaaaatatcggggatgattctgtttcatccgtatttcttgtcaaaagctttgattgaggagatggaagtggaagcgatgagatattacgaaaggctttggagaatcgcgagtcctgatagtggaaacggtgtggaggatccgtggattaatgtggtcgggtcggatctaaccggattgggttgtaggcgggttttggtgatggtggcgggaaatgatgtgttggctaggggaggttggagttacgtggcggagctggagaagagtggatggatagggaaagtgaaagtgatggagactaaggaagaaggtcacgtttttcatttgagggatcctgattctgagaatgctcgtcgagttttgcgcaattttgcagagtttcttaaagaagaaacattttaagtgacgtcgttcaaatgaaaaatgcataaaatatcggttaccatgtcaatatatactaattaaggtttgtatgtttcatcaaacactaaatcttttattttgt

SEQ ID NO: 101127 - protein, 318 aa, Arabidopsis thaliana
  peptide (1)..(318): Ceres Seq. ID no. 13607015
MDSEIAFDYSPRFRIFKNGGIERLVPETFVPPSLNPENGVVSKDAVYSPEKNLSLRIYLPQNSVYETGEKKIPLLVYFHGGGFIMETAFSPIYHTFLTSAVSATDCIAVSVEYRRAPEHPIPTLYEDSWDAIQWIFTHITRSGPEDWLNKHADFSKVFLAGDSAGANIAHHMAIRVDKEKLPPENFKISGMILFHPYFLSKALIEEMEVEAMRYYERLWRIASPDSGNGVEDPWINVVGSDLTGLGCRRVLVMVAGNDVLARGGWSYVAELEKSGWIGKVKVMETKEEGHVFHLRDPDSENARRVLRNFAEFLKEETF

SEQ ID NO: 101128 - protein, 234 aa, Arabidopsis thaliana
  peptide (1)..(234): Ceres Seq. ID no. 13607016
METAFSPIYHTFLTSAVSATDCIAVSVEYRRAPEHPIPTLYEDSWDAIQWIFTHITRSGPEDWLNKHADFSKVFLAGDSAGANIAHHMAIRVDKEKLPPENFKISGMILFHPYFLSKALIEEMEVEAMRYYERLWRIASPDSGNGVEDPWINVVGSDLTGLGCRRVLVMVAGNDVLARGGWSYVAELEKSGWIGKVKVMETKEEGHVFHLRDPDSENARRVLRNFAEFLKEETF

SEQ ID NO: 101129 - DNA, 1700 bp, Arabidopsis thaliana
  misc_feature (1)..(1700): Ceres Seq. ID no. 13607036
  misc_feature (1)..(1700): Ortholog of  Ceres SEQ ID NO 15176457 as cited in SEQ ID NO 55547
  misc_feature (1)..(1700): Ortholog of  Ceres SEQ ID NO 13594349 as cited in SEQ ID NO 58161
  misc_feature (1)..(1700): Ortholog of  Ceres SEQ ID NO 13663419 as cited in SEQ ID NO 66561
aaaaaagcatcactagtctcctcttcacttcttctcaaaccaaacaccgagaagtgacatcatgtctcctctccaatggctcacaatctcttttgctctaattatcttccactctctcacggtctcctctagtgttctgtcccactcagatcgagtcacccgtttacccggtcaaccccgggtcggatttcagcaatactccggttatgtcactgtcgacgacaagaaacagagagctctgttttactacttcgccgaggcagaaaccaatccatcctctaaacctctcgtcctctggctcaatggaggacctggatgttcatctttgggcgttggggcattctcagaaaacggaccatttagaccaaaaggaccaatcttggtcaagaatcagcatagctggaaccaagaggctaatatgttgtatctagagacacctgttggagttggattctcttattcaactcaaagctcccattatgagggtgttaatgataagatcactgcaagagacaaccttgtgttcttgcaaagatggtttctcaaattccctcattacctcaatcgaagtctcttcatcactggtgaaagttatgctggccattatgttcctcaactagctgagcttatgattcagtacaacaagaagcaccatttgttcaatctgagaggaattgctattggcaatccagttttggagtttgcgacagatttcaactcgcgagctgagtacttctggtctcatggcttgatatcggattcgacttacaaaatgttcacatcttactgtaattactcgcgctatgtgagtgagtactatagagggtcaatgtctagtatgtgctctaaggtgatgagtcaagttagcactgagacgagtcgatttgttgataaatatgatgtcactctcgatgtttgcattccctctgtgctatctcaatccaaagtagtaagccccaatcaagtgggagaatctgtggatgtttgtgtcgaagatgagacggtcaactatctaaaccgaagagatgtgcaggaagctcttcatgctcggctcataggagtacgtgaatggacagtttgcagcaatgtgcttgattaccaattgcttgatgtggaaataccaacgattaatatcgtagggagccttgttaaagctggagttccagttcttgtctacagtggagatcaagattctgtgatcccgttgacaggaagtagaaccttagtgagtagattggccaaacaattgggactgagaacaagtgtaccttatcgagtctggtttgcaggccaacaggttggaggatggactcaagtctatggaaatgtcttgtcctttgcaacagtgcgaggagcttcacacgaggtcccattctcacagcctgagagatcacttgtcctgttcaaggcgttcttggacggccatcctcttcctgaagaattctgatattgtaccatgatctcttgaccttatgtaagtataaaataatagattttggcaaaccacttatcctaagaatggcttatttaatcggcaaaaagcggaaatatttgtttttgtaaagatgtgaaccttttaggaaggaagctgtatgttcttggaatttgagtgttgtgtttactttgaagggtaaattacaacaggagcttctacttgcattgttaagcatttgaattgaagagctatgattggtttcgat

SEQ ID NO: 101130 - protein, 461 aa, Arabidopsis thaliana
  peptide (1)..(461): Ceres Seq. ID no. 13607037
MSPLQWLTISFALIIFHSLTVSSSVLSHSDRVTRLPGQPRVGFQQYSGYVTVDDKKQRALFYYFAEAETNPSSKPLVLWLNGGPGCSSLGVGAFSENGPFRPKGPILVKNQHSWNQEANMLYLETPVGVGFSYSTQSSHYEGVNDKITARDNLVFLQRWFLKFPHYLNRSLFITGESYAGHYVPQLAELMIQYNKKHHLFNLRGIAIGNPVLEFATDFNSRAEYFWSHGLISDSTYKMFTSYCNYSRYVSEYYRGSMSSMCSKVMSQVSTETSRFVDKYDVTLDVCIPSVLSQSKVVSPNQVGESVDVCVEDETVNYLNRRDVQEALHARLIGVREWTVCSNVLDYQLLDVEIPTINIVGSLVKAGVPVLVYSGDQDSVIPLTGSRTLVSRLAKQLGLRTSVPYRVWFAGQQVGGWTQVYGNVLSFATVRGASHEVPFSQPERSLVLFKAFLDGHPLPEEF

SEQ ID NO: 101131 - protein, 342 aa, Arabidopsis thaliana
  peptide (1)..(342): Ceres Seq. ID no. 13607038
MLYLETPVGVGFSYSTQSSHYEGVNDKITARDNLVFLQRWFLKFPHYLNRSLFITGESYAGHYVPQLAELMIQYNKKHHLFNLRGIAIGNPVLEFATDFNSRAEYFWSHGLISDSTYKMFTSYCNYSRYVSEYYRGSMSSMCSKVMSQVSTETSRFVDKYDVTLDVCIPSVLSQSKVVSPNQVGESVDVCVEDETVNYLNRRDVQEALHARLIGVREWTVCSNVLDYQLLDVEIPTINIVGSLVKAGVPVLVYSGDQDSVIPLTGSRTLVSRLAKQLGLRTSVPYRVWFAGQQVGGWTQVYGNVLSFATVRGASHEVPFSQPERSLVLFKAFLDGHPLPEEF

SEQ ID NO: 101132 - protein, 272 aa, Arabidopsis thaliana
  peptide (1)..(272): Ceres Seq. ID no. 13607039
MIQYNKKHHLFNLRGIAIGNPVLEFATDFNSRAEYFWSHGLISDSTYKMFTSYCNYSRYVSEYYRGSMSSMCSKVMSQVSTETSRFVDKYDVTLDVCIPSVLSQSKVVSPNQVGESVDVCVEDETVNYLNRRDVQEALHARLIGVREWTVCSNVLDYQLLDVEIPTINIVGSLVKAGVPVLVYSGDQDSVIPLTGSRTLVSRLAKQLGLRTSVPYRVWFAGQQVGGWTQVYGNVLSFATVRGASHEVPFSQPERSLVLFKAFLDGHPLPEEF

SEQ ID NO: 101133 - DNA, 2988 bp, Arabidopsis thaliana
  misc_feature (1)..(2988): Ceres Seq. ID no. 13607040
  misc_feature (1)..(2988): Ortholog of  Ceres SEQ ID NO 12618563 as cited in SEQ ID NO 65025
agtgaaatttactgaaattgccactgttttcgattttgttggttctccgatctcagtggtgtcttcttctccggtagataattctcgtgttgaaaatctccggtagtgtttgactgagttacgaatatgccggtggtttctctggctaaggttgttacttctccggcggtggccggagatttagcggttcgtgttccgttcatttatgggaaacgactagtgtcgaatcgtgtttctttcgggaaattgaggcgccggagttgtataggtcaatgcgtaagaagcgaattgcaaagtcctcgtgtcttaggttccgtcacagatttagcgttggataattctgtggagaatggtcatcttcccaaaggagattcatgggctgtacacaaatttggaggaacttgtgtgggaaattctgagaggataaaggatgttgctgctgttgttgttaaggatgactctgagaggaagttggtggttgtgtcagcaatgtcgaaagtcactgatatgatgtatgatctcattcacagagcagagtctcgtgatgattcatatctgtctgctttgagtggtgttcttgaaaagcaccgagcaactgctgttgacttgcttgatggagatgaactctcaagtttcttggctcggttaaatgatgatataaataatctcaaagcaatgcttcgtgccatttacatagctggtcatgcaaccgaatctttctcagacttcgttgttggccacggagagttgtggtctgctcagatgttagctgctgttgtgagaaagagcggattggactgcacttggatggatgcaagggatgtgcttgttgttattccaacgagctctaatcaagttgaccctgactttgtggaatcagaaaaaagactggaaaaatggtttactcagaactcggcaaagattattatagcaactggtttcatagccagtacaccacagaacattccaacgactcttaaaagggatgggagtgacttctctgcagctataatgagtgctctgtttagatctcaccaactcacaatctggacagatgttgatggtgtgtacagtgcagatcccaggaaagttagtgaagctgttgtgctgaagactctttcttatcaagaggcttgggaaatgtcttactttggggcaaacgttttacatcctcggaccattattccagtgatgaaatatgacattccaattgtaataaggaatattttcaacctctctgcccctggaacaatgatatgccggcagattgatgatgaagatggattcaaattagacgctcctgtgaaaggatttgcgacgattgacaatttggctcttgtcaatgtagaaggaactggaatggctggtgttcctggtactgccagtgccattttttctgctgtcaaggaagttggagccaatgtgattatgatatcgcaggctagtagcgagcattctgtgtgctttgctgtacctgagaaggaagtgaaagctgtttctgaagcattgaactcaagatttcgtcaagctttggctggtggccgcctttcccagattgaaatcatccctaattgtagcatattagcagcagttggccagaaaatggcgagcactcctggtgtttctgccactttttttaatgcattagcaaaggccaatatcaacatccgtgctatagcccaaggttgctccgagttcaatattacagtagtcgtcaagcgtgaagactgcatcagggcattaagagctgtgcactcaagattttacctttcgagaaccactttggcagtgggaatcataggaccgggattaattggtggaaccttacttgatcagattagagatcaggcggcagtgctcaaagaagaatttaaaattgacttgcgtgttatagggatcacgggctcaagtaaaatgttgatgagtgaatcggggattgacttatcaagatggagagagcttatgaaagaagagggagaaaaagctgacatggagaagttcacccaatatgtgaagggaaatcatttcatcccaaactctgttatggttgattgtacagccgatgctgacatcgctagctgttactacgactggttgctacgaggaattcatgtggtcactccgaacaaaaaggctaactctggaccacttgatcagtatctaaagatcagagatcttcaacgaaaatcgtacacacattacttttatgaagccaccgttggagctggtcttccaattattagcaccttacgtggtctcctcgaaacaggggataaaatactgcgaattgagggaattttcagtggtactttaagttacctcttcaacaactttgtcggcaccagaagcttcagtgaagttgtagcagaagcaaagcaagcaggtttcacagaaccagatccacgagatgatctatctggaacagatgttgccagaaaagtaacaatccttgccagagaatcaggcttaaaattggatcttgagggccttccagtccagaatcttgtgccaaagccgttacaagcttgtgcatcagcagaagagttcatggagaagcttcctcagtttgatgaagaattatccaaacaaagagaagaggctgaagcagcaggagaagtcttgagatacgtaggagttgtagatgcagtagagaaaaagggaacagtcgagttgaaacggtacaaaaaagatcatccgtttgctcagctatcgggtgctgataacatcatcgctttcacaaccaaacggtacaaagaacagcctctgattgttcgtggacctggtgctggtgctcaagtcacagccggtggaatcttcagtgacattcttcgccttgctttctatctcggggctccgtcttaaagcacactctacatgctagcatatgtattttggatttcagagattttgatttctatagatgataccaaacttcaaggtagtaaaacattctaggaaaaaattgaataaagactgttggtattatac

SEQ ID NO: 101134 - protein, 911 aa, Arabidopsis thaliana
  peptide (1)..(911): Ceres Seq. ID no. 13607041
MPVVSLAKVVTSPAVAGDLAVRVPFIYGKRLVSNRVSFGKLRRRSCIGQCVRSELQSPRVLGSVTDLALDNSVENGHLPKGDSWAVHKFGGTCVGNSERIKDVAAVVVKDDSERKLVVVSAMSKVTDMMYDLIHRAESRDDSYLSALSGVLEKHRATAVDLLDGDELSSFLARLNDDINNLKAMLRAIYIAGHATESFSDFVVGHGELWSAQMLAAVVRKSGLDCTWMDARDVLVVIPTSSNQVDPDFVESEKRLEKWFTQNSAKIIIATGFIASTPQNIPTTLKRDGSDFSAAIMSALFRSHQLTIWTDVDGVYSADPRKVSEAVVLKTLSYQEAWEMSYFGANVLHPRTIIPVMKYDIPIVIRNIFNLSAPGTMICRQIDDEDGFKLDAPVKGFATIDNLALVNVEGTGMAGVPGTASAIFSAVKEVGANVIMISQASSEHSVCFAVPEKEVKAVSEALNSRFRQALAGGRLSQIEIIPNCSILAAVGQKMASTPGVSATFFNALAKANINIRAIAQGCSEFNITVVVKREDCIRALRAVHSRFYLSRTTLAVGIIGPGLIGGTLLDQIRDQAAVLKEEFKIDLRVIGITGSSKMLMSESGIDLSRWRELMKEEGEKADMEKFTQYVKGNHFIPNSVMVDCTADADIASCYYDWLLRGIHVVTPNKKANSGPLDQYLKIRDLQRKSYTHYFYEATVGAGLPIISTLRGLLETGDKILRIEGIFSGTLSYLFNNFVGTRSFSEVVAEAKQAGFTEPDPRDDLSGTDVARKVTILARESGLKLDLEGLPVQNLVPKPLQACASAEEFMEKLPQFDEELSKQREEAEAAGEVLRYVGVVDAVEKKGTVELKRYKKDHPFAQLSGADNIIAFTTKRYKEQPLIVRGPGAGAQVTAGGIFSDILRLAFYLGAPS

SEQ ID NO: 101135 - protein, 790 aa, Arabidopsis thaliana
  peptide (1)..(790): Ceres Seq. ID no. 13607042
MSKVTDMMYDLIHRAESRDDSYLSALSGVLEKHRATAVDLLDGDELSSFLARLNDDINNLKAMLRAIYIAGHATESFSDFVVGHGELWSAQMLAAVVRKSGLDCTWMDARDVLVVIPTSSNQVDPDFVESEKRLEKWFTQNSAKIIIATGFIASTPQNIPTTLKRDGSDFSAAIMSALFRSHQLTIWTDVDGVYSADPRKVSEAVVLKTLSYQEAWEMSYFGANVLHPRTIIPVMKYDIPIVIRNIFNLSAPGTMICRQIDDEDGFKLDAPVKGFATIDNLALVNVEGTGMAGVPGTASAIFSAVKEVGANVIMISQASSEHSVCFAVPEKEVKAVSEALNSRFRQALAGGRLSQIEIIPNCSILAAVGQKMASTPGVSATFFNALAKANINIRAIAQGCSEFNITVVVKREDCIRALRAVHSRFYLSRTTLAVGIIGPGLIGGTLLDQIRDQAAVLKEEFKIDLRVIGITGSSKMLMSESGIDLSRWRELMKEEGEKADMEKFTQYVKGNHFIPNSVMVDCTADADIASCYYDWLLRGIHVVTPNKKANSGPLDQYLKIRDLQRKSYTHYFYEATVGAGLPIISTLRGLLETGDKILRIEGIFSGTLSYLFNNFVGTRSFSEVVAEAKQAGFTEPDPRDDLSGTDVARKVTILARESGLKLDLEGLPVQNLVPKPLQACASAEEFMEKLPQFDEELSKQREEAEAAGEVLRYVGVVDAVEKKGTVELKRYKKDHPFAQLSGADNIIAFTTKRYKEQPLIVRGPGAGAQVTAGGIFSDILRLAFYLGAPS

SEQ ID NO: 101136 - protein, 784 aa, Arabidopsis thaliana
  peptide (1)..(784): Ceres Seq. ID no. 13607043
MMYDLIHRAESRDDSYLSALSGVLEKHRATAVDLLDGDELSSFLARLNDDINNLKAMLRAIYIAGHATESFSDFVVGHGELWSAQMLAAVVRKSGLDCTWMDARDVLVVIPTSSNQVDPDFVESEKRLEKWFTQNSAKIIIATGFIASTPQNIPTTLKRDGSDFSAAIMSALFRSHQLTIWTDVDGVYSADPRKVSEAVVLKTLSYQEAWEMSYFGANVLHPRTIIPVMKYDIPIVIRNIFNLSAPGTMICRQIDDEDGFKLDAPVKGFATIDNLALVNVEGTGMAGVPGTASAIFSAVKEVGANVIMISQASSEHSVCFAVPEKEVKAVSEALNSRFRQALAGGRLSQIEIIPNCSILAAVGQKMASTPGVSATFFNALAKANINIRAIAQGCSEFNITVVVKREDCIRALRAVHSRFYLSRTTLAVGIIGPGLIGGTLLDQIRDQAAVLKEEFKIDLRVIGITGSSKMLMSESGIDLSRWRELMKEEGEKADMEKFTQYVKGNHFIPNSVMVDCTADADIASCYYDWLLRGIHVVTPNKKANSGPLDQYLKIRDLQRKSYTHYFYEATVGAGLPIISTLRGLLETGDKILRIEGIFSGTLSYLFNNFVGTRSFSEVVAEAKQAGFTEPDPRDDLSGTDVARKVTILARESGLKLDLEGLPVQNLVPKPLQACASAEEFMEKLPQFDEELSKQREEAEAAGEVLRYVGVVDAVEKKGTVELKRYKKDHPFAQLSGADNIIAFTTKRYKEQPLIVRGPGAGAQVTAGGIFSDILRLAFYLGAPS

SEQ ID NO: 101137 - DNA, 1870 bp, Arabidopsis thaliana
  misc_feature (1)..(1870): Ceres Seq. ID no. 13607048
  misc_feature (1)..(1870): Ortholog of  Ceres SEQ ID NO 13592768 as cited in SEQ ID NO 20317
  misc_feature (1)..(1870): Ortholog of  Ceres SEQ ID NO 14303656 as cited in SEQ ID NO 61363
ccacgcgtccgactttctccactaattcattccattgtcgttacctttttgtttctcagactgttaccttacctgtaaagaagagagttaaagatctattgcaaaaaaactcaacctttaatctctctgcttcttctaattaagtaatttcaactacccttttggcgaaacctctcgatctattggtttggtactgaagaaaccgacttgagtctgatttgtttttggtgaaagccatggaagctataagaaagcaagctgcgaagctcagagagcaagtcgcgaggcaacagcaagcggttttgaagcatttagggcatgttaatgctgatgctgttgttgttgatgaagaagagcttcattgtcatcagaaacttcaagatctttatagctctactaaagctgctaagcgtttgcaaaggaacattgttcgtggactcgaaggtttcattgcgactggcacaaaggttgttgagatagggttgaagtttgctgaagatttcaagaaatatggagatgagaatcctgatgctaatactcctctatcaagagtcgcacatcactttgggacctcttacaagtcggtggaaggcgagagggaaactctcctcggagttcttagtgagcaggtttgtgagccaattcgtacaatgatatatagtgcgcctttggaggatgctcggcatttggtgaatcactatgacaggctgagacaagaagtcgaagctcaggcaactgatgtactgaggagaagatcaaagttgaaggaatctgatatttctgaagaagcctacataaaacttaagaattctgaatcgagattggctgagctcaaatcaagtatgaaaactcttggtaaagaagctactaaggccatgttggaagtcgacgatcagcagcagaacgtaacttctcagcgcctccgtgctctggttgaagctgaaagatcatatcatcgtaatgctcttgatatcctcgacaagctacattccgagatgattgctgaggaagaagctataggatcatcaccaaagtcactacctttacatatagaggatagtgcttctcttccccaacaagaaccgaattcaaattcctcaggagagatcaaatcaaatcccttgggaaagatcaaagcaagtcgtcgagaagaaatcaagtctaatccccaagaagtaaccaaacctagtcccaaggacgaaatgaagtccagtccacaagaagaaaccaaatccaatcatcagaaagaaattaagtctagtccacaggaagagatcaagaagtccaatgggtctgatgatcatcacaatcatcaacttctcagccagaatgattcctactttcttgcaaaggttgtgcacccgtttgatgctcaagccccaggggaactcagtctcgctgtcgatgattatgtaattgtgcgacaggtggctggtacaggctggtcagaaggagaatacaaaggcaaagctggatggtttccgtctgcgtacgtagagaaacaagagaaagctccggcaagcaagatcgtggaatcaaactccaagcaacagtgatgccctttctttaacatatacataccaaaaagtatgtgtaagatatgattgtgtttctcttccttcttacctatcatcgtaagtaaagatatgttttcgacgagtaaatatgatcttgtaagagtaatgatttgtgtgttttcttccttttttcttatgtatcaacatgagtctaactctagactcttgaatcatttctttacgcagttgtgagaatcctgttttatcttttgttagatacaatcctctgtttcttctgtaatttactctgataatgataatgatcttttctttttcagtaaaatttgattttt

SEQ ID NO: 101138 - protein, 439 aa, Arabidopsis thaliana
  peptide (1)..(439): Ceres Seq. ID no. 13607049
MEAIRKQAAKLREQVARQQQAVLKHLGHVNADAVVVDEEELHCHQKLQDLYSSTKAAKRLQRNIVRGLEGFIATGTKVVEIGLKFAEDFKKYGDENPDANTPLSRVAHHFGTSYKSVEGERETLLGVLSEQVCEPIRTMIYSAPLEDARHLVNHYDRLRQEVEAQATDVLRRRSKLKESDISEEAYIKLKNSESRLAELKSSMKTLGKEATKAMLEVDDQQQNVTSQRLRALVEAERSYHRNALDILDKLHSEMIAEEEAIGSSPKSLPLHIEDSASLPQQEPNSNSSGEIKSNPLGKIKASRREEIKSNPQEVTKPSPKDEMKSSPQEETKSNHQKEIKSSPQEEIKKSNGSDDHHNHQLLSQNDSYFLAKVVHPFDAQAPGELSLAVDDYVIVRQVAGTGWSEGEYKGKAGWFPSAYVEKQEKAPASKIVESNSKQQ

SEQ ID NO: 101139 - protein, 301 aa, Arabidopsis thaliana
  peptide (1)..(301): Ceres Seq. ID no. 13607050
MIYSAPLEDARHLVNHYDRLRQEVEAQATDVLRRRSKLKESDISEEAYIKLKNSESRLAELKSSMKTLGKEATKAMLEVDDQQQNVTSQRLRALVEAERSYHRNALDILDKLHSEMIAEEEAIGSSPKSLPLHIEDSASLPQQEPNSNSSGEIKSNPLGKIKASRREEIKSNPQEVTKPSPKDEMKSSPQEETKSNHQKEIKSSPQEEIKKSNGSDDHHNHQLLSQNDSYFLAKVVHPFDAQAPGELSLAVDDYVIVRQVAGTGWSEGEYKGKAGWFPSAYVEKQEKAPASKIVESNSKQQ

SEQ ID NO: 101140 - protein, 237 aa, Arabidopsis thaliana
  peptide (1)..(237): Ceres Seq. ID no. 13607051
MKTLGKEATKAMLEVDDQQQNVTSQRLRALVEAERSYHRNALDILDKLHSEMIAEEEAIGSSPKSLPLHIEDSASLPQQEPNSNSSGEIKSNPLGKIKASRREEIKSNPQEVTKPSPKDEMKSSPQEETKSNHQKEIKSSPQEEIKKSNGSDDHHNHQLLSQNDSYFLAKVVHPFDAQAPGELSLAVDDYVIVRQVAGTGWSEGEYKGKAGWFPSAYVEKQEKAPASKIVESNSKQQ

SEQ ID NO: 101141 - DNA, 592 bp, Arabidopsis thaliana
  misc_feature (1)..(592): Ceres Seq. ID no. 13607052
  misc_feature (1)..(592): Ortholog of  Ceres SEQ ID NO 14302474 as cited in SEQ ID NO 60589
aatttcacatctttctcacccaaatctactcttaaccgttcttcttcttctacagacatcaatttctctcgagataaactaaatcttcgctgaaaaaatgtcgggtcgtggaaagggaggaaaaggtttgggtaagggaggagccaagcgtcacaggaaggttctgagagacaacatccaaggaatcaccaagcctgcgattcgaagattggctcgtagaggtggagtcaagcgtatcagtggtctcatctacgaggagactcgtggcgtcctcaagatctttctcgagaacgtgattcgtgatgctgtcacttacaccgagcacgctaggaggaagactgtgaccgccatggatgttgtctacgctctcaagaggcaaggaaggactctttacggattcggtggttaattagagtttttcagatccgcgtttgtgttttctgggtttctcacttaagcgtctgcgttttacttttgtattgggtttggcgtttagtagtttgcggtagcgttcttgttatgtgtaattacgctttttcttcttgcttcagcagtttcggttgaaatataaatcgaatcaagtttcacttta

SEQ ID NO: 101142 - protein, 103 aa, Arabidopsis thaliana; identical to SEQ ID NO: 7737
  peptide (1)..(103): Ceres Seq. ID no. 13607053

SEQ ID NO: 101143 - DNA, 769 bp, Arabidopsis thaliana
  misc_feature (1)..(769): Ceres Seq. ID no. 13607058
  misc_feature (1)..(769): Ortholog of  Ceres SEQ ID NO 13495070 as cited in SEQ ID NO 53216
  misc_feature (1)..(769): Ortholog of  Ceres SEQ ID NO 12598241 as cited in SEQ ID NO 61025
  misc_feature (1)..(769): Ortholog of  Ceres SEQ ID NO 13661333 as cited in SEQ ID NO 61620
  misc_feature (1)..(769): Ortholog of  Ceres SEQ ID NO 15173749 as cited in SEQ ID NO 61775
  misc_feature (1)..(769): Ortholog of  Ceres SEQ ID NO 13596812 as cited in SEQ ID NO 62283
  misc_feature (1)..(769): Ortholog of  Ceres SEQ ID NO 13623021 as cited in SEQ ID NO 0
  misc_feature (1)..(769): Ortholog of  Ceres SEQ ID NO 14302179 as cited in SEQ ID NO 0
aaatatggcaacaacgtgacagcatctaagtcttcttggttttaagacgtgaccagcctaacgacccaaccaaactacttgtctattcttcctcccaccctctaaaacccccctaccttctctactttcagatcatcaagccccaatttcaagcagagaacaatggctaattcagcgtctgggatgcacgttagcgatgagtgcaagctcaagttcttggagttaaaagcaaagaggaactataggttcattgtgttcaaaattgatgagaaggctcagcaagttatgatagacaagcttgggaatccagaagaaacttacgaagatttcaccagatctattcccgaggatgagtgccgatatgctgtctatgactatgatttcaccacccctgagaactgccagaagagcaaaatctttttcatcgcatggtcacctgatacatcaagagtgaggagtaagatgttgtatgcaagctcaaaggacaggttcaagagggaattggatgggattcaagttgaattgcaagcaacagatcctagcgagatgagcctcgacatcatcaagggacgagtcaatctctgaatggaacttaccgcatcttaattcgtttcagtcaaaattcatattttctgctttcgttttcttgggtatttttcatttaacttctttactatttgtatcttctgtgattcaagatctcacctctttcttttttccttttcggtacgcaataatcatcccaatagataattactttgcttccctg

SEQ ID NO: 101144 - protein, 140 aa, Arabidopsis thaliana; identical to SEQ ID NO: 25767
  peptide (1)..(140): Ceres Seq. ID no. 13607059

SEQ ID NO: 101145 - protein, 133 aa, Arabidopsis thaliana; identical to SEQ ID NO: 25768
  peptide (1)..(133): Ceres Seq. ID no. 13607060

SEQ ID NO: 101146 - protein, 99 aa, Arabidopsis thaliana; identical to SEQ ID NO: 25769
  peptide (1)..(99): Ceres Seq. ID no. 13607061

SEQ ID NO: 101147 - DNA, 1289 bp, Arabidopsis thaliana
  misc_feature (1)..(1289): Ceres Seq. ID no. 13607082
  misc_feature (1)..(1289): Ortholog of  Ceres SEQ ID NO 15171508 as cited in SEQ ID NO 58526
  misc_feature (1)..(1289): Ortholog of  Ceres SEQ ID NO 13654989 as cited in SEQ ID NO 63117
  misc_feature (1)..(1289): Ortholog of  Ceres SEQ ID NO 13584744 as cited in SEQ ID NO 69137
gaacaatcttctgtttctttggaagcaactaactacaaaggacatcttcacgactacaaagacacatacccttctgtcttaaggacgagaccagaagcttcttctatcggctttgtaatggtctacaaaggataagaaaaaaccaaatccaaactaaagctatgcattttccacttgtttcggcttggaacaagagaaggagaagcaaatcatatgatacggatccatgtacgttccttttctccatcatcttcgccagatggcataaaagggtctacagaacagcagaatgctggcaaatcgaagatcaggcttctcagccaaggaagcgaagattcgggacatcagtttataccctcaaggagatggaggaggccacaagttctttcagtgatgagaatctcctcggtaaaggaggctttggccgagtttaccaaggcactttaaaaacaggagaggttgttgcaatcaagaagatggatttacctacgtttaaaaaggctgacggagaaagagaatttcgtgtggaggtggatatcttgagcagactcgaccacccaaatctggtctctttgatcggctattgtgcagatgggaaacaccggttcctagtatatgaatatatgcaaaatggaaacctgcaagatcatttgaatggaatcaaagaagcaaaaataagctggccaataaggctcagaattgcactaggagcagcaaaaggactcgcgtatctccattcaagttcttctgttgggattccaattgttcacagagacttcaaatccaccaacgttctactagactccaattataatgcaaagatatccgactttggactagcaaagttgatgccagaaggaaaggatacttgtgtcacagcaagagttctaggaacattcggctatttcgacccagaatatacatcgacaggtaaacttactctacaaagcgacatttatgcatttggggttgtgctgctagaactacttactggacgcagagcagttgacttaactcagggcccaaatgaacagaacctggtgctacaggttaggaatatactgaatgatagaaagaaattgcgtaaggttatagatgtcgagctgcctcggaattcatacagcatggaagctataaccatgtttgctgatctagcatcacggtgcatccgtatagagagtaaagagcgaccttcagtgatggattgtgttaaggaactgcaactaattatctacacaaactcgaagggtggtttgggtgggacgattcctacattcagaaggctctag

SEQ ID NO: 101148 - protein, 375 aa, Arabidopsis thaliana
  peptide (1)..(375): Ceres Seq. ID no. 13607083
MHFPLVSAWNKRRRSKSYDTDPCTFLFSIIFARWHKRVYRTAECWQIEDQASQPRKRRFGTSVYTLKEMEEATSSFSDENLLGKGGFGRVYQGTLKTGEVVAIKKMDLPTFKKADGEREFRVEVDILSRLDHPNLVSLIGYCADGKHRFLVYEYMQNGNLQDHLNGIKEAKISWPIRLRIALGAAKGLAYLHSSSSVGIPIVHRDFKSTNVLLDSNYNAKISDFGLAKLMPEGKDTCVTARVLGTFGYFDPEYTSTGKLTLQSDIYAFGVVLLELLTGRRAVDLTQGPNEQNLVLQVRNILNDRKKLRKVIDVELPRNSYSMEAITMFADLASRCIRIESKERPSVMDCVKELQLIIYTNSKGGLGGTIPTFRRL

SEQ ID NO: 101149 - protein, 307 aa, Arabidopsis thaliana; identical to SEQ ID NO: 49872
  peptide (1)..(307): Ceres Seq. ID no. 13607084

SEQ ID NO: 101150 - protein, 270 aa, Arabidopsis thaliana; identical to SEQ ID NO: 49873
  peptide (1)..(270): Ceres Seq. ID no. 13607085

SEQ ID NO: 101151 - DNA, 1667 bp, Arabidopsis thaliana
  misc_feature (1)..(1667): Ceres Seq. ID no. 13607130
  misc_feature (1)..(1667): Ortholog of  Ceres SEQ ID NO 15171856 as cited in SEQ ID NO 55120
gttgtaattctcttcttcaaaaatcaaatcagagagagagagaaacataaacaaatggctaatcttcgtttaatgatcactttaatcacggttttaatgatcaccaaatcatcaaacggtattaaaattgatttacctaaatcccttaacctcaccctctctaccgatccttccatcatctccgcagcctctcatgacttcggaaacataaccaccgtgacccccggcggcgtaatctgcccctcctccaccgctgatatctctcgtctcctccaatacgccgcaaacggaaaaagtacattccaagtagcggctcgtggccaaggccactccttaaacggccaagcctcggtctccggcggagtaatcgtcaacatgacgtgtatcactgacgtggtggtttcaaaagacaagaagtacgctgacgtggcggccgggacgttatgggtggatgtgcttaagaagacggcggagaaaggggtgtcgccggtttcttggacggattatttgcatataaccgtcggaggaacgttgtcgaatggtggaattggtggtcaagtgtttcgaaacggtcctcttgttagtaacgtccttgaattggacgttattactgggaaaggtgaaatgttgacatgctcgcgacagctaaacccagaattgttctatggagtgttaggaggtttgggtcaatttggaattataacgagagccagaattgttttggaccatgcacctaaacgggccaaatggtttcggatgctctacagtgatttcacaacttttacaaaggaccaagaacgtttgatatcaatggcaaacgatattggagtcgactatttagaaggtcaaatatttctatcaaacggtgtcgttgacacctcttttttcccaccttcagatcaatctaaagtcgctgatctagtcaagcaacacggtatcatctatgttcttgaagtagccaagtattatgatgatcccaatctccccatcatcagcaaggttattgacacattaacgaaaacattaagttacttgcccgggttcatatcaatgcacgacgtggcctacttcgatttcttgaaccgtgtacatgtcgaagaaaataaactcagatctttgggattatgggaacttcctcatccttggcttaacctctacgttcctaaatctcggattctcgattttcataacggtgttgtcaaagacattcttcttaagcaaaaatcagcttcgggactcgctcttctctatccaacaaaccggaataaatgggacaatcgtatgtcggcgatgataccagagatcgatgaagatgttatatatattatcggactactacaatccgctaccccaaaggatcttccagaagtggagagcgttaacgagaagataattaggttttgcaaggattcaggtattaagattaagcaatatctaatgcattatactagtaaagaagattggattgagcattttggatcaaaatgggatgatttttcgaagaggaaagatctatttgatcccaagaaactgttatctccagggcaagacatcttttgattaacttaatgtgatatgtcatttgtgaggtctaatatctaaaactataatatagttactatataataatagcattttggtggaagtaaaattgatcaataacattt

SEQ ID NO: 101152 - protein, 519 aa, Arabidopsis thaliana
  peptide (1)..(519): Ceres Seq. ID no. 13607131
VVILFFKNQIREREKHKQMANLRLMITLITVLMITKSSNGIKIDLPKSLNLTLSTDPSIISAASHDFGNITTVTPGGVICPSSTADISRLLQYAANGKSTFQVAARGQGHSLNGQASVSGGVIVNMTCITDVVVSKDKKYADVAAGTLWVDVLKKTAEKGVSPVSWTDYLHITVGGTLSNGGIGGQVFRNGPLVSNVLELDVITGKGEMLTCSRQLNPELFYGVLGGLGQFGIITRARIVLDHAPKRAKWFRMLYSDFTTFTKDQERLISMANDIGVDYLEGQIFLSNGVVDTSFFPPSDQSKVADLVKQHGIIYVLEVAKYYDDPNLPIISKVIDTLTKTLSYLPGFISMHDVAYFDFLNRVHVEENKLRSLGLWELPHPWLNLYVPKSRILDFHNGVVKDILLKQKSASGLALLYPTNRNKWDNRMSAMIPEIDEDVIYIIGLLQSATPKDLPEVESVNEKIIRFCKDSGIKIKQYLMHYTSKEDWIEHFGSKWDDFSKRKDLFDPKKLLSPGQDIF

SEQ ID NO: 101153 - protein, 501 aa, Arabidopsis thaliana
  peptide (1)..(501): Ceres Seq. ID no. 13607132
MANLRLMITLITVLMITKSSNGIKIDLPKSLNLTLSTDPSIISAASHDFGNITTVTPGGVICPSSTADISRLLQYAANGKSTFQVAARGQGHSLNGQASVSGGVIVNMTCITDVVVSKDKKYADVAAGTLWVDVLKKTAEKGVSPVSWTDYLHITVGGTLSNGGIGGQVFRNGPLVSNVLELDVITGKGEMLTCSRQLNPELFYGVLGGLGQFGIITRARIVLDHAPKRAKWFRMLYSDFTTFTKDQERLISMANDIGVDYLEGQIFLSNGVVDTSFFPPSDQSKVADLVKQHGIIYVLEVAKYYDDPNLPIISKVIDTLTKTLSYLPGFISMHDVAYFDFLNRVHVEENKLRSLGLWELPHPWLNLYVPKSRILDFHNGVVKDILLKQKSASGLALLYPTNRNKWDNRMSAMIPEIDEDVIYIIGLLQSATPKDLPEVESVNEKIIRFCKDSGIKIKQYLMHYTSKEDWIEHFGSKWDDFSKRKDLFDPKKLLSPGQDIF

SEQ ID NO: 101154 - protein, 495 aa, Arabidopsis thaliana
  peptide (1)..(495): Ceres Seq. ID no. 13607133
MITLITVLMITKSSNGIKIDLPKSLNLTLSTDPSIISAASHDFGNITTVTPGGVICPSSTADISRLLQYAANGKSTFQVAARGQGHSLNGQASVSGGVIVNMTCITDVVVSKDKKYADVAAGTLWVDVLKKTAEKGVSPVSWTDYLHITVGGTLSNGGIGGQVFRNGPLVSNVLELDVITGKGEMLTCSRQLNPELFYGVLGGLGQFGIITRARIVLDHAPKRAKWFRMLYSDFTTFTKDQERLISMANDIGVDYLEGQIFLSNGVVDTSFFPPSDQSKVADLVKQHGIIYVLEVAKYYDDPNLPIISKVIDTLTKTLSYLPGFISMHDVAYFDFLNRVHVEENKLRSLGLWELPHPWLNLYVPKSRILDFHNGVVKDILLKQKSASGLALLYPTNRNKWDNRMSAMIPEIDEDVIYIIGLLQSATPKDLPEVESVNEKIIRFCKDSGIKIKQYLMHYTSKEDWIEHFGSKWDDFSKRKDLFDPKKLLSPGQDIF

SEQ ID NO: 101155 - DNA, 1916 bp, Arabidopsis thaliana
  misc_feature (1)..(1916): Ceres Seq. ID no. 13607150
  misc_feature (1)..(1916): Ortholog of  Ceres SEQ ID NO 15172020 as cited in SEQ ID NO 59739
tgtggactcaaagctattttaagtacaacacacgtggagaaagcagatacattgtctcgtaacagaaaacaaactcaagaatggacccaatcttagagttctaacaatcttaatctcatgtctcttgatgatccccaaagcaaatccagatcaatgtgtgttccagagtttaacagcaacaacaacacgacgaccttcgcacagattttagtaatctcatccattggcttactcttagcccttgcactgcacttccgtctaaggaagctacgtcactccaagaacatccctcgtctcagatcgtctcaaaaacacaaaggccatgagaagcttgagagattctctcactatgttgtgcggcagatgggattcaaggacaggagagaatgtcctcatctctgcaaattagctaatgagtacataagaaaatcaggcagctgtgaggaagacatatacagcttcttctctgaagagcctggtgctgattctctcttcattaagctcgttgaagagtttgagagatgtattcttagttactttgcttaccactggagccatgcggatctcatgatcagtcagatactcagtgccgatgtagagcctaagaagaagctaaagcacattgtcatggcggctacaagggaacagaggtttgagagggtgactaaaaatctaaaagtggcaagagtgtttaacacattggtagaggaaatgaaagcaatggggatcgcatctgttgatgactcagagtgtacagaagttatggctccagttgcacacaaggaccgaagcccggttctacttcttatgggaggtggtatgggtgcaggaaagagcactgtgcttaaagacattctcaaagaaccgttttgggcaggagctgatgctgtggtgattgaagccgatgcttttaaagaatctgatgtgatatacagagctttaagcgccagaggtcatgttgatatgatcaagactgctgaattcgttcaccaatcatcaacagacgcagcatcatcgctgctcgttacagctctcaacgaagggcgagacgtgataatggatggaacactctcttgggtaccatttgtggttcagaccataacaatggcgaggaatgtgcatcgccatcgttacagaatgggagctggctacaaggttggtgagaatggagatgttatagagaactattgggaacgcataggcgaaaggcaacagcttcaagaagatggaagggagagaaagccatacaggatagagttagttggagttgtatgtgatgcatatttagcagtgattcgaggaattaggagagctataatgtgtagaagagcagttagagtgaggtctcagctgagatctcacaagaggtttgcgaatgcgtttcttacctattgcaacttagttgacaatgctagactttactgcaccaatgctcttgaaggttctccaaagctgatagggtggaaagagaaggaaaagacattgctagtggatccagaggagatagactgtttgaagaatgtagggaggttaaacgagaatgcagattctatttacgagctatacagaaatccaaatcctgcttgtgaagctggatcaatatggaaagacattgttctttctccttctaggttcaacattcaacaagagctcaaatactcaattcagaaagtggaaagattcaaacagtatctccaagaaacaccaagatgagagatgaagatagataaacgcagaagatctcttagctttttttttcccggtatgtcattcatttatgtaactcctaaaacatcaaacaaaattgaatctctctagtaaagagagaattggcaacacctaacctaagagatagttacattgtcaagcttggtcttaagagatgtttaaggaagcaaatgtatgacatgattcag

SEQ ID NO: 101156 - protein, 531 aa, Arabidopsis thaliana
  peptide (1)..(531): Ceres Seq. ID no. 13607151
MSLDDPQSKSRSMCVPEFNSNNNTTTFAQILVISSIGLLLALALHFRLRKLRHSKNIPRLRSSQKHKGHEKLERFSHYVVRQMGFKDRRECPHLCKLANEYIRKSGSCEEDIYSFFSEEPGADSLFIKLVEEFERCILSYFAYHWSHADLMISQILSADVEPKKKLKHIVMAATREQRFERVTKNLKVARVFNTLVEEMKAMGIASVDDSECTEVMAPVAHKDRSPVLLLMGGGMGAGKSTVLKDILKEPFWAGADAVVIEADAFKESDVIYRALSARGHVDMIKTAEFVHQSSTDAASSLLVTALNEGRDVIMDGTLSWVPFVVQTITMARNVHRHRYRMGAGYKVGENGDVIENYWERIGERQQLQEDGRERKPYRIELVGVVCDAYLAVIRGIRRAIMCRRAVRVRSQLRSHKRFANAFLTYCNLVDNARLYCTNALEGSPKLIGWKEKEKTLLVDPEEIDCLKNVGRLNENADSIYELYRNPNPACEAGSIWKDIVLSPSRFNIQQELKYSIQKVERFKQYLQETPR

SEQ ID NO: 101157 - protein, 519 aa, Arabidopsis thaliana
  peptide (1)..(519): Ceres Seq. ID no. 13607152
MCVPEFNSNNNTTTFAQILVISSIGLLLALALHFRLRKLRHSKNIPRLRSSQKHKGHEKLERFSHYVVRQMGFKDRRECPHLCKLANEYIRKSGSCEEDIYSFFSEEPGADSLFIKLVEEFERCILSYFAYHWSHADLMISQILSADVEPKKKLKHIVMAATREQRFERVTKNLKVARVFNTLVEEMKAMGIASVDDSECTEVMAPVAHKDRSPVLLLMGGGMGAGKSTVLKDILKEPFWAGADAVVIEADAFKESDVIYRALSARGHVDMIKTAEFVHQSSTDAASSLLVTALNEGRDVIMDGTLSWVPFVVQTITMARNVHRHRYRMGAGYKVGENGDVIENYWERIGERQQLQEDGRERKPYRIELVGVVCDAYLAVIRGIRRAIMCRRAVRVRSQLRSHKRFANAFLTYCNLVDNARLYCTNALEGSPKLIGWKEKEKTLLVDPEEIDCLKNVGRLNENADSIYELYRNPNPACEAGSIWKDIVLSPSRFNIQQELKYSIQKVERFKQYLQETPR

SEQ ID NO: 101158 - protein, 449 aa, Arabidopsis thaliana
  peptide (1)..(449): Ceres Seq. ID no. 13607153
MGFKDRRECPHLCKLANEYIRKSGSCEEDIYSFFSEEPGADSLFIKLVEEFERCILSYFAYHWSHADLMISQILSADVEPKKKLKHIVMAATREQRFERVTKNLKVARVFNTLVEEMKAMGIASVDDSECTEVMAPVAHKDRSPVLLLMGGGMGAGKSTVLKDILKEPFWAGADAVVIEADAFKESDVIYRALSARGHVDMIKTAEFVHQSSTDAASSLLVTALNEGRDVIMDGTLSWVPFVVQTITMARNVHRHRYRMGAGYKVGENGDVIENYWERIGERQQLQEDGRERKPYRIELVGVVCDAYLAVIRGIRRAIMCRRAVRVRSQLRSHKRFANAFLTYCNLVDNARLYCTNALEGSPKLIGWKEKEKTLLVDPEEIDCLKNVGRLNENADSIYELYRNPNPACEAGSIWKDIVLSPSRFNIQQELKYSIQKVERFKQYLQETPR

SEQ ID NO: 101159 - DNA, 994 bp, Arabidopsis thaliana
  misc_feature (1)..(994): Ceres Seq. ID no. 13607158
  misc_feature (1)..(994): Ortholog of  Ceres SEQ ID NO 15176306 as cited in SEQ ID NO 52784
  misc_feature (1)..(994): Ortholog of  Ceres SEQ ID NO 13582624 as cited in SEQ ID NO 56287
  misc_feature (1)..(994): Ortholog of  Ceres SEQ ID NO 13597264 as cited in SEQ ID NO 63897
  misc_feature (1)..(994): Ortholog of  Ceres SEQ ID NO 13598570 as cited in SEQ ID NO 65434
  misc_feature (1)..(994): Ortholog of  Ceres SEQ ID NO 13656452 as cited in SEQ ID NO 65745
  misc_feature (1)..(994): Ortholog of  Ceres SEQ ID NO 13596238 as cited in SEQ ID NO 68834
tggcggtctgcatcacagacacaaaaacaatggctaaacccacatcacgaaatgaccgatttgcccttttcttcataaccctaattttcctgatcctaaccgtttccaaaccggtcgcctctcaaaactgtggctgcgcctctgacttctgttgcagcaaatatggctactgtggtacgaccgatgagttctgcggcgagggctgccaggcaggaccttgccggagcagtggaggcggtggagatcctgctgtttcactagaaggaacggtgacacctgacttctttaactctatactaaaccaaagaggtgattgtcctggcaaaggattctacactcacgacaccttcatggccgcagctaattcttaccctagcttcggtgcttccatctccaaacgcgaaatcgcggcgtttttcgctcacgtagcccaagaaacagggttcatgtgttacattgaggaaattgatggaccagccaaggccgcatccggagagtactgcgacacagagaaaccagagttcccatgtgcacaaggaaagggctactatggccgtggtgcaatccagctctcttggaactacaactacggtctctgtggcaaagccttggacgagaacttattggcttcaccagagaaagttgctcaagaccaggttcttgccttcaagaccgctttctggttctggaccactaatgttcgcacgagttttaaatcgggctttggcgcaacaatcagggcagtgaatagtagggagtgtagcggaggagattctacagccaaagccgccaacaggattaagtatttccaagactattgtggcaagcttggagttgcacctggagataacctcacttgttaaagtttccttgctatccatccgaaacacaactagtgtttgaaaaacttagagatcacataagagaaagtatcatattagtataataatgttgtaatacttcacattttaccaaaaataataataataatgtt

SEQ ID NO: 101160 - protein, 286 aa, Arabidopsis thaliana
  peptide (1)..(286): Ceres Seq. ID no. 13607159
AVCITDTKTMAKPTSRNDRFALFFITLIFLILTVSKPVASQNCGCASDFCCSKYGYCGTTDEFCGEGCQAGPCRSSGGGGDPAVSLEGTVTPDFFNSILNQRGDCPGKGFYTHDTFMAAANSYPSFGASISKREIAAFFAHVAQETGFMCYIEEIDGPAKAASGEYCDTEKPEFPCAQGKGYYGRGAIQLSWNYNYGLCGKALDENLLASPEKVAQDQVLAFKTAFWFWTTNVRTSFKSGFGATIRAVNSRECSGGDSTAKAANRIKYFQDYCGKLGVAPGDNLTC

SEQ ID NO: 101161 - protein, 277 aa, Arabidopsis thaliana
  peptide (1)..(277): Ceres Seq. ID no. 13607160
MAKPTSRNDRFALFFITLIFLILTVSKPVASQNCGCASDFCCSKYGYCGTTDEFCGEGCQAGPCRSSGGGGDPAVSLEGTVTPDFFNSILNQRGDCPGKGFYTHDTFMAAANSYPSFGASISKREIAAFFAHVAQETGFMCYIEEIDGPAKAASGEYCDTEKPEFPCAQGKGYYGRGAIQLSWNYNYGLCGKALDENLLASPEKVAQDQVLAFKTAFWFWTTNVRTSFKSGFGATIRAVNSRECSGGDSTAKAANRIKYFQDYCGKLGVAPGDNLTC

SEQ ID NO: 101162 - protein, 170 aa, Arabidopsis thaliana
  peptide (1)..(170): Ceres Seq. ID no. 13607161
MAAANSYPSFGASISKREIAAFFAHVAQETGFMCYIEEIDGPAKAASGEYCDTEKPEFPCAQGKGYYGRGAIQLSWNYNYGLCGKALDENLLASPEKVAQDQVLAFKTAFWFWTTNVRTSFKSGFGATIRAVNSRECSGGDSTAKAANRIKYFQDYCGKLGVAPGDNLTC

SEQ ID NO: 101163 - DNA, 803 bp, Arabidopsis thaliana
  misc_feature (1)..(803): Ceres Seq. ID no. 13607162
  misc_feature (1)..(803): Ortholog of  Ceres SEQ ID NO 13639712 as cited in SEQ ID NO 56301
agccctaccaaactctcaaaggttagaatttgctatcggatcatctgctaagcttggtttactcttcctagaacatcgattgtatcgaggtttactattggatcaaagatgtctgcagaggagaagaaccttatagagatcttggaggaaggtcacaaagtcgatgttgttaagtacattgattatgtcagtgcccctcaagctggtgctattgcgacattctcaggcactacaagagacatgttcgagggcaagacagtgttggagttaaggtatgaagcatatgtgccaatggccacacgatgcctcagctcgatctgtacaactgctagatcaacttgggatatccacaagattgctgttgctcaccgtcttggaccagttcctgttggagaaactagcgtgctcattgcggtctcatctgttcaccgtgcagatggtttagatgcttgcaagttcttgatcgacgagttgaaggcatcggttccgatatggaagaaagaggtttacactaatggagagatttggaaggagaattctgagtttatggagaaaagattggagcttgcagagaaaagagacagcattgtaaaaaaaactgtggttgaagaacatagaagaagaggttgctgtggaagcaaagttagagtagaagaagatgaagagcataaagatattacaggagataacaaatcttcttcttgatcacttgtagcagtaacactgtttcgctttttactttcaatagacaaactttcttaagcacattgttgaatctaaagacttatatgcgttagttggtt

SEQ ID NO: 101164 - protein, 198 aa, Arabidopsis thaliana
  peptide (1)..(198): Ceres Seq. ID no. 13607163
MSAEEKNLIEILEEGHKVDVVKYIDYVSAPQAGAIATFSGTTRDMFEGKTVLELRYEAYVPMATRCLSSICTTARSTWDIHKIAVAHRLGPVPVGETSVLIAVSSVHRADGLDACKFLIDELKASVPIWKKEVYTNGEIWKENSEFMEKRLELAEKRDSIVKKTVVEEHRRRGCCGSKVRVEEDEEHKDITGDNKSSS

SEQ ID NO: 101165 - protein, 154 aa, Arabidopsis thaliana
  peptide (1)..(154): Ceres Seq. ID no. 13607164
MFEGKTVLELRYEAYVPMATRCLSSICTTARSTWDIHKIAVAHRLGPVPVGETSVLIAVSSVHRADGLDACKFLIDELKASVPIWKKEVYTNGEIWKENSEFMEKRLELAEKRDSIVKKTVVEEHRRRGCCGSKVRVEEDEEHKDITGDNKSSS

SEQ ID NO: 101166 - protein, 137 aa, Arabidopsis thaliana
  peptide (1)..(137): Ceres Seq. ID no. 13607165
MATRCLSSICTTARSTWDIHKIAVAHRLGPVPVGETSVLIAVSSVHRADGLDACKFLIDELKASVPIWKKEVYTNGEIWKENSEFMEKRLELAEKRDSIVKKTVVEEHRRRGCCGSKVRVEEDEEHKDITGDNKSSS

SEQ ID NO: 101167 - DNA, 1585 bp, Arabidopsis thaliana
  misc_feature (1)..(1585): Ceres Seq. ID no. 13607170
  misc_feature (1)..(1585): Ortholog of  Ceres SEQ ID NO 14314449 as cited in SEQ ID NO 52409
  misc_feature (1)..(1585): Ortholog of  Ceres SEQ ID NO 15177818 as cited in SEQ ID NO 59762
aatttatgttttctctcacttttctccgatcgtagctcagctattttccggcgatcttcttccgattcttcaacccggagcttttgctcaactattttccggcgatcttcttccgattcttgctgtcgcacttcaacccgaagcttttgacgatcaacaatgtcagatccaaaactgaagccagtggaggatgcactagttactgttgccaagagctcacaaattcaattagccaaggatgatacttcaggtggaaccatagttggaaggttactgcagtgccagtattcaaagacccataagttctgggagactcaacctgttgagcagtttaaagatatccaggacacgagtttgcctgaaggcccaattgagcccgcaactttggtgtctgaggtcaagcaagagccgtacaaccttcttggtcaattcgaatggaccatatgcgatatgaactctgacgatatgtgtttagagatgtacaactttctcaaggaaaacagtcctgatgacaacagatcaagtatgagtactccaaagagtatctaaggtgggcactgtgtccacctggttattaccagagctggcatattggagtccgcgtcaagacctccaagaaactcattgctttcatctgtggcaggccaacaagaatcagggtgcgtgatgaggttgttaaaatggcgaaggtcaattccttgtgtgttcacaagaagctcaggtctaagggacttgctcctctcatgatcaaggagttgactagaagggttaagttgcagaatatatggcaagcggcttatacctcaagtcatatactttctagaccagttaccaccagtcgagactgggtcagaatgttgaacccgaagaagctaatcgatgttgggttaacaaggcttcgtgacagaatgacaatgagcaggaccgtcaaactctacaagttaccagatgcaccgatcactcctggatttagggaaatggagcgacgtgatgtccctgctgttacagcgttgctcaggaactaccttagccagtttgcagttgcgactgactttgatgacaacgatgtcaagcactggcttctcccaagggaaaatattgtctacagttacgtagtagtaagccctgaaactcatgatgtcactgacttctgcagcttctgcaattcctctataactatccccggtaaccggaaatacacgaccctggaatgtgcttatgcttgctgcaatgtagcgacactgacctcgttatcccagctggtgaatgatgccctaatagtctctaagcaaaaaggtttcgatgtgttttatgcctcggatgtgatgcagaatgagagtttcttgaaagagttgaggttttatccactatgtcgacagtcgcactactatctctacaattaccgtttgagaaatgcattgaagccatcagaacttgggcttattctttagttttgttaaaaccactgttcccgctccccaatgtgaacaaactatgatcattaaaccaatgtgtagcctaagattcctcttcctggatatcatttgcaagtattataaacaaaagtttaaagcctttttatctt

SEQ ID NO: 101168 - protein, 256 aa, Arabidopsis thaliana
  peptide (1)..(256): Ceres Seq. ID no. 13607171
MAKVNSLCVHKKLRSKGLAPLMIKELTRRVKLQNIWQAAYTSSHILSRPVTTSRDWVRMLNPKKLIDVGLTRLRDRMTMSRTVKLYKLPDAPITPGFREMERRDVPAVTALLRNYLSQFAVATDFDDNDVKHWLLPRENIVYSYVVVSPETHDVTDFCSFCNSSITIPGNRKYTTLECAYACCNVATLTSLSQLVNDALIVSKQKGFDVFYASDVMQNESFLKELRFYPLCRQSHYYLYNYRLRNALKPSELGLIL

SEQ ID NO: 101169 - protein, 235 aa, Arabidopsis thaliana
  peptide (1)..(235): Ceres Seq. ID no. 13607172
MIKELTRRVKLQNIWQAAYTSSHILSRPVTTSRDWVRMLNPKKLIDVGLTRLRDRMTMSRTVKLYKLPDAPITPGFREMERRDVPAVTALLRNYLSQFAVATDFDDNDVKHWLLPRENIVYSYVVVSPETHDVTDFCSFCNSSITIPGNRKYTTLECAYACCNVATLTSLSQLVNDALIVSKQKGFDVFYASDVMQNESFLKELRFYPLCRQSHYYLYNYRLRNALKPSELGLIL

SEQ ID NO: 101170 - protein, 198 aa, Arabidopsis thaliana
  peptide (1)..(198): Ceres Seq. ID no. 13607173
MLNPKKLIDVGLTRLRDRMTMSRTVKLYKLPDAPITPGFREMERRDVPAVTALLRNYLSQFAVATDFDDNDVKHWLLPRENIVYSYVVVSPETHDVTDFCSFCNSSITIPGNRKYTTLECAYACCNVATLTSLSQLVNDALIVSKQKGFDVFYASDVMQNESFLKELRFYPLCRQSHYYLYNYRLRNALKPSELGLIL

SEQ ID NO: 101171 - DNA, 742 bp, Arabidopsis thaliana
  misc_feature (1)..(742): Ceres Seq. ID no. 13607200
  misc_feature (1)..(742): Ortholog of  Ceres SEQ ID NO 13583509 as cited in SEQ ID NO 62253
tacacacacacacaaaacaacaatcgctctctacaatggcggaaaggttctctagcggcgaggcccaatattggcccaattatggtagcaccgccaccaccaccgttagcaacagccccatctcgtcgtttttccatcagctccgatcccattcaccaacatcctcgcagctctttggtttcctcgctctctttatctccactggcatcctcctcttcctccttggtgtaagcgtcaccgctgccgtgctcggcttcattgtctttcttccattgatcatcatctcgagtccgatatggattcccgtttttgtcgtcgttggcgggttcttaacggtctccggatttcttgtcggaacggtggctttagtgtcgtggacgtaccgctatttccggggaatgcacccggttggatcgaatcagatggattatgcacgtagtaggatctatgacacggcatctcacgtcaaagattacgctagagaatacggtggttacttccatggcagggctaaagatgcggcccctggtgcttgacctgaaccggttggtatagtctggttcagggtagtattaaccgatcacggttcgatttatggaggaggaacacggttcatggtaatattacattttcttattttgtttccgtttatactttataagatgaagaagaatatctatctagttatgtgtaatgtaagctttgtgtccgtcgcttgaaatgtaatatttcattttgtttt

SEQ ID NO: 101172 - protein, 177 aa, Arabidopsis thaliana
  peptide (1)..(177): Ceres Seq. ID no. 13607201
HTHTKQQSLSTMAERFSSGEAQYWPNYGSTATTTVSNSPISSFFHQLRSHSPTSSQLFGFLALFISTGILLFLLGVSVTAAVLGFIVFLPLIIISSPIWIPVFVVVGGFLTVSGFLVGTVALVSWTYRYFRGMHPVGSNQMDYARSRIYDTASHVKDYAREYGGYFHGRAKDAAPGA

SEQ ID NO: 101173 - protein, 166 aa, Arabidopsis thaliana
  peptide (1)..(166): Ceres Seq. ID no. 13607202
MAERFSSGEAQYWPNYGSTATTTVSNSPISSFFHQLRSHSPTSSQLFGFLALFISTGILLFLLGVSVTAAVLGFIVFLPLIIISSPIWIPVFVVVGGFLTVSGFLVGTVALVSWTYRYFRGMHPVGSNQMDYARSRIYDTASHVKDYAREYGGYFHGRAKDAAPGA

SEQ ID NO: 101174 - DNA, 1656 bp, Arabidopsis thaliana
  misc_feature (1)..(1656): Ceres Seq. ID no. 13607207
  misc_feature (1)..(1656): Ortholog of  Ceres SEQ ID NO 13502874 as cited in SEQ ID NO 66298
  misc_feature (1)..(1656): Ortholog of  Ceres SEQ ID NO 12614124 as cited in SEQ ID NO 68392
atggcagcgtttatcagcgttgactttcagaactgtttcatcttcattctcctatgcttcttctccctcctctgttattctctcttcttcaagaaaccaaaggactcacgaggctgtgatctacctcccagccctccgtctcttccgattatcggtcatcttcaccttctcctctcttctctatcccacaagtctttacagaaaatctcctctaagtatggacctctcctccatctccggatctttaatgtccccatcatcctcgtttcatcggcttcagttgcagacgaggtcttcaggatccacgacatgaacatctcctctcgcggtgctgctgcgatcgatgagtccctcgtgtttggatcttctggtgtcgtctacgctccctatggagattacttgaagttcgtgaagaagatcattgccactaagctgcttcgacctcaggtgttggagcggtcacgaggtcttcgtgctgaagagctacaacgactttacaacagaattcttgataaggcgaagatgaatgagaacgttgagatcggtaaggaagcgacgatgctcatgaacaacatcttctgtaggatgagcatgggaaggagtttctcagaggagaatggtgaggcagagagagtcagaggcttggtggctgaatcatatgccttggcgaagaagattttcttcgcatctgtactgcgcagactgcttaagaagcttcggatcccactattcaagaaggatatcatggatgtttccaacagattcaatgagctgctagagaagattcttgtggaacacaatgagaaactggacgaggaacataaagacacggatatgatggacgtgttgttggcagcttatgcagatgaaaacgctgagtataagattactaggaatcatatcaagtcatttttcgtggagcttttcgtgggaggcactgatacctcggtgcaaacaacacaatggacaatggccgagatcattaataactctgacgttcttgagaggctgagagaagaaattgactctgttgtagggacatcaagaatgattcaagaaacagatataccaaaccttccttatttgcaagcggtggttaaggaaggactaagattgcacccaccatttcctctcttgacgaggaagtttgaagaaaggtgtgagatcaaagggttctacatcccggagaagacatttcttattataaatgcttacgcttggatgagagatcctgattcctgggaagatcctaatgagtttaagccggagaggtttttaggttcttcaagattaggacaagtagacgagagagaggaagctcagaagtacattcctttcggcggaggaaggagaggctgtcctggagcaaatctagcttctattttcgtaggaaccgcgattggagtgatggtgcagtgctttgactggggaatcaaaggagataagatcaacatggaagagacttttgaaggactgacccttaccatggttcatccaattaagtgcactccgattcctcgaacactgccttttgtaacttctaatctccagagtcctagctcttgacacctaactcaggaacctgtaagaagtttgctttcttcatgtttgttgtattgaaagtctaacattcagatcaaagaaactttatattcc

SEQ ID NO: 101175 - protein, 521 aa, Arabidopsis thaliana
  peptide (1)..(521): Ceres Seq. ID no. 13607208
MAAFISVDFQNCFIFILLCFFSLLCYSLFFKKPKDSRGCDLPPSPPSLPIIGHLHLLLSSLSHKSLQKISSKYGPLLHLRIFNVPIILVSSASVADEVFRIHDMNISSRGAAAIDESLVFGSSGVVYAPYGDYLKFVKKIIATKLLRPQVLERSRGLRAEELQRLYNRILDKAKMNENVEIGKEATMLMNNIFCRMSMGRSFSEENGEAERVRGLVAESYALAKKIFFASVLRRLLKKLRIPLFKKDIMDVSNRFNELLEKILVEHNEKLDEEHKDTDMMDVLLAAYADENAEYKITRNHIKSFFVELFVGGTDTSVQTTQWTMAEIINNSDVLERLREEIDSVVGTSRMIQETDIPNLPYLQAVVKEGLRLHPPFPLLTRKFEERCEIKGFYIPEKTFLIINAYAWMRDPDSWEDPNEFKPERFLGSSRLGQVDEREEAQKYIPFGGGRRGCPGANLASIFVGTAIGVMVQCFDWGIKGDKINMEETFEGLTLTMVHPIKCTPIPRTLPFVTSNLQSPSS

SEQ ID NO: 101176 - protein, 418 aa, Arabidopsis thaliana
  peptide (1)..(418): Ceres Seq. ID no. 13607209
MNISSRGAAAIDESLVFGSSGVVYAPYGDYLKFVKKIIATKLLRPQVLERSRGLRAEELQRLYNRILDKAKMNENVEIGKEATMLMNNIFCRMSMGRSFSEENGEAERVRGLVAESYALAKKIFFASVLRRLLKKLRIPLFKKDIMDVSNRFNELLEKILVEHNEKLDEEHKDTDMMDVLLAAYADENAEYKITRNHIKSFFVELFVGGTDTSVQTTQWTMAEIINNSDVLERLREEIDSVVGTSRMIQETDIPNLPYLQAVVKEGLRLHPPFPLLTRKFEERCEIKGFYIPEKTFLIINAYAWMRDPDSWEDPNEFKPERFLGSSRLGQVDEREEAQKYIPFGGGRRGCPGANLASIFVGTAIGVMVQCFDWGIKGDKINMEETFEGLTLTMVHPIKCTPIPRTLPFVTSNLQSPSS

SEQ ID NO: 101177 - protein, 347 aa, Arabidopsis thaliana
  peptide (1)..(347): Ceres Seq. ID no. 13607210
MNENVEIGKEATMLMNNIFCRMSMGRSFSEENGEAERVRGLVAESYALAKKIFFASVLRRLLKKLRIPLFKKDIMDVSNRFNELLEKILVEHNEKLDEEHKDTDMMDVLLAAYADENAEYKITRNHIKSFFVELFVGGTDTSVQTTQWTMAEIINNSDVLERLREEIDSVVGTSRMIQETDIPNLPYLQAVVKEGLRLHPPFPLLTRKFEERCEIKGFYIPEKTFLIINAYAWMRDPDSWEDPNEFKPERFLGSSRLGQVDEREEAQKYIPFGGGRRGCPGANLASIFVGTAIGVMVQCFDWGIKGDKINMEETFEGLTLTMVHPIKCTPIPRTLPFVTSNLQSPSS

SEQ ID NO: 101178 - DNA, 1067 bp, Arabidopsis thaliana
  misc_feature (1)..(1067): Ceres Seq. ID no. 13607215
  misc_feature (1)..(1067): Ortholog of  Ceres SEQ ID NO 15172974 as cited in SEQ ID NO 67643
cacgagaacacatccttccctctcctcctcctccttcccccaaaaaacctggagaaccatgcagttgcaatttcctctttaacccatttcaaagattcgtttttttttttttgtaaatctctttctcctttggcgaattcgtattccttcttttccaatgagttctagagacagaggatcaccttcttcttcttcgtcatcttcttcgttaccaggaatagaaaagtataatgaaaaggtgaagaatcagatacaagctcttgttcgtgttattaaagttgctcgtacctatagagacgacaatgtcccttcccttattgaacagggtctttatcttggatctgttgcagcagctagtaataagaatgttttgaaatcttacaatgttacacatattttgactgttgctagttcgttgagaccagctcatcctgatgactttgtttacaaggttgttcgagtcgtggataaggaagatacaaatctagaaatgtacttcgatgagtgtgttgatttcattgatgaagccaagagacaaggcggtagtgttcttgttcattgctttgttggcaaatcacggagtgtcactatagttgttgcttacctcatgaagaaacacggtatgactttagctcaagcattgcaacatgttaaaagcaaaagacccgtggcaagtcctaatgctggtttcatcagacaattacaagacctcgagaagtctatgcaagtgagtgaccagtttttttccttttgaggatgaaaagcaagtggttgtggaggagaagacagttccatgtaaatatctcttacatgcatcttccttcttctctataaaacagggaagcaagttacgattgcacaatgtcaggcgtgaagatcattgatcgtaccattgggagaaacttgtaaatctcacacgaagcatcaatcaaaatgttttgttgtttcttctccttaacaactcgaataataacatggaaacgaatttggaatatgttcatgttctctattcgttttgtatagtttcatcatcatggatataaaagtgaacataaataaaaatttgt

SEQ ID NO: 101179 - protein, 198 aa, Arabidopsis thaliana
  peptide (1)..(198): Ceres Seq. ID no. 13607216
MSSRDRGSPSSSSSSSSLPGIEKYNEKVKNQIQALVRVIKVARTYRDDNVPSLIEQGLYLGSVAAASNKNVLKSYNVTHILTVASSLRPAHPDDFVYKVVRVVDKEDTNLEMYFDECVDFIDEAKRQGGSVLVHCFVGKSRSVTIVVAYLMKKHGMTLAQALQHVKSKRPVASPNAGFIRQLQDLEKSMQVSDQFFSF

SEQ ID NO: 101180 - DNA, 973 bp, Arabidopsis thaliana
  misc_feature (1)..(973): Ceres Seq. ID no. 13607217
  misc_feature (1)..(973): Ortholog of  Ceres SEQ ID NO 13656486 as cited in SEQ ID NO 69202
aactgagagagatcagagaaagagagatttgtaataatcaaatcatggggaagagaagaggtgtctccgccgtgaacgttgttttcgggtggctgcgacaacaatcgaacaaggttaaaatagctttaggaattatcatctctttgatcctcgtcgttcttctgaaattcaccgttaggaatcacaatcactttttcatcgcctccgagctcatccacgccgccggaatcttgatcctcatctacaaactcactcgccaaaagacttgctccggtctttctttaaaatctcaagaagtgacagcaatatttctagcggtgagattgatatgcagcataaacatggaaggtgatatccatacagttctcgatttcgccaccttggtttcgactctatgggtcatttatatgattcgatacaagctgaaagcatcttatataaagtctctcgacacttgctacaattactatgtgcttgtaccatctgctatccttgcgttgattattaacccgagtacgagttattcttacttccaccgtatattgtgggcgttttgcgtctacacagaatctgtctctgttctacctcaacttcgattaatgcaaaatgctcagatcatagagcctttcacagctcattatgtgtttgcactcggaatagctagattcctggcatgcgctcattggattatccaggtcgttgagactcgtggacattacctatggctactcggggctggttacttctggtttccggtggctctactagccgagatcgttcaaactttcatcctcgccgacttttgctactactatgtcaaaagtgttatggagggtcagcttgtactgaagatgccggtttaagatcatctagtataaaatgaaccaataaattttgcttgttttatctttcaacttaaactacaacttttaaccaaagtagattgctcaaaataatctagaatggtttcttt

SEQ ID NO: 101181 - protein, 286 aa, Arabidopsis thaliana
  peptide (1)..(286): Ceres Seq. ID no. 13607218
LREIREREICNNQIMGKRRGVSAVNVVFGWLRQQSNKVKIALGIIISLILVVLLKFTVRNHNHFFIASELIHAAGILILIYKLTRQKTCSGLSLKSQEVTAIFLAVRLICSINMEGDIHTVLDFATLVSTLWVIYMIRYKLKASYIKSLDTCYNYYVLVPSAILALIINPSTSYSYFHRILWAFCVYTESVSVLPQLRLMQNAQIIEPFTAHYVFALGIARFLACAHWIIQVVETRGHYLWLLGAGYFWFPVALLAEIVQTFILADFCYYYVKSVMEGQLVLKMPV

SEQ ID NO: 101182 - protein, 272 aa, Arabidopsis thaliana
  peptide (1)..(272): Ceres Seq. ID no. 13607219
MGKRRGVSAVNVVFGWLRQQSNKVKIALGIIISLILVVLLKFTVRNHNHFFIASELIHAAGILILIYKLTRQKTCSGLSLKSQEVTAIFLAVRLICSINMEGDIHTVLDFATLVSTLWVIYMIRYKLKASYIKSLDTCYNYYVLVPSAILALIINPSTSYSYFHRILWAFCVYTESVSVLPQLRLMQNAQIIEPFTAHYVFALGIARFLACAHWIIQVVETRGHYLWLLGAGYFWFPVALLAEIVQTFILADFCYYYVKSVMEGQLVLKMPV

SEQ ID NO: 101183 - protein, 173 aa, Arabidopsis thaliana
  peptide (1)..(173): Ceres Seq. ID no. 13607220
MEGDIHTVLDFATLVSTLWVIYMIRYKLKASYIKSLDTCYNYYVLVPSAILALIINPSTSYSYFHRILWAFCVYTESVSVLPQLRLMQNAQIIEPFTAHYVFALGIARFLACAHWIIQVVETRGHYLWLLGAGYFWFPVALLAEIVQTFILADFCYYYVKSVMEGQLVLKMPV

SEQ ID NO: 101184 - DNA, 1120 bp, Arabidopsis thaliana
  misc_feature (1)..(1120): Ceres Seq. ID no. 13607221
  misc_feature (1)..(1120): Ortholog of  Ceres SEQ ID NO 14308107 as cited in SEQ ID NO 59030
  misc_feature (1)..(1120): Ortholog of  Ceres SEQ ID NO 15226612 as cited in SEQ ID NO 62700
tgcttattcaccagggaaaaatgttgcagaagatttctcagtctatttctttatgtaacggcgatcaatttaagccgttaatatacctcgccggagctccgacgaacttcatctcttcccctctctcaggcaagaagaaatcatcttctctgagaattaaaaggatacaacaacttcaaagtacattagaagatagaataaatccaccactagtatgtggaacagtatcgccacgtcttagtgttcctgatcatatactaaagcctctatatgttgagtctagcaaagttccagagatatcaagtgaattacagattcctgactctataggcattgtgaaaatgaagaaagcgtgtgagctcgcggctcgtgtattagactatgcaggaactttggttagaccgtttgttactacagatgaaattgataaagcagtgcatcagatggttattgagtttggtgcatatccttcacctcttggatatggtggatttcctaaaagtgtttgtacatcggttaatgaatgtatgtttcacgggattcccgattctcgtccgctacagaatggagatattataaacatcgatgttgcggtttacttggatgggtatcatggagatacgtcaaagactttcttatgtggagacgtcaatggaagccttaaacaacttgtcaaggtcacagaagaatgcttggagaaaggtatatcggtttgtaaagatggagcaagcttcaaacaaatcgggaagataatcagtgagcatgctgcaaagtatggctataatatggagcgattcatcggtcatggtgtaggaacggtattacactcggaacctcttatatatcttcatagtaactatgattatgaacttgaatatatgattgaaggtcaaacttttacgctcgaaccaattctcaccattggaacaacagagtttgtaacatggcctgacaaatggacaattgtgaccgcagatggtggtccggccgcacagtttgagcatacaattcttattaccaccactggtgcagaaattctcaccatatcatcatgaattatatcacaatgttacggaatttacattatgaaccatccatttctgttgtaaataaaagaaaa

SEQ ID NO: 101185 - protein, 350 aa, Arabidopsis thaliana
  peptide (1)..(350): Ceres Seq. ID no. 13607222
LIHQGKMLQKISQSISLCNGDQFKPLIYLAGAPTNFISSPLSGKKKSSSLRIKRIQQLQSTLEDRINPPLVCGTVSPRLSVPDHILKPLYVESSKVPEISSELQIPDSIGIVKMKKACELAARVLDYAGTLVRPFVTTDEIDKAVHQMVIEFGAYPSPLGYGGFPKSVCTSVNECMFHGIPDSRPLQNGDIINIDVAVYLDGYHGDTSKTFLCGDVNGSLKQLVKVTEECLEKGISVCKDGASFKQIGKIISEHAAKYGYNMERFIGHGVGTVLHSEPLIYLHSNYDYELEYMIEGQTFTLEPILTIGTTEFVTWPDKWTIVTADGGPAAQFEHTILITTTGAEILTISS

SEQ ID NO: 101186 - protein, 344 aa, Arabidopsis thaliana
  peptide (1)..(344): Ceres Seq. ID no. 13607223
MLQKISQSISLCNGDQFKPLIYLAGAPTNFISSPLSGKKKSSSLRIKRIQQLQSTLEDRINPPLVCGTVSPRLSVPDHILKPLYVESSKVPEISSELQIPDSIGIVKMKKACELAARVLDYAGTLVRPFVTTDEIDKAVHQMVIEFGAYPSPLGYGGFPKSVCTSVNECMFHGIPDSRPLQNGDIINIDVAVYLDGYHGDTSKTFLCGDVNGSLKQLVKVTEECLEKGISVCKDGASFKQIGKIISEHAAKYGYNMERFIGHGVGTVLHSEPLIYLHSNYDYELEYMIEGQTFTLEPILTIGTTEFVTWPDKWTIVTADGGPAAQFEHTILITTTGAEILTISS

SEQ ID NO: 101187 - protein, 237 aa, Arabidopsis thaliana; identical to SEQ ID NO: 73797
  peptide (1)..(237): Ceres Seq. ID no. 13607224

SEQ ID NO: 101188 - DNA, 1292 bp, Arabidopsis thaliana
  misc_feature (1)..(1292): Ceres Seq. ID no. 13607237
  misc_feature (1)..(1292): Ortholog of  Ceres SEQ ID NO 12364737 as cited in SEQ ID NO 51089
  misc_feature (1)..(1292): Ortholog of  Ceres SEQ ID NO 14306553 as cited in SEQ ID NO 53121
  misc_feature (1)..(1292): Ortholog of  Ceres SEQ ID NO 13595567 as cited in SEQ ID NO 56760
  misc_feature (1)..(1292): Ortholog of  Ceres SEQ ID NO 13655302 as cited in SEQ ID NO 63307
  misc_feature (1)..(1292): Ortholog of  Ceres SEQ ID NO 13597389 as cited in SEQ ID NO 63426
  misc_feature (1)..(1292): Ortholog of  Ceres SEQ ID NO 13597380 as cited in SEQ ID NO 64054
  misc_feature (1)..(1292): Ortholog of  Ceres SEQ ID NO 12625474 as cited in SEQ ID NO 64169
  misc_feature (1)..(1292): Ortholog of  Ceres SEQ ID NO 13597502 as cited in SEQ ID NO 64681
  misc_feature (1)..(1292): Ortholog of  Ceres SEQ ID NO 15180805 as cited in SEQ ID NO 0
aaaaaaatcaattttcagaaaccatttcgtgacaatgaagaaatctattttctttgtcccagttttggtattattcttctttggatcaagattttctagagtagctagcgcaggagaccaaagagccttagccgcttcattcgtcttcggcgattcgctagtagacgcaggaaataacaactacttacaaacgttgtctagagccaacagtcctcctaatggcatcgatttcaaaccatctcgtggaaatccaaccggccggtttactaatggccgtaccatagctgacatcgttggagaaaagttagggcagcaaagttatgcagttccatatttagcaccaaatgcaagtggtgaagcactattaaatggtgtgaactatgcatcaggtggtggtggaattctcaatgctacaggaagtgtatttgtgaatcggttaggaatggacatacaagttgattactttaccaatacaaggaagcagtttgataagcttttgggtcaagataaagctagagattacattagaaagagatccttattttctgtagttatcggttcaaacgattttctcaacaattacctagtcccttttgtcgcggctcaagcaagactaacacaaactcctgaaactttcgtcgatgacatgattagccacctccgcaaccagctcaagagattatatgatatggacgctcggaaatttgtggtgggaaatgtggctcctattggatgtataccataccagaaatcgatcaatcaattgaacgataaacagtgtgttgatttagcaaacaaactggctattcaatacaatgctcgtctcaaagatctcttgacggtggaattgaaagatagtctcaaagacgcacacttcgtttatgccaacgtttatgatttattcatggacctcattgtcaacttcaaagactacgggtttaggacggcaagtgaggcgtgttgcgaaacgagagggagattggcggggatattgccatgtggaccaacgtcgagcctttgtacggaccggtcaaagcatgtgttctgggacgcgtaccatcctaccgaagccgctaatcttcttattgctgacaaattactttacggagactccaaattcgtcactccctttaacctcctccaccttcgtgacctttgagattataataacctttcactaaaaaaattgtaatttctacttttggtggcttagagtggttagcgttaaaaatcatatatgtagtagatttgttctctttttttatatatatattattgtagatttggagttt

SEQ ID NO: 101189 - protein, 385 aa, Arabidopsis thaliana
  peptide (1)..(385): Ceres Seq. ID no. 13607238
KKSIFRNHFVTMKKSIFFVPVLVLFFFGSRFSRVASAGDQRALAASFVFGDSLVDAGNNNYLQTLSRANSPPNGIDFKPSRGNPTGRFTNGRTIADIVGEKLGQQSYAVPYLAPNASGEALLNGVNYASGGGGILNATGSVFVNRLGMDIQVDYFTNTRKQFDKLLGQDKARDYIRKRSLFSVVIGSNDFLNNYLVPFVAAQARLTQTPETFVDDMISHLRNQLKRLYDMDARKFVVGNVAPIGCIPYQKSINQLNDKQCVDLANKLAIQYNARLKDLLTVELKDSLKDAHFVYANVYDLFMDLIVNFKDYGFRTASEACCETRGRLAGILPCGPTSSLCTDRSKHVFWDAYHPTEAANLLIADKLLYGDSKFVTPFNLLHLRDL

SEQ ID NO: 101190 - protein, 374 aa, Arabidopsis thaliana
  peptide (1)..(374): Ceres Seq. ID no. 13607239
MKKSIFFVPVLVLFFFGSRFSRVASAGDQRALAASFVFGDSLVDAGNNNYLQTLSRANSPPNGIDFKPSRGNPTGRFTNGRTIADIVGEKLGQQSYAVPYLAPNASGEALLNGVNYASGGGGILNATGSVFVNRLGMDIQVDYFTNTRKQFDKLLGQDKARDYIRKRSLFSVVIGSNDFLNNYLVPFVAAQARLTQTPETFVDDMISHLRNQLKRLYDMDARKFVVGNVAPIGCIPYQKSINQLNDKQCVDLANKLAIQYNARLKDLLTVELKDSLKDAHFVYANVYDLFMDLIVNFKDYGFRTASEACCETRGRLAGILPCGPTSSLCTDRSKHVFWDAYHPTEAANLLIADKLLYGDSKFVTPFNLLHLRDL

SEQ ID NO: 101191 - protein, 238 aa, Arabidopsis thaliana
  peptide (1)..(238): Ceres Seq. ID no. 13607240
MDIQVDYFTNTRKQFDKLLGQDKARDYIRKRSLFSVVIGSNDFLNNYLVPFVAAQARLTQTPETFVDDMISHLRNQLKRLYDMDARKFVVGNVAPIGCIPYQKSINQLNDKQCVDLANKLAIQYNARLKDLLTVELKDSLKDAHFVYANVYDLFMDLIVNFKDYGFRTASEACCETRGRLAGILPCGPTSSLCTDRSKHVFWDAYHPTEAANLLIADKLLYGDSKFVTPFNLLHLRDL

SEQ ID NO: 101192 - DNA, 2016 bp, Arabidopsis thaliana
  misc_feature (1)..(2016): Ceres Seq. ID no. 13607246
  misc_feature (1)..(2016): Ortholog of  Ceres SEQ ID NO 14303109 as cited in SEQ ID NO 66330
tcatcaagatcacctctccaatcattcattctacacacagctgtttttgattcatctacaaatttctgattttttttctagggttcttgtttttccccccaaattgacttgttctcctctctgtttaggtttgtgtctctttaatggtgtgtgaaaggtgaaagctttaagcttttgtgtgtgttttaacaacaatggcggagatcaagaatgctaaagtagaacaaaggcaaacgaagattaggaatgttccagtagctgtaactcctgaaggtttctggtgttgtccttctcctgttgcgtttcaaaagactcttaaatctcacaactctctcaccaaacacaagcaatcttctcctgctcttcaacctcctaagccggagaagaaaccatcttcgactactattagatccgtcattgcttctgatgaaactcaacagaatttgggtagttttgatactgttcatagtattgctgttcctgcgacggttcaagagagaccacagaggcaaaaggttgagactttaccgaggaaagttgctattgagtttggtgaaccgggaagtagtgatgctaaagtgattttggttgggaagcaaggtttttgtgtgaagcttagtgttcataagaaagttttggttgatcatagttgtttctttgctaagaaactagctgagaaagattcggtttttgcttgtcttgagattgagagctgtgaagatgctgagctttacgttgagactattggacttatgtattgtaaagatatgaagcaacgacttatgaaacaaaatgttagcagagttcttcgtgtcctcaaggttgcagagcttcttggttttagttcatgtatacagtcttgtttggattacttagaagctgtgccttgggttggggaagaagaagaggagaaagttatctcatcgattcttagattaaaaactgaaggagttggtgtcacgcctgttctcaaacgagttgcttctaatgctgtggatccaccaaaggagacgctatcacgcatcattgagcttgttttaagaagcaaagaggagaaaagtcgacgtgagatgaaatctattgttctgaagcttcttagagaacagaatggagccaatgtagctgataacttcaatgatacaatctattcctcttgccaaacctgcttggattcggttctgtctctgtttaaacaagcttctgagggagagaaacctgagactgataccaaacagattgctgtagaagcagataacctcacgtggctccttgatgtgttagcggaaagacaagctgcagaggaattctcagtcacatgggcaaaccaaaaggagctcgctttgttacatgagaagcttcctttaatgtctcgttaccatataagccgtgtaacatctcggctctttatagggattgggagaggagaattgttgccttcaaaggacactcgacttctgctactaacaacatggttgcaaccgttgttcaatgactataactggcttcaacatggttgcagatcgtttgatggtaaactagtggaggaaggaattggtcggacgatactgacactaccattggaagatcagcagagcattttactgtcgtggctcgggagttttctaaacggaggagatggatgtccgaatcttcagagagcttttgaggtttggtggagacgatctttcattagaccttactcagatcgtcaagctaatggttcgtgtcaaacagattcaacttcaaaagaggagtgacttaaagaaagctgagtaatctttgttagattgtacagtgcataatgtagctatgggaatgtgttggtttggtgatcttgatttccggtttggttttgtttggtttggtttggtttagatcgtaccatgtacgagacaatgtcttgcaggttttttagtggtcgatttttttcttcatgttttgtatttttcagttttcataatgatgatggatgtatatttctgattcgatttttataccattttaaatgtttcagtg

SEQ ID NO: 101193 - protein, 520 aa, Arabidopsis thaliana
  peptide (1)..(520): Ceres Seq. ID no. 13607247
MAEIKNAKVEQRQTKIRNVPVAVTPEGFWCCPSPVAFQKTLKSHNSLTKHKQSSPALQPPKPEKKPSSTTIRSVIASDETQQNLGSFDTVHSIAVPATVQERPQRQKVETLPRKVAIEFGEPGSSDAKVILVGKQGFCVKLSVHKKVLVDHSCFFAKKLAEKDSVFACLEIESCEDAELYVETIGLMYCKDMKQRLMKQNVSRVLRVLKVAELLGFSSCIQSCLDYLEAVPWVGEEEEEKVISSILRLKTEGVGVTPVLKRVASNAVDPPKETLSRIIELVLRSKEEKSRREMKSIVLKLLREQNGANVADNFNDTIYSSCQTCLDSVLSLFKQASEGEKPETDTKQIAVEADNLTWLLDVLAERQAAEEFSVTWANQKELALLHEKLPLMSRYHISRVTSRLFIGIGRGELLPSKDTRLLLLTTWLQPLFNDYNWLQHGCRSFDGKLVEEGIGRTILTLPLEDQQSILLSWLGSFLNGGDGCPNLQRAFEVWWRRSFIRPYSDRQANGSCQTDSTSKEE

SEQ ID NO: 101194 - protein, 334 aa, Arabidopsis thaliana
  peptide (1)..(334): Ceres Seq. ID no. 13607248
MYCKDMKQRLMKQNVSRVLRVLKVAELLGFSSCIQSCLDYLEAVPWVGEEEEEKVISSILRLKTEGVGVTPVLKRVASNAVDPPKETLSRIIELVLRSKEEKSRREMKSIVLKLLREQNGANVADNFNDTIYSSCQTCLDSVLSLFKQASEGEKPETDTKQIAVEADNLTWLLDVLAERQAAEEFSVTWANQKELALLHEKLPLMSRYHISRVTSRLFIGIGRGELLPSKDTRLLLLTTWLQPLFNDYNWLQHGCRSFDGKLVEEGIGRTILTLPLEDQQSILLSWLGSFLNGGDGCPNLQRAFEVWWRRSFIRPYSDRQANGSCQTDSTSKEE

SEQ ID NO: 101195 - protein, 329 aa, Arabidopsis thaliana
  peptide (1)..(329): Ceres Seq. ID no. 13607249
MKQRLMKQNVSRVLRVLKVAELLGFSSCIQSCLDYLEAVPWVGEEEEEKVISSILRLKTEGVGVTPVLKRVASNAVDPPKETLSRIIELVLRSKEEKSRREMKSIVLKLLREQNGANVADNFNDTIYSSCQTCLDSVLSLFKQASEGEKPETDTKQIAVEADNLTWLLDVLAERQAAEEFSVTWANQKELALLHEKLPLMSRYHISRVTSRLFIGIGRGELLPSKDTRLLLLTTWLQPLFNDYNWLQHGCRSFDGKLVEEGIGRTILTLPLEDQQSILLSWLGSFLNGGDGCPNLQRAFEVWWRRSFIRPYSDRQANGSCQTDSTSKEE

SEQ ID NO: 101196 - DNA, 1266 bp, Arabidopsis thaliana
  misc_feature (1)..(1266): Ceres Seq. ID no. 13607258
  misc_feature (1)..(1266): Ortholog of  Ceres SEQ ID NO 15168521 as cited in SEQ ID NO 58180
atgcagcaagggaaccaacatcagctagaatgtgtcacaactgaccagaaccctaataattacttacggcagctctcatcaccaccgacttctcaggttgcaggttcgagtcaagctagagtgaattcaatggtggaacgtgctcggatcgcaaaagtcccattgcctgaagcagctctaaattgccctagatgtgactcaaccaatactaagttctgttacttcaataactatagccttactcaacctcgccatttctgcaaaacatgtcgtcgctattggacacgtggcggttccttgaggaatgttcctgttggaggaggctttaggaggaacaagagaagcaaatccagatcgaaatctacggtcgtggtctcgactgataatactactagtacttcatcacttacttctcgcccaagttactcaaaccctagcaagtttcatagctacggtcaaatcccggagtttaattccaacttgcccatcttgcctcctctccaaagccttggagattacaattcaagcaacactggattagattttggtggaactcaaataagcaacatgataagtggtatgagttctagtggtgggatcttggatgcatggagaatacctccatcacaacaagctcagcaattccctttcttgatcaacactaccggattggtgcaatcttcaaacgcgttatatccattactagaaggcggggttagcgccacgcaaacaagaaatgtgaaggcggaagagaatgatcaggatcggggtagggatggggatggagtgaataacttatcaagaaactttttgggtaatatcaacataaactcaggcaggaacgaggaatacacatcatggggaggtaacagttcttggaccggtttcacctccaacaactcaacaggccatctctcattctaagtactcagcactagctattcttgatgattcttttgttggttggggtgtacattggtgcttgtcatgcgagttattgctgaggaagatcaaaccatgcagctatatccaaaggctaattttgaggctcaaaggaaaggtatggttataaaactatctttttgatcttttaaaagatcttcaaagtgtgagtatgtttattggttggcttctggtgatatttatgttttattagaatttggtcttatatattggctatatatagaggtgtgggtgatatgtatgaattcaagagttgatgttggaaacttttttgtgtgttcattgaataatcatcgaattctc

SEQ ID NO: 101197 - protein, 307 aa, Arabidopsis thaliana
  peptide (1)..(307): Ceres Seq. ID no. 13607259
MQQGNQHQLECVTTDQNPNNYLRQLSSPPTSQVAGSSQARVNSMVERARIAKVPLPEAALNCPRCDSTNTKFCYFNNYSLTQPRHFCKTCRRYWTRGGSLRNVPVGGGFRRNKRSKSRSKSTVVVSTDNTTSTSSLTSRPSYSNPSKFHSYGQIPEFNSNLPILPPLQSLGDYNSSNTGLDFGGTQISNMISGMSSSGGILDAWRIPPSQQAQQFPFLINTTGLVQSSNALYPLLEGGVSATQTRNVKAEENDQDRGRDGDGVNNLSRNFLGNININSGRNEEYTSWGGNSSWTGFTSNNSTGHLSF

SEQ ID NO: 101198 - protein, 264 aa, Arabidopsis thaliana; identical to SEQ ID NO: 76238
  peptide (1)..(264): Ceres Seq. ID no. 13607260

SEQ ID NO: 101199 - DNA, 2686 bp, Arabidopsis thaliana
  misc_feature (1)..(2686): Ceres Seq. ID no. 13607269
  misc_feature (1)..(2686): Ortholog of  Ceres SEQ ID NO 13659971 as cited in SEQ ID NO 67565
  misc_feature (1)..(2686): Ortholog of  Ceres SEQ ID NO 13500385 as cited in SEQ ID NO 67583
gaatcaatcctccaagtttatcttcttcttcaatccaagaagaaagtctacgaaaagtctcctcctttactaatgggttgtttcagcagtaaacaccggaaaactcaaaacgacggcggcggagaaagatcaattccgataattccagttcaaacccatatcgttgatcaagtccccgatcatcgtaaacctcaaatcccatcaccatcgatacccatctcagttcgagatccagagacgattttaggtaaaccattcgaagacatcaggaaattttacagcttggggagagaattaggtcgaggtggtttagggattacgtatatgtgcaaagagattgggactgggaacatttatgcttgcaaatcgattctcaagaggaagctaattagtgagctgggtagagaagatgtgaagacagagattcagatcatgcagcatttgtctggacaaccaaacgttgttgagatcaaaggttcttatgaagacagacattctgtacatttggtaatggaattatgtgccggtggagagttgtttgataggattatagctcaaggtcattactctgagagagctgctgctggtaccattaagtcaattgtggatgttgttcagatttgtcatttgaatggtgtgattcatcgagatctcaagcctgagaatttcttgttctcgagtaaggaggagaatgcaatgcttaaagtaaccgatttcgggttgtccgcgttcatcgaagaaggaaaaatttacaaggatgtggttgggagtccttactacgttgctcctgaagtattaaggcagagttacggaaaagaaatcgacatttggagtgcaggtgttattttatacatcctactctgcggtgtacctcctttttgggccgacaatgaagaaggagtattcgttgaaattctaaaatgcaaaattgattttgtacgtgagccatggccttctatatctgacagcgcgaaagatcttgttgagaagatgctaaccgaagaccctaagagacgaatcactgctgcacaagttcttgaacatccttggatcaaagggggagaagcaccggaaaagcctattgatagcactgtgttatcacgtatgaagcaattccgagcaatgaacaagcttaagaagctagccctaaaggttagcgcggtgagtctatccgaagaagagatcaaaggtcttaaaaccttgtttgcgaatatggataccaatagaagcgggacaatcacttatgaacaactccaaactgggctaagtagacttagatctagactctctgaaactgaagttcagcaactcgttgaagcgtctgatgtggatggtaatggaacaattgactactatgagtttatctctgcgacaatgcatagatacaaattacatcacgatgagcacgtacacaaagcattccaacacttagataaagacaaaaatgggcacataactagggatgagttggaaagtgccatgaaggaatatggaatgggagatgaagctagcatcaaagaagttatatccgaagttgacaccgacaatgatggaaaaataaactttgaggaatttcgtgcgatgatgagatgtggcaccacacaaccaaaagggaaacagtatccattccactgaccaagactacatagatccaacggaaagtaattcttaaacatggaaaactcaaaacgacggtggcaaaagatgaatcaaccaagccatcaacagattttcaacaccgtctacaaacccaatctcagttcgagatatatcaatgggagatatatcgaatggttacaaaactggacaagtatgtgcacaatacagccttcgaattcagtccttctcgcaatgaaagtcaatatcttggagtagatgatgactgagaattggtggacatttttaggctttatctccagtggaaatcatgagagaggttgcgttaggtaaaattgataatatgtcgagacagatagcaatcatgagactttgtgatcacactgcttagaaaggggagataagtgttttagagattagagaaatccagccgttgttcatctttggccttgcagaaataggagttccagtgaacacattcaagcaaaacaatgttcaggaagatggtttatatcttccagtgcttaacaatgcggcttgatgataaagattgccgtttataatcttcttccagagatttacagaaacctagactcaccaagagactcgttggaagataacaattgatgggtcttggcacttacgggtgcgttctgtgcagcaattaatttgagatagatctcaagtcacgctggatactttatggagattgcatataagatgatagatgaatactttatccgaagctttttgtgaatttcgcatctgatttctatgaaatcgatcttctggaatgaggatgatggattcatgaaagttttctaggtaagagatttcaatctctttgcgaattttaaggagattcaggtaaaagagattgatttgaaatgttgttgcattattccatgttctattgactccaaatcgttagtcaattgcctattgagttgtttagggatacattgtagaagaaactaggacacctatgactggctttacatttttggtgctttccattgtgcagcttgcatggtattaaatccctcaagtttgacgagcaccagatgac

SEQ ID NO: 101200 - protein, 544 aa, Arabidopsis thaliana
  peptide (1)..(544): Ceres Seq. ID no. 13607270
ESILQVYLLLQSKKKVYEKSPPLLMGCFSSKHRKTQNDGGGERSIPIIPVQTHIVDQVPDHRKPQIPSPSIPISVRDPETILGKPFEDIRKFYSLGRELGRGGLGITYMCKEIGTGNIYACKSILKRKLISELGREDVKTEIQIMQHLSGQPNVVEIKGSYEDRHSVHLVMELCAGGELFDRIIAQGHYSERAAAGTIKSIVDVVQICHLNGVIHRDLKPENFLFSSKEENAMLKVTDFGLSAFIEEGKIYKDVVGSPYYVAPEVLRQSYGKEIDIWSAGVILYILLCGVPPFWADNEEGVFVEILKCKIDFVREPWPSISDSAKDLVEKMLTEDPKRRITAAQVLEHPWIKGGEAPEKPIDSTVLSRMKQFRAMNKLKKLALKVSAVSLSEEEIKGLKTLFANMDTNRSGTITYEQLQTGLSRLRSRLSETEVQQLVEASDVDGNGTIDYYEFISATMHRYKLHHDEHVHKAFQHLDKDKNGHITRDELESAMKEYGMGDEASIKEVISEVDTDNDGKINFEEFRAMMRCGTTQPKGKQYPFH

SEQ ID NO: 101201 - protein, 520 aa, Arabidopsis thaliana
  peptide (1)..(520): Ceres Seq. ID no. 13607271
MGCFSSKHRKTQNDGGGERSIPIIPVQTHIVDQVPDHRKPQIPSPSIPISVRDPETILGKPFEDIRKFYSLGRELGRGGLGITYMCKEIGTGNIYACKSILKRKLISELGREDVKTEIQIMQHLSGQPNVVEIKGSYEDRHSVHLVMELCAGGELFDRIIAQGHYSERAAAGTIKSIVDVVQICHLNGVIHRDLKPENFLFSSKEENAMLKVTDFGLSAFIEEGKIYKDVVGSPYYVAPEVLRQSYGKEIDIWSAGVILYILLCGVPPFWADNEEGVFVEILKCKIDFVREPWPSISDSAKDLVEKMLTEDPKRRITAAQVLEHPWIKGGEAPEKPIDSTVLSRMKQFRAMNKLKKLALKVSAVSLSEEEIKGLKTLFANMDTNRSGTITYEQLQTGLSRLRSRLSETEVQQLVEASDVDGNGTIDYYEFISATMHRYKLHHDEHVHKAFQHLDKDKNGHITRDELESAMKEYGMGDEASIKEVISEVDTDNDGKINFEEFRAMMRCGTTQPKGKQYPFH

SEQ ID NO: 101202 - protein, 436 aa, Arabidopsis thaliana
  peptide (1)..(436): Ceres Seq. ID no. 13607272
MCKEIGTGNIYACKSILKRKLISELGREDVKTEIQIMQHLSGQPNVVEIKGSYEDRHSVHLVMELCAGGELFDRIIAQGHYSERAAAGTIKSIVDVVQICHLNGVIHRDLKPENFLFSSKEENAMLKVTDFGLSAFIEEGKIYKDVVGSPYYVAPEVLRQSYGKEIDIWSAGVILYILLCGVPPFWADNEEGVFVEILKCKIDFVREPWPSISDSAKDLVEKMLTEDPKRRITAAQVLEHPWIKGGEAPEKPIDSTVLSRMKQFRAMNKLKKLALKVSAVSLSEEEIKGLKTLFANMDTNRSGTITYEQLQTGLSRLRSRLSETEVQQLVEASDVDGNGTIDYYEFISATMHRYKLHHDEHVHKAFQHLDKDKNGHITRDELESAMKEYGMGDEASIKEVISEVDTDNDGKINFEEFRAMMRCGTTQPKGKQYPFH

SEQ ID NO: 101203 - DNA, 2304 bp, Arabidopsis thaliana
  misc_feature (1)..(2304): Ceres Seq. ID no. 13607273
  misc_feature (1)..(2304): Ortholog of  Ceres SEQ ID NO 13655640 as cited in SEQ ID NO 63844
acgcgtactgtcttcttcgtcttgttcttcttcatctaccatgaaagctcttctctttcttcttacccttttcctcatcctcccaaacccaatctcagccattgatttcatcttcaacggcttcaatgactcatcatctaatgtctccctcttcgggatcgcaacaatcgaatcaaaaatcctaactttaacaaaccaaacatcgtttgcaactggtcgtgctctatacaacagaaccatccgtacaaaagatccaatcacatcctctgttttacctttctctacttctttcatcttcaccatggctccttacaagaacacacttcctggtcacggaatcgtcttcctctttgcaccatccactggaatcaacggttctagctctgctcaacacttaggtctcttcaatttgactaacaatggtaaccctagtaatcacatctttggagttgagtttgatgtctttgctaatcaagaatttagtgacatcgatgctaatcatgtcggaattgatgttaattcacttcattcagtatattctaacacttctggttattggtctgatgatggagtggtgtttaagccattgaagcttaacgatggaagaaactatcaagtttggattgattatagagattttgtagttaatgttactatgcaagtcgctggtaagattcgacctaagattcctttgcttagtacgtctttgaatctctctgatgttgtggaagatgagatgtttgttggattcactgctgctacagggagattggttcagagtcataagatcttagcttggagttttagtaattcgaatttctcgttgagtaatagtttgatcactactggtttaccttcgtttgttttacctaaggactcgattgttaaagcgaaatggtttgtttttgtgttggtgttgatctgtttcttggttgttgctttggttggtttggtgttgtttgctgtggtgagaaagagattagagagggcaaggaagagagcgttgatggaggattgggagatggagtattggcctcatcggattccgtatgaggagattgaatccggcactaaggggtttgatgagaagaatgtgattgggattggcgggaatgggaaagtttataaaggtttgttacaaggaggggttgtggaagttgcggttaagcggatttcgcaggagagtagcgacgggatgagagagtttgtggctgagatatcgagtcttgggcggttaaagcaccggaatttagtttctttaagaggatggtgcaagaaggaggttggtagtttcatgttggtttatgattacatggagaatggaagtttagatcgatggatattcgaaaacgatgagaagattactacccttagttgcgaagagagaattcgtattttgaaaggtgtagcttcaggaatattgtatttgcatgaaggatgggagtctaaggttttacatagagatattaaagctagtaatgttttacttgaccgagatatgataccgaggcttagtgattttgggttagctcgggttcatggacacgagcaaccggttaggaccacgagggtggttggtacagctggctatttggctcctgaagtggttaagacggggcgtgcatcgacacagaccgatgtttttgcttacgggatattggttcttgaagtaatgtgtgggagaagacctattgaagaagggaagaaaccgttgatggattgggtttggggattaatggaaagaggtgagattctaaatgggcttgatccacagatgatgatgacacaaggcgtaacagaagtcattgatgaagctgaaagagttttgcagcttggattgctttgtgcacatcctgatccggccaaaagaccgtcgatgagacaagtggttcaagtgtttgaaggtgataaggctgagatctttgaagcagaaagtagtgaagatgtcgagtcatggatgttgatgaagatgggatctcgtggaagctcgcgagagttttggtatggaagctcatcacatccgacgatagagcagattagacttcagtctttgtctgtgtctctttcgtcttggaacagctcaattttagaagggaggtgatgatgatgaagaaatggcttgaggaacctaaagaatgtagttatttttgtggctttactttgttacttgttttgtacatatacgtatttgtaaacgcatttcattatacatgtatttttttattttaatttttttgttgtgaattgaaactagttttcaatttattatattttgatgtgtatataaacaagttttgcatccgg

SEQ ID NO: 101204 - protein, 699 aa, Arabidopsis thaliana
  peptide (1)..(699): Ceres Seq. ID no. 13607274
RVLSSSSCSSSSTMKALLFLLTLFLILPNPISAIDFIFNGFNDSSSNVSLFGIATIESKILTLTNQTSFATGRALYNRTIRTKDPITSSVLPFSTSFIFTMAPYKNTLPGHGIVFLFAPSTGINGSSSAQHLGLFNLTNNGNPSNHIFGVEFDVFANQEFSDIDANHVGIDVNSLHSVYSNTSGYWSDDGVVFKPLKLNDGRNYQVWIDYRDFVVNVTMQVAGKIRPKIPLLSTSLNLSDVVEDEMFVGFTAATGRLVQSHKILAWSFSNSNFSLSNSLITTGLPSFVLPKDSIVKAKWFVFVLVLICFLVVALVGLVLFAVVRKRLERARKRALMEDWEMEYWPHRIPYEEIESGTKGFDEKNVIGIGGNGKVYKGLLQGGVVEVAVKRISQESSDGMREFVAEISSLGRLKHRNLVSLRGWCKKEVGSFMLVYDYMENGSLDRWIFENDEKITTLSCEERIRILKGVASGILYLHEGWESKVLHRDIKASNVLLDRDMIPRLSDFGLARVHGHEQPVRTTRVVGTAGYLAPEVVKTGRASTQTDVFAYGILVLEVMCGRRPIEEGKKPLMDWVWGLMERGEILNGLDPQMMMTQGVTEVIDEAERVLQLGLLCAHPDPAKRPSMRQVVQVFEGDKAEIFEAESSEDVESWMLMKMGSRGSSREFWYGSSSHPTIEQIRLQSLSVSLSSWNSSILEGR

SEQ ID NO: 101205 - protein, 686 aa, Arabidopsis thaliana
  peptide (1)..(686): Ceres Seq. ID no. 13607275
MKALLFLLTLFLILPNPISAIDFIFNGFNDSSSNVSLFGIATIESKILTLTNQTSFATGRALYNRTIRTKDPITSSVLPFSTSFIFTMAPYKNTLPGHGIVFLFAPSTGINGSSSAQHLGLFNLTNNGNPSNHIFGVEFDVFANQEFSDIDANHVGIDVNSLHSVYSNTSGYWSDDGVVFKPLKLNDGRNYQVWIDYRDFVVNVTMQVAGKIRPKIPLLSTSLNLSDVVEDEMFVGFTAATGRLVQSHKILAWSFSNSNFSLSNSLITTGLPSFVLPKDSIVKAKWFVFVLVLICFLVVALVGLVLFAVVRKRLERARKRALMEDWEMEYWPHRIPYEEIESGTKGFDEKNVIGIGGNGKVYKGLLQGGVVEVAVKRISQESSDGMREFVAEISSLGRLKHRNLVSLRGWCKKEVGSFMLVYDYMENGSLDRWIFENDEKITTLSCEERIRILKGVASGILYLHEGWESKVLHRDIKASNVLLDRDMIPRLSDFGLARVHGHEQPVRTTRVVGTAGYLAPEVVKTGRASTQTDVFAYGILVLEVMCGRRPIEEGKKPLMDWVWGLMERGEILNGLDPQMMMTQGVTEVIDEAERVLQLGLLCAHPDPAKRPSMRQVVQVFEGDKAEIFEAESSEDVESWMLMKMGSRGSSREFWYGSSSHPTIEQIRLQSLSVSLSSWNSSILEGR

SEQ ID NO: 101206 - protein, 599 aa, Arabidopsis thaliana
  peptide (1)..(599): Ceres Seq. ID no. 13607276
MAPYKNTLPGHGIVFLFAPSTGINGSSSAQHLGLFNLTNNGNPSNHIFGVEFDVFANQEFSDIDANHVGIDVNSLHSVYSNTSGYWSDDGVVFKPLKLNDGRNYQVWIDYRDFVVNVTMQVAGKIRPKIPLLSTSLNLSDVVEDEMFVGFTAATGRLVQSHKILAWSFSNSNFSLSNSLITTGLPSFVLPKDSIVKAKWFVFVLVLICFLVVALVGLVLFAVVRKRLERARKRALMEDWEMEYWPHRIPYEEIESGTKGFDEKNVIGIGGNGKVYKGLLQGGVVEVAVKRISQESSDGMREFVAEISSLGRLKHRNLVSLRGWCKKEVGSFMLVYDYMENGSLDRWIFENDEKITTLSCEERIRILKGVASGILYLHEGWESKVLHRDIKASNVLLDRDMIPRLSDFGLARVHGHEQPVRTTRVVGTAGYLAPEVVKTGRASTQTDVFAYGILVLEVMCGRRPIEEGKKPLMDWVWGLMERGEILNGLDPQMMMTQGVTEVIDEAERVLQLGLLCAHPDPAKRPSMRQVVQVFEGDKAEIFEAESSEDVESWMLMKMGSRGSSREFWYGSSSHPTIEQIRLQSLSVSLSSWNSSILEGR

SEQ ID NO: 101207 - DNA, 1726 bp, Arabidopsis thaliana
  misc_feature (1)..(1726): Ceres Seq. ID no. 13607277
  misc_feature (1)..(1726): Ortholog of  Ceres SEQ ID NO 13594209 as cited in SEQ ID NO 59089
  misc_feature (1)..(1726): Ortholog of  Ceres SEQ ID NO 15176783 as cited in SEQ ID NO 65590
  misc_feature (1)..(1726): Ortholog of  Ceres SEQ ID NO 14308019 as cited in SEQ ID NO 65849
  misc_feature (1)..(1726): Ortholog of  Ceres SEQ ID NO 15170167 as cited in SEQ ID NO 66224
  misc_feature (1)..(1726): Ortholog of  Ceres SEQ ID NO 13502874 as cited in SEQ ID NO 66298
  misc_feature (1)..(1726): Ortholog of  Ceres SEQ ID NO 14307944 as cited in SEQ ID NO 66503
  misc_feature (1)..(1726): Ortholog of  Ceres SEQ ID NO 12614124 as cited in SEQ ID NO 68392
  misc_feature (1)..(1726): Ortholog of  Ceres SEQ ID NO 14307980 as cited in SEQ ID NO 69214
atcgatctcataatttcttcttccaaagtcaaaacatttatcaaaaatgtctccgatttcaaatctctttcccgacaacacaatcaatctcactccttacgcaattgtcattctcaccactgtcttctcgattctatggtatatctttaagcgctcgccgcaaccgtccctaccgcctggaccacgagggctgcctatagtcgggaacctcccgtttcttgatccggaccttcacacctacttcgcaaacctcgctcaaagtcacggtccaatctttaaactcaatcttggctcaaagctaaccatcgtagtcaactctccatcgctggctcgagagatcttgaaagatcaagacatcaatttctcaaaccgagacgtccctctcactggccgagccgctacctatggaggtatagacatcgtttggacaccatacggtgccgaatggagacagcttagaaaaatatgcgtcctaaaactccttagccgcaaaactttggattctttctacgagctccgacgcaaagaagtccgggaaagaactagatatttgtacgagcaaggtcgaaaacaatccccggttaaagtcggagatcaattgtttttgacgatgatgaatctaacgatgaatatgttatggggagggtcggtgaaagcagaggagatggagagtgttggaacagagtttaaaggagtgatttctgaaattactaggcttttgagtgagcctaatgtttctgacttttttccttggctagcgaggttcgatcttcaaggacttgtgaagaggatgggtgtgtgtgcccgcgagcttgatgcggtacttgatcgagccatcgagcagatgaaaccgttaagaggaagagatgatgatgaagttaaagacttcttgcaatatttgatgaaattaaaggatcaagaaggtgactcggaggttcccatcaccattaatcatgtcaaagccttactcacggatatggtggttggtggcactgacacatcgacaaacacgatagagtttgcgatggcagagctaatgagcaacccggagctgatcaaaagagcacaagaagagctagatgaagttgtaggcaaagacaacattgttgaagaatcacacatcactagacttccttacattttagccattatgaaagaaacacttaggcttcacccaacccttcctttgttagtccctcaccgtccggctgaaaacaccgtggtgggcggctacaccatccctaaagatactaagatcttcgtaaatgtttggtctattcagagagaccccaatgtgtgggagaatccaactgagtttcgtcctgagaggtttcttgataataactcttgtgatttcactggagccaattatagctattttccatttggatctggccggagaatttgtgccggtgtagcactcgccgagaggatggttttatacactctcgcgacactattgcattcgttcgattggaagataccggaaggccacgtgttggatttgaaagagaagtttgggattgtcttgaagctcaagatccctcttgttgccttgcccattccgaggttttcggattcgaatctttacctataggggcaaagatcgttacattaggcaattcttataccatagaaataaaagtagtacctgttttattttggggtaaaaatgtaatgtatttctggttttgcaaggaaaatcaaacatcaatctgacttgcat

SEQ ID NO: 101208 - protein, 516 aa, Arabidopsis thaliana
  peptide (1)..(516): Ceres Seq. ID no. 13607278
MSPISNLFPDNTINLTPYAIVILTTVFSILWYIFKRSPQPSLPPGPRGLPIVGNLPFLDPDLHTYFANLAQSHGPIFKLNLGSKLTIVVNSPSLAREILKDQDINFSNRDVPLTGRAATYGGIDIVWTPYGAEWRQLRKICVLKLLSRKTLDSFYELRRKEVRERTRYLYEQGRKQSPVKVGDQLFLTMMNLTMNMLWGGSVKAEEMESVGTEFKGVISEITRLLSEPNVSDFFPWLARFDLQGLVKRMGVCARELDAVLDRAIEQMKPLRGRDDDEVKDFLQYLMKLKDQEGDSEVPITINHVKALLTDMVVGGTDTSTNTIEFAMAELMSNPELIKRAQEELDEVVGKDNIVEESHITRLPYILAIMKETLRLHPTLPLLVPHRPAENTVVGGYTIPKDTKIFVNVWSIQRDPNVWENPTEFRPERFLDNNSCDFTGANYSYFPFGSGRRICAGVALAERMVLYTLATLLHSFDWKIPEGHVLDLKEKFGIVLKLKIPLVALPIPRFSDSNLYL

SEQ ID NO: 101209 - protein, 328 aa, Arabidopsis thaliana
  peptide (1)..(328): Ceres Seq. ID no. 13607279
MMNLTMNMLWGGSVKAEEMESVGTEFKGVISEITRLLSEPNVSDFFPWLARFDLQGLVKRMGVCARELDAVLDRAIEQMKPLRGRDDDEVKDFLQYLMKLKDQEGDSEVPITINHVKALLTDMVVGGTDTSTNTIEFAMAELMSNPELIKRAQEELDEVVGKDNIVEESHITRLPYILAIMKETLRLHPTLPLLVPHRPAENTVVGGYTIPKDTKIFVNVWSIQRDPNVWENPTEFRPERFLDNNSCDFTGANYSYFPFGSGRRICAGVALAERMVLYTLATLLHSFDWKIPEGHVLDLKEKFGIVLKLKIPLVALPIPRFSDSNLYL

SEQ ID NO: 101210 - protein, 327 aa, Arabidopsis thaliana
  peptide (1)..(327): Ceres Seq. ID no. 13607280
MNLTMNMLWGGSVKAEEMESVGTEFKGVISEITRLLSEPNVSDFFPWLARFDLQGLVKRMGVCARELDAVLDRAIEQMKPLRGRDDDEVKDFLQYLMKLKDQEGDSEVPITINHVKALLTDMVVGGTDTSTNTIEFAMAELMSNPELIKRAQEELDEVVGKDNIVEESHITRLPYILAIMKETLRLHPTLPLLVPHRPAENTVVGGYTIPKDTKIFVNVWSIQRDPNVWENPTEFRPERFLDNNSCDFTGANYSYFPFGSGRRICAGVALAERMVLYTLATLLHSFDWKIPEGHVLDLKEKFGIVLKLKIPLVALPIPRFSDSNLYL

SEQ ID NO: 101211 - DNA, 1058 bp, Arabidopsis thaliana
  misc_feature (1)..(1058): Ceres Seq. ID no. 13607285
  misc_feature (1)..(1058): Ortholog of  Ceres SEQ ID NO 12617080 as cited in SEQ ID NO 63943
  misc_feature (1)..(1058): Ortholog of  Ceres SEQ ID NO 13657621 as cited in SEQ ID NO 65802
aaaaacagagtcttttagtatcttcttcttgggtataacgaagatttttgtggtttcttctgattaatgatgatgataaagcttgagagaagtgattagtctgtagaagaagaagagttaaaaccattcaccaaagaagaaattgagaactagagacagtcatggagatcaaatcttaccaaaatcaagcagagtattttgttgaacactatttattagcagatccatttcttccatatacttctgttcttgttggaatctgtctttgcaaattggtatatgatcttacggagttattcagctcaattcatgtcaaatcatactcagctctcacaaaaataaagagaattgaatggaacaacaggggaatttctacagtccatgcgatctttatctcattcatggcattatactttgcgttcttctctgatttgttttctgaccaaagaagccttgaaacccttacggtgtttcgtaactcgcctctgtctacctttggtttaggagtatcagttggttactttcttgcggatcttggaatgatcttttggttatacccttctttaggaggatcagaatatatattacatcactgcttatctggaacagcagtagcgtattctttgttctctggagaggctcagctttacacatacatggttttaatctctgaagtgactacaccagagatcaatcttagatggtaccttgacattgctggtttgaaacgatctaaagcttatcttgttaatggagttgctatattctttgcttggttgacagcaagaattcttctgttcatctacatgttttaccatgtctacacacattatgatcaggtgatagagatgcatacattcggttatctactggtatttgttgtaccgatttcattgagtgtcatgaacttgatctggtttggtaagatagtgaagggattgaagaaaactcttgagaaaagacagtgaagaaagagttgtgttttttttttatgtaaatataaaactcttatgaagaatcttacaagtttataagcaacaaagatatggtttgtttct

SEQ ID NO: 101212 - protein, 268 aa, Arabidopsis thaliana
  peptide (1)..(268): Ceres Seq. ID no. 13607286
MEIKSYQNQAEYFVEHYLLADPFLPYTSVLVGICLCKLVYDLTELFSSIHVKSYSALTKIKRIEWNNRGISTVHAIFISFMALYFAFFSDLFSDQRSLETLTVFRNSPLSTFGLGVSVGYFLADLGMIFWLYPSLGGSEYILHHCLSGTAVAYSLFSGEAQLYTYMVLISEVTTPEINLRWYLDIAGLKRSKAYLVNGVAIFFAWLTARILLFIYMFYHVYTHYDQVIEMHTFGYLLVFVVPISLSVMNLIWFGKIVKGLKKTLEKRQ

SEQ ID NO: 101213 - protein, 188 aa, Arabidopsis thaliana
  peptide (1)..(188): Ceres Seq. ID no. 13607287
MALYFAFFSDLFSDQRSLETLTVFRNSPLSTFGLGVSVGYFLADLGMIFWLYPSLGGSEYILHHCLSGTAVAYSLFSGEAQLYTYMVLISEVTTPEINLRWYLDIAGLKRSKAYLVNGVAIFFAWLTARILLFIYMFYHVYTHYDQVIEMHTFGYLLVFVVPISLSVMNLIWFGKIVKGLKKTLEKRQ

SEQ ID NO: 101214 - protein, 142 aa, Arabidopsis thaliana
  peptide (1)..(142): Ceres Seq. ID no. 13607288
MIFWLYPSLGGSEYILHHCLSGTAVAYSLFSGEAQLYTYMVLISEVTTPEINLRWYLDIAGLKRSKAYLVNGVAIFFAWLTARILLFIYMFYHVYTHYDQVIEMHTFGYLLVFVVPISLSVMNLIWFGKIVKGLKKTLEKRQ

SEQ ID NO: 101215 - DNA, 1997 bp, Arabidopsis thaliana
  misc_feature (1)..(1997): Ceres Seq. ID no. 13607292
  misc_feature (1)..(1997): Ortholog of  Ceres SEQ ID NO 13648124 as cited in SEQ ID NO 20362
acatattccatttaaccaatgtgaaagattcacatcacctttttcgatttttaatagattcggttttaccttctcgtaacgtaattctaagaaaagaaaacgtcaatcatatttactaggaaagataattataatttattgctttttctctcactctctgacctgaaatctcctactgagatttttgaagtgtattcaacaatggcggatccaccacatttctctctgtttcagcaaaaatttcgtaccggagacaaaccatttctcactcttgatgctgacttcttaatgaatcacacgaaagtgttactaaaatcggatgcttcagacaaagtttggaaagtgaaactggacggcggtaggctctccgaaggctgggaagagttcgcctgcgaccagaaattcagagacggtgacgttttggttttcaaacatcatggagacgaggtctttcatgtagctgtggtgtccccatctgtttccggcgacatacgtaacgcatcttctagccaagttattacggaagatacttatattgatgttgacgatgttgatgatgatgattatggacaagacgacgaagatgatgatgatgatgatgatgagggcgaggataatatagagaacatatcggagaagacggataaaagacaagaagcagattcttcatcagaccactcaggtttcatcacagcacgtgtcactcgttatagcctccttcatgaccgtttggatctttctagaaattttacgttgttgtttggtgggcaccaaaaaacatgtgagatcgatgtagtggatgagcaagggagaagatggacaatgaaacttgccaaaaacatctcaagtggtgtgttttacatcagactaggctggggaaacttctgctgcgctaatgggctaactcaaggagacttatgtaagtttaaacttttccaaaatgaggaaaggcctgtgctttggttgtgtccacaggaatctggcaatggccgtaaagagaagaggacgtttgatgaagtttccaaaggaaaggagaagaagaccccttcaccatttctgatagtaaagtatacacctagccgtgagactaccgggcaactatcacttccagtgagtttcacgaggaacaatagcattaataagactggggaggtaattctgctgaaccaagatggaagaaagtggtcatcttatctacagataacaggacttggaagaggcgccggaagtgaatggttttatttgagaagaggttggagagagatgtgcgaagcgaatggagtgggagtaaatgattctttcaagctggaactggtgtgggaaggagctaatcctatgtttaagttctgctccaagattgaaaaccatgaatacaagggaaaaggaaaccaaagaactcgtaagaagagagcttgtgagactgctccacagccaaggaatgtgaaaaagactccaagattaggagtagagggaccagtgtatcaagttgatgaggagagaggacacactcaggtttcaaacagaaccaacaccatctcaggaaatttacagcgcttgctaccaccatcgtgctcagtctccgatcaggtggctaatgtgaaacagggcattgtagatagtctgaacactgtgagacaatgtcggactgagcttgagacaagtgaacaaaatctgcaagcctctttgctagcaattgacgccttaggggagaggatatggggaatcagcaaaatcctcagcagtaatctggtttgaagtgagactgaagatggggaaagaaacaaagagtgattttcactaaactaggtttattctgtatttgagacttgcaagttttagagactgtacttaaaagtttgtagtttggaagggccttcttcagttgtatcagcaatttggactacttcactatatcgctgagaaactagtaatattgtaatgcattgtgagtttcaacttttgttgtattagtgatattgtaatgttatttggttttg

SEQ ID NO: 101216 - protein, 517 aa, Arabidopsis thaliana
  peptide (1)..(517): Ceres Seq. ID no. 13607293
MADPPHFSLFQQKFRTGDKPFLTLDADFLMNHTKVLLKSDASDKVWKVKLDGGRLSEGWEEFACDQKFRDGDVLVFKHHGDEVFHVAVVSPSVSGDIRNASSSQVITEDTYIDVDDVDDDDYGQDDEDDDDDDDEGEDNIENISEKTDKRQEADSSSDHSGFITARVTRYSLLHDRLDLSRNFTLLFGGHQKTCEIDVVDEQGRRWTMKLAKNISSGVFYIRLGWGNFCCANGLTQGDLCKFKLFQNEERPVLWLCPQESGNGRKEKRTFDEVSKGKEKKTPSPFLIVKYTPSRETTGQLSLPVSFTRNNSINKTGEVILLNQDGRKWSSYLQITGLGRGAGSEWFYLRRGWREMCEANGVGVNDSFKLELVWEGANPMFKFCSKIENHEYKGKGNQRTRKKRACETAPQPRNVKKTPRLGVEGPVYQVDEERGHTQVSNRTNTISGNLQRLLPPSCSVSDQVANVKQGIVDSLNTVRQCRTELETSEQNLQASLLAIDALGERIWGISKILSSNLV

SEQ ID NO: 101217 - protein, 488 aa, Arabidopsis thaliana
  peptide (1)..(488): Ceres Seq. ID no. 13607294
MNHTKVLLKSDASDKVWKVKLDGGRLSEGWEEFACDQKFRDGDVLVFKHHGDEVFHVAVVSPSVSGDIRNASSSQVITEDTYIDVDDVDDDDYGQDDEDDDDDDDEGEDNIENISEKTDKRQEADSSSDHSGFITARVTRYSLLHDRLDLSRNFTLLFGGHQKTCEIDVVDEQGRRWTMKLAKNISSGVFYIRLGWGNFCCANGLTQGDLCKFKLFQNEERPVLWLCPQESGNGRKEKRTFDEVSKGKEKKTPSPFLIVKYTPSRETTGQLSLPVSFTRNNSINKTGEVILLNQDGRKWSSYLQITGLGRGAGSEWFYLRRGWREMCEANGVGVNDSFKLELVWEGANPMFKFCSKIENHEYKGKGNQRTRKKRACETAPQPRNVKKTPRLGVEGPVYQVDEERGHTQVSNRTNTISGNLQRLLPPSCSVSDQVANVKQGIVDSLNTVRQCRTELETSEQNLQASLLAIDALGERIWGISKILSSNLV

SEQ ID NO: 101218 - protein, 310 aa, Arabidopsis thaliana
  peptide (1)..(310): Ceres Seq. ID no. 13607295
MKLAKNISSGVFYIRLGWGNFCCANGLTQGDLCKFKLFQNEERPVLWLCPQESGNGRKEKRTFDEVSKGKEKKTPSPFLIVKYTPSRETTGQLSLPVSFTRNNSINKTGEVILLNQDGRKWSSYLQITGLGRGAGSEWFYLRRGWREMCEANGVGVNDSFKLELVWEGANPMFKFCSKIENHEYKGKGNQRTRKKRACETAPQPRNVKKTPRLGVEGPVYQVDEERGHTQVSNRTNTISGNLQRLLPPSCSVSDQVANVKQGIVDSLNTVRQCRTELETSEQNLQASLLAIDALGERIWGISKILSSNLV

SEQ ID NO: 101219 - DNA, 921 bp, Arabidopsis thaliana
  misc_feature (1)..(921): Ceres Seq. ID no. 13607303
  misc_feature (1)..(921): Ortholog of  Ceres SEQ ID NO 13658584 as cited in SEQ ID NO 66428
  misc_feature (1)..(921): Ortholog of  Ceres SEQ ID NO 13596269 as cited in SEQ ID NO 67972
agctacgattgtgtgtttattattattgcaaccatttctctgctgtttcttcgtcgtttagcttcagaggacgacaatccggtaggcgagagagagagattaatcaatcggcgacctttttaattcgctcgtaattcgttttgattttcgtgtttttgcaacgaatttaacaacttctgtgtgtgtgggtgtgagtttcttaagagaagtcagaaacaatgattgggttgtttaaagtaaaggaaaagcaaagagaacaagctcaaaatgctactagaggaggagcttctgttaagaagcaatctgctggcgaacttcgtcttcacaaagatatatcagagttgaaccttcctagctcttgttcaatatcttttccaaatggcaaagatgatttgatgaactttgaagtatccattaaacctgatgatggatattaccacaatggtacgtttgtttcacattccaagtctctcctgtgtatccacatgaagctccaaaagttaaatgcaaaaccaaggtttatcatcccaatatcgatttggaaggaaacgtttgcctgaacatcttgcgtgaagattggaaacctgttcttaacattaacacagttatctacggactcttccatctgttcacggaacccaattctgaagatcccttgaaccatgatgctgcagcagttttgagggataacccaaagctctttgagaccaatgttcgcagggccatgaccggtggatatgtcggtcagacctttttcccgcgttgtatctaacaaagctctggtttgtcttcttcaaggaaaaagataagaaccaaaccctttgtccgccattgtatttcttctctttctcaaggaccctcgtttgtttgtttgatcttgtaaaattacattccgcgttaaagtaaccctttccttatatc

SEQ ID NO: 101220 - protein, 113 aa, Arabidopsis thaliana; identical to SEQ ID NO: 74812
  peptide (1)..(113): Ceres Seq. ID no. 13607304

SEQ ID NO: 101221 - DNA, 1205 bp, Arabidopsis thaliana
  misc_feature (1)..(1205): Ceres Seq. ID no. 13607309
  misc_feature (1)..(1205): Ortholog of  Ceres SEQ ID NO 14308107 as cited in SEQ ID NO 59030
  misc_feature (1)..(1205): Ortholog of  Ceres SEQ ID NO 15226612 as cited in SEQ ID NO 62700
gaagcggataacgaaaagctcgccgagaaagcacaaatggcgggcgtgaaatctctgcaacctagactcatatcttcctttctcggcaacaattctattagatcaacgcaaccacttattcatctctttcgcttcgatttaggaagaagacatgtttcgatgcaattatcaagaaccttttctggattaaccgatctcctgtttaatagaagaaatgaagatgaagttattgatggcaagagaaaacgtctgagaccgggaaatgtatctcctcgtcgtcctgttccgggtcatataacaaaacctccttatgttgattctcttcaagctcccggaatctcaagtggacttgaagttcatgataagaaaggtatagaatgcatgagagcttctggaatacttgcagctagggttcgagattacgctggcactttggttaagccaggcgtaaccactgatgaaatcgatgaagcagttcacaatatgattattgagaatggagcttatccttcgcctcttggttatggaggtttcccgaaaagtgtttgcacatctgtgaatgaatgcatttgccatggtataccagattcaagaccacttgaggatggggatattatcaacatcgatgtcacagtttatttgaatggttatcatggtgatacttcagcaactttcttctgtggaaatgttgacgagaaggctaaaaagctagtcgaggtgacgaaagagtctctcgacaaagcaatatcaatatgtggtcccggagttgagtacaagaaaatcggcaaagtcattcatgatcttgcagataaacataaatatggagttgttcgacaatttgtaggccacggggttggcagcgtcttccacgctgatccagttgttctgcatttccggaacaatgaagctggacgtatggtcttgaatcaaaccttcaccattgaaccgatgcttacaataggaagcagaaacccgataatgtgggatgataactggaccgtggtaacagaagatgcaagcctctcggcgcaattcgagcataccattcttataaccaaagatggtgctgagattctaaccaagtgttaaaaaaatgattctgaaaaattgatcttcttggaatgaaacccaaagccttaaggtatgtaagaatcatattcttattcaaatattgttttgctcacaagcagatgcgaacagttact

SEQ ID NO: 101222 - protein, 362 aa, Arabidopsis thaliana; identical to SEQ ID NO: 30693
  peptide (1)..(362): Ceres Seq. ID no. 13607310

SEQ ID NO: 101223 - protein, 350 aa, Arabidopsis thaliana; identical to SEQ ID NO: 30694
  peptide (1)..(350): Ceres Seq. ID no. 13607311

SEQ ID NO: 101224 - protein, 309 aa, Arabidopsis thaliana; identical to SEQ ID NO: 30695
  peptide (1)..(309): Ceres Seq. ID no. 13607312

SEQ ID NO: 101225 - DNA, 720 bp, Arabidopsis thaliana
  misc_feature (1)..(720): Ceres Seq. ID no. 13607313
  misc_feature (1)..(720): Ortholog of  Ceres SEQ ID NO 13594023 as cited in SEQ ID NO 55192
  misc_feature (1)..(720): Ortholog of  Ceres SEQ ID NO 15174297 as cited in SEQ ID NO 0
agtttagattctttatccgactactttgttcatcggttttgtttttctttttgtcttccggaaggcgaattacatgtcggaagcagcacagctcagaagaggtctaaagcctaaagggaagacttatgggttgaccaatcagaagagacgagagatcagagagatctttgatcttttcgacatagacggttcaggtagcatcgatgctagcgagctcaacgttgctatgaggtctcttggatttgagatgaataatcagcaaataaacgaattgatggcagaagtagataaaaaccaaagtggagccatagatttcgacgaatttgtgcatatgatgacaaccaaattcggagaacgagactccatagacgaattgtctaaggcgtttaagatcattgaccacgacaataatgggaagatttcacctcgtgatataaagatgattgctaaagaattgggagaaaatttcacagataatgatatagaagaaatgatcgaagaagcagaccgtgacaaagatggagaagttaacttggaggagttcatgaagatgatgaagagaacctcttacggctaagtataaatcaattagtaatggttgtgaataatatttgttaatcaccttgatttataataataaagaagtttgatttgtggcttggtcgaataaaaatgtattgttgtataaaaataataatgtaattcacatccattattttg

SEQ ID NO: 101226 - protein, 167 aa, Arabidopsis thaliana
  peptide (1)..(167): Ceres Seq. ID no. 13607314
MSEAAQLRRGLKPKGKTYGLTNQKRREIREIFDLFDIDGSGSIDASELNVAMRSLGFEMNNQQINELMAEVDKNQSGAIDFDEFVHMMTTKFGERDSIDELSKAFKIIDHDNNGKISPRDIKMIAKELGENFTDNDIEEMIEEADRDKDGEVNLEEFMKMMKRTSYG

SEQ ID NO: 101227 - protein, 116 aa, Arabidopsis thaliana
  peptide (1)..(116): Ceres Seq. ID no. 13607315
MRSLGFEMNNQQINELMAEVDKNQSGAIDFDEFVHMMTTKFGERDSIDELSKAFKIIDHDNNGKISPRDIKMIAKELGENFTDNDIEEMIEEADRDKDGEVNLEEFMKMMKRTSYG

SEQ ID NO: 101228 - protein, 109 aa, Arabidopsis thaliana
  peptide (1)..(109): Ceres Seq. ID no. 13607316
MNNQQINELMAEVDKNQSGAIDFDEFVHMMTTKFGERDSIDELSKAFKIIDHDNNGKISPRDIKMIAKELGENFTDNDIEEMIEEADRDKDGEVNLEEFMKMMKRTSYG

SEQ ID NO: 101229 - DNA, 1256 bp, Arabidopsis thaliana
  misc_feature (1)..(1256): Ceres Seq. ID no. 13607317
  misc_feature (1)..(1256): Ortholog of  Ceres SEQ ID NO 14304716 as cited in SEQ ID NO 53189
  misc_feature (1)..(1256): Ortholog of  Ceres SEQ ID NO 14304898 as cited in SEQ ID NO 53598
atgagtatcttatccacaagatggttttctgagcaggaaatagaagaaaatagcataattcaacagtttcacatgaactcaatagtgggagaggtccaagaagctcaatacatttttccacactctttcacgaccaacaatgatccctcttatgatgatttgatcgaaatgaaaccaccaaagatccttgagacaacttacatatcaccttcttctcatcttcctccaaattcaaagccccatcatattcaccgtcattcttcctcaagaattctctctttcgaagattatggttcaaatgatatggaacacgagtactctcccacctacctaaactcaatctttagcccaaaattagaggctcaagtgcaaccacaccagaagagtgatgagtttaatcgaaaagggaccaagagggctcaaccgttttcaagaaaccaatccaatgctcaggatcacataatagccgaaagaaaacgtagagagaagcttactcaaagattcgtagctctttccgctctagttcctggccttaaaaagatggacaaggcttctgtgttgggagatgcattaaagcatataaagtatctccaagaaagagtgggagagttggaggaacagaagaaagaaagaagattggaatcaatggttcttgtgaagaagtctaagctgatcttggacgataataatcaatcattctcttcttcttgtgaagatggcttctcggacttggatcttcccgagatcgaggtaagattctcggatgaagatgttctaatcaagatcctttgcgagaagcaaaagggtcatcttgccaagattatggccgagattgagaaacttcatatcttgataactaattcaagtgtattgaattttggaccaactcttgatatcaccattatagctaagaaggagagtgatttcgacatgacactcatggatgttgtaaagagcttaaggtctgctttgtcgaatttcatatgattgtattaactttcatgcttctcgtcaatttctactgtgggagatcttgttgaacacatggacgaaacataagtggtttgccatgaaaatgtttttttttttttataagtttgattggaggttttcttatctgttaattatctataattctatatataaataagattaaattagttgaaaattcacttctctttttttctctatttggttctttccccctttatgtattatattgctgtttccaaagatgtaaagcacttccgtttatg

SEQ ID NO: 101230 - protein, 328 aa, Arabidopsis thaliana
  peptide (1)..(328): Ceres Seq. ID no. 13607318
MSILSTRWFSEQEIEENSIIQQFHMNSIVGEVQEAQYIFPHSFTTNNDPSYDDLIEMKPPKILETTYISPSSHLPPNSKPHHIHRHSSSRILSFEDYGSNDMEHEYSPTYLNSIFSPKLEAQVQPHQKSDEFNRKGTKRAQPFSRNQSNAQDHIIAERKRREKLTQRFVALSALVPGLKKMDKASVLGDALKHIKYLQERVGELEEQKKERRLESMVLVKKSKLILDDNNQSFSSSCEDGFSDLDLPEIEVRFSDEDVLIKILCEKQKGHLAKIMAEIEKLHILITNSSVLNFGPTLDITIIAKKESDFDMTLMDVVKSLRSALSNFI

SEQ ID NO: 101231 - protein, 304 aa, Arabidopsis thaliana; identical to SEQ ID NO: 79720
  peptide (1)..(304): Ceres Seq. ID no. 13607319

SEQ ID NO: 101232 - protein, 272 aa, Arabidopsis thaliana; identical to SEQ ID NO: 79721
  peptide (1)..(272): Ceres Seq. ID no. 13607320

SEQ ID NO: 101233 - DNA, 856 bp, Arabidopsis thaliana
  misc_feature (1)..(856): Ceres Seq. ID no. 13607335
  misc_feature (1)..(856): Ortholog of  Ceres SEQ ID NO 13599311 as cited in SEQ ID NO 0
aaattctcactttactcaaaagattcctcggatcatcagaaaatggctatggctacgcgagcgattcgataccagttaccgtcaccgagatttagagctcctagatgcgaatcatcggaaccgattaagcagattcagatccagcaacgaccaagaggtggcgatttagccgagaacgggaagatcgtgctccaaccaaggctttgcacgctgagatcttatggatctgatatggtcatcgctaaaaaggacggcggagatggtggaggaggaggatctgatgttgagttagcgtctccgttttttgagacgcttacggattacatagagagttcgaagaagagtcaggatttcgaaaccatctccggtagactcgccatgattgtatttgcggtgacggtgacggaggagattgttacggggaactcgttgtttaagaaactagatgtggaaggattgagtgaagctattggagctggtctcgccgcgatgggatgcgcggcgatgtttgcttggttaacgatttctcggaacagagtcggacggatctttacagtgagttgcaactcgttcattgactcgttggttgatcagatcgttgatggactgttctacgataccaagcctagtgattggtctgatgatctttaagttcataaatgataaataccactctcaaatgtattactattgtacactttcatctataatagtatagtatagtttgctcttcttcatggtgcttgaagatgataatgaaagtctgtaacttttgtgtctttatatatatatataaaagatatggaagttcatgtgaaacaattgagtgttgttatgggacgtagttgtatcgatt

SEQ ID NO: 101234 - protein, 216 aa, Arabidopsis thaliana; identical to SEQ ID NO: 28511
  peptide (1)..(216): Ceres Seq. ID no. 13607336

SEQ ID NO: 101235 - protein, 202 aa, Arabidopsis thaliana; identical to SEQ ID NO: 28512
  peptide (1)..(202): Ceres Seq. ID no. 13607337

SEQ ID NO: 101236 - protein, 200 aa, Arabidopsis thaliana; identical to SEQ ID NO: 28513
  peptide (1)..(200): Ceres Seq. ID no. 13607338

SEQ ID NO: 101237 - DNA, 735 bp, Arabidopsis thaliana
  misc_feature (1)..(735): Ceres Seq. ID no. 13607339
  misc_feature (1)..(735): Ortholog of  Ceres SEQ ID NO 15176321 as cited in SEQ ID NO 52814
  misc_feature (1)..(735): Ortholog of  Ceres SEQ ID NO 12563124 as cited in SEQ ID NO 57104
  misc_feature (1)..(735): Ortholog of  Ceres SEQ ID NO 13598373 as cited in SEQ ID NO 62185
  misc_feature (1)..(735): Ortholog of  Ceres SEQ ID NO 12584664 as cited in SEQ ID NO 62232
  misc_feature (1)..(735): Ortholog of  Ceres SEQ ID NO 12617639 as cited in SEQ ID NO 65219
acacatctcactgctcactactctcactgtaatcccttagatcttcttttcaaatttcaatggcgtccggtgatgttgagtatcggtgcttcgttggaggtctagcatgggccactgatgacagagctcttgagactgccttcgctcaatacggcgacgttattgattccaagatcattaacgatcgtgagactggaagatcaaggggattcggattcgtcaccttcaaggatgagaaagccatgaaggatgcgattgagggaatgaacggacaagatctcgatggccgtagcatcactgttaacgaggctcagtcacgaggaagcggtggcggcggaggccaccgtggaggtggtggcggtggataccgcagcggcggtggtggaggttactccggtggaggtggtagctacggaggtggcggcggtagacgcgagggtggaggaggatacagcggcggcggcggcggttactcctcaagaggtggtggtggcggaagctacggtggtggaagacgtgagggaggaggaggatacggtggtggtgaaggaggaggttacggaggaagcggtggtggtggaggatggtaattcctttaattaggtttgggattaccaatgaatgttctctctctcgcttgttatgcttctacttggttttgtgtgttctctattttgttctggttctgctttagatttgatgtaacagttcgtgattaggtattttggtatctgg

SEQ ID NO: 101238 - protein, 176 aa, Arabidopsis thaliana; identical to SEQ ID NO: 76877
  peptide (1)..(176): Ceres Seq. ID no. 13607340

SEQ ID NO: 101239 - protein, 115 aa, Arabidopsis thaliana; identical to SEQ ID NO: 76878
  peptide (1)..(115): Ceres Seq. ID no. 13607341

SEQ ID NO: 101240 - protein, 108 aa, Arabidopsis thaliana; identical to SEQ ID NO: 76879
  peptide (1)..(108): Ceres Seq. ID no. 13607342

SEQ ID NO: 101241 - DNA, 930 bp, Arabidopsis thaliana
  misc_feature (1)..(930): Ceres Seq. ID no. 13607346
  misc_feature (1)..(930): Ortholog of  Ceres SEQ ID NO 13586122 as cited in SEQ ID NO 0
ttgagttttctcaattttttctagactcgtatcgatatggcgaatcatgaaacgatatttgatcagctaaagaagcagattccagtagatgaggaagaacctctgattttgaatcgagactcaagcgttggtctcgtcatcgttgacgttgttaatggcttctgcacaattggctccggcaatatggtttggctccaacaaagcataatgaacagatatcgaagatggtggaggaaagtgcaaagcttgctagagagttctgtgatcggaaatggccggttttggcgtttattgactctcatcatccagatattccggagagaccttatcctcctcattgtattataggaactgaagaatcagaacttgttcctgctctgaaatggcttgaaagtgaggattgtgccactcttagacgaaaggattgtattaatgggtttgtgggttcgatggagagtgatggttctaatgtttttgtggattgggttaaggaaaaacagatcaaagttgtatctgtacagacatatgtgtgtttgattttgtggctactgcactttctgcccgaaaccacggtgttctttctcctgtagaagatgtggtagtgtactcccgtggctgtgctacttttgaccttcctcttcatgttgcgaaagacatcaaaggcgctcaggctcatcctcaggagttgatgcaccatgtaggtctatatatggctaaaggaagaggagctcaggtagtctctaaaatttcttttgagacttgaaagactatatctcgtttataaacataacactcttgatatcaaatatttcagtaaattgttgagtttgcctctcttttctttcgtgtaaattgttcatgaagcttgttctctgaatttcaactcttgtgtaactgtttcagaatgacaaataatatgatgggtttctc

SEQ ID NO: 101242 - protein, 121 aa, Arabidopsis thaliana
  peptide (1)..(121): Ceres Seq. ID no. 13607347
MVEESAKLAREFCDRKWPVLAFIDSHHPDIPERPYPPHCIIGTEESELVPALKWLESEDCATLRRKDCINGFVGSMESDGSNVFVDWVKEKQIKVVSVQTYVCLILWLLHFLPETTVFFLL

SEQ ID NO: 101243 - protein, 103 aa, Arabidopsis thaliana
  peptide (1)..(103): Ceres Seq. ID no. 13607348
MANHETIFDQLKKQIPVDEEEPLILNRDSSVGLVIVDVVNGFCTIGSGNMVWLQQSIMNRYRRWWRKVQSLLESSVIGNGRFWRLLTLIIQIFRRDLILLIVL

SEQ ID NO: 101244 - DNA, 1688 bp, Arabidopsis thaliana
  misc_feature (1)..(1688): Ceres Seq. ID no. 13607362
  misc_feature (1)..(1688): Ortholog of  Ceres SEQ ID NO 13596816 as cited in SEQ ID NO 62287
aacaccactctctctttctctgtgtctccttcaaatcttcatctctctctccatctctcttctccacaagaagctgagtatggatctcctcacaccactcatcttcctcctcctcctcctctcaccattttcactctcagatgctggttccatcggagtaaactacggccgaatctccgacgaactcccctccgcattcaaagtagtccaactactaaaatcccaaggaatcacgcgagtcaaaatcttcgacgcagacccatcagttctcaaagcattatccggatctggaatcaaagtcaccgtagatctccccaacgagttactcttctccgccgccaaaagaacttccttcgccgtctcatgggtcaaacgcaacgtagcagcttatcatccttcaacacagatcgaatcaatagctgttggtaacgaagtcttcgttgatacacacaacactacaagcttcttgatccctgcaatgagaaacattcacaaagctcttatgagtttcaatctccactccgacattaaaatctcttctcctcttgctttaagcgctcttcaaaactcttacccttcttcctccggttctttccgaccagaacttattgactctgttatcaaaccaatgcttgacttcttacgtgaaactggttcaagacttatgatcaatgtctatcctttctttgcttatgaaggaaactctgacgtcattcctttagattatgctttgcttagagagaatccaggaatggttgattctggtaatggtttgagatactttaatctcttcgacgctcaaatcgacgccgttttcgcagcaatgtcggctttaaagtacgatgatatcgaaatcattgtcacggaaactggttggccgtcgaaaggagatgagaatgaagtcggagctactctagctaacgcagcttcttacaacggaaacttaatccgtcggatcttgacacgtggaggtacaccgttacgtcctaaagcagatctaacggtctatcttttcgctctgttcaacgagaacaagaagttaggtccaacgtcggagagaaactatggtctcttcttccctgatgagaagaaagtctacgacattcctttcacaacagaggggttgaaacattaccgtgacggtggtcatactccggtcactggaggagatcaggttacaaagcctccgatgagtggaggcgtgtcgaagagtttgaatggttatacttggtgtgtagctaatggtgatgctggtgaagaaaggttacaaggtggtttagattatgcttgtggtgaaggtggtgctgattgtcgtcctattcaacctggtgctaactgttatagtcctgatacacttgaggctcacgcttcgtttgctttcaatagttattaccagaagaagggtcgtgccggtgggagttgttacttcggcggcgccgcttacgtcgttagccaaccaccgaagtatggaagatgcgagtttccgacaggatattaaggaagaagaagatttaagtttagattaatttctgctatataatatattcgttttttgatgtattttgtttggtgggaagttttagttaatttttgtaacaatgactttttaatgttgtgttgttaataccaacttagacgatgttattgatatttgatatttaggtaatgaaattaaatatgtttgtttc

SEQ ID NO: 101245 - protein, 498 aa, Arabidopsis thaliana
  peptide (1)..(498): Ceres Seq. ID no. 13607363
TPLSLSLCLLQIFISLSISLLHKKLSMDLLTPLIFLLLLLSPFSLSDAGSIGVNYGRISDELPSAFKVVQLLKSQGITRVKIFDADPSVLKALSGSGIKVTVDLPNELLFSAAKRTSFAVSWVKRNVAAYHPSTQIESIAVGNEVFVDTHNTTSFLIPAMRNIHKALMSFNLHSDIKISSPLALSALQNSYPSSSGSFRPELIDSVIKPMLDFLRETGSRLMINVYPFFAYEGNSDVIPLDYALLRENPGMVDSGNGLRYFNLFDAQIDAVFAAMSALKYDDIEIIVTETGWPSKGDENEVGATLANAASYNGNLIRRILTRGGTPLRPKADLTVYLFALFNENKKLGPTSERNYGLFFPDEKKVYDIPFTTEGLKHYRDGGHTPVTGGDQVTKPPMSGGVSKSLNGYTWCVANGDAGEERLQGGLDYACGEGGADCRPIQPGANCYSPDTLEAHASFAFNSYYQKKGRAGGSCYFGGAAYVVSQPPKYGRCEFPTGY

SEQ ID NO: 101246 - protein, 472 aa, Arabidopsis thaliana
  peptide (1)..(472): Ceres Seq. ID no. 13607364
MDLLTPLIFLLLLLSPFSLSDAGSIGVNYGRISDELPSAFKVVQLLKSQGITRVKIFDADPSVLKALSGSGIKVTVDLPNELLFSAAKRTSFAVSWVKRNVAAYHPSTQIESIAVGNEVFVDTHNTTSFLIPAMRNIHKALMSFNLHSDIKISSPLALSALQNSYPSSSGSFRPELIDSVIKPMLDFLRETGSRLMINVYPFFAYEGNSDVIPLDYALLRENPGMVDSGNGLRYFNLFDAQIDAVFAAMSALKYDDIEIIVTETGWPSKGDENEVGATLANAASYNGNLIRRILTRGGTPLRPKADLTVYLFALFNENKKLGPTSERNYGLFFPDEKKVYDIPFTTEGLKHYRDGGHTPVTGGDQVTKPPMSGGVSKSLNGYTWCVANGDAGEERLQGGLDYACGEGGADCRPIQPGANCYSPDTLEAHASFAFNSYYQKKGRAGGSCYFGGAAYVVSQPPKYGRCEFPTGY

SEQ ID NO: 101247 - protein, 339 aa, Arabidopsis thaliana
  peptide (1)..(339): Ceres Seq. ID no. 13607365
MRNIHKALMSFNLHSDIKISSPLALSALQNSYPSSSGSFRPELIDSVIKPMLDFLRETGSRLMINVYPFFAYEGNSDVIPLDYALLRENPGMVDSGNGLRYFNLFDAQIDAVFAAMSALKYDDIEIIVTETGWPSKGDENEVGATLANAASYNGNLIRRILTRGGTPLRPKADLTVYLFALFNENKKLGPTSERNYGLFFPDEKKVYDIPFTTEGLKHYRDGGHTPVTGGDQVTKPPMSGGVSKSLNGYTWCVANGDAGEERLQGGLDYACGEGGADCRPIQPGANCYSPDTLEAHASFAFNSYYQKKGRAGGSCYFGGAAYVVSQPPKYGRCEFPTGY

SEQ ID NO: 101248 - DNA, 1597 bp, Arabidopsis thaliana
  misc_feature (1)..(1597): Ceres Seq. ID no. 13607368
  misc_feature (1)..(1597): Ortholog of  Ceres SEQ ID NO 15225627 as cited in SEQ ID NO 64323
gttttgtaattgagacgaaaacttctgatatcacttaaaaacttcacagaaacaacacctcgatctcatcgaagctcctctctcttacatatcatcacttcacatcaaccaaacctacttctgtctctctctctcgctctctatctctcacgctctcacagaagaaaaaattagaaaggttgtgagaatggcggctacagcagcttcaagcttacaaattgctacacgaaggccgagcatgtcttcgcctagcaaaattcttaaagcaggaacctacattgttggtgccaatcctggaaacgcttcatgggataaactttcatgcactcgccaattatcaaaccttggatgtttgagaaaccacagtgctgttccaacttgtaagagacccttttctttttccacaagggcaatgtctgaatccagtgaaaacaaggctccttcagggcttccaattgatttgagagggaaaagagctttcattgctggtatagctgatgataatggctatggttgggccatagcaaaatctcttgctgctgctggagctgaaatattggttgggacttgggttcctgcacttaatatatttgagacaagcttgagacgtggaaaattcgaccagtcacgagtgttgcctgacgggtcattgatggagattaagaaggtttatgctttggatgctgtgtttgacaatcctgaagatgtgcctgaagatgtgaaaacgaataagcgatatgcaggatcgtcaaactggaccgtacaggaagctgctgaatgtgtgaaaaaagattttggaagcattgacattcttgtccattcccttgcaaatggcccagaggttagcaaacctcttctggagacatcaaggaaaggctatctcgctgctatctctgcttcgagttactcctttgtttccttgctgaggcattttctgccaattatgaacccaggaggtgcttcaatatctcttacttacattgcctctgaaagaatcattcctgggtatggtggaggtatgagttctgccaaagctgcactagagagtgacacacgggtgcttgcatatgaagctggaaggaaatcaaacattagggtcaacaccatctctgcgggtcctttgggaagccgagcagcaaaagccattgggttcatagacaccatgattgagtattcctacaataatgggcctattcagaaaacactgaccgcagatgaagttgggaatgcagcagccttcttggcatctccattggcctctgccataaccggtgcaaccatatatgtggacaatggtttgaatgcaatgggcgttgcactggacagcccggtgttcaaagaccttaacagcaagaattagagtcttgatcgacgactggactcgagaaattccgtgttttcgtgagcttgcttgtttctttatgagttagtatgtacggcatatgttccccatcggctgtctttttttttctttctttaagagaataaattatggttctaggttgggtcatttagcaactatatatgtagtgatggattattattcctcttatgattgaaaatttgcaagtgagaaaaactatcatgtttcttgtaa

SEQ ID NO: 101249 - protein, 390 aa, Arabidopsis thaliana
  peptide (1)..(390): Ceres Seq. ID no. 13607369
MAATAASSLQIATRRPSMSSPSKILKAGTYIVGANPGNASWDKLSCTRQLSNLGCLRNHSAVPTCKRPFSFSTRAMSESSENKAPSGLPIDLRGKRAFIAGIADDNGYGWAIAKSLAAAGAEILVGTWVPALNIFETSLRRGKFDQSRVLPDGSLMEIKKVYALDAVFDNPEDVPEDVKTNKRYAGSSNWTVQEAAECVKKDFGSIDILVHSLANGPEVSKPLLETSRKGYLAAISASSYSFVSLLRHFLPIMNPGGASISLTYIASERIIPGYGGGMSSAKAALESDTRVLAYEAGRKSNIRVNTISAGPLGSRAAKAIGFIDTMIEYSYNNGPIQKTLTADEVGNAAAFLASPLASAITGATIYVDNGLNAMGVALDSPVFKDLNSKN

SEQ ID NO: 101250 - protein, 373 aa, Arabidopsis thaliana; identical to SEQ ID NO: 23380
  peptide (1)..(373): Ceres Seq. ID no. 13607370

SEQ ID NO: 101251 - protein, 315 aa, Arabidopsis thaliana
  peptide (1)..(315): Ceres Seq. ID no. 13607371
MSESSENKAPSGLPIDLRGKRAFIAGIADDNGYGWAIAKSLAAAGAEILVGTWVPALNIFETSLRRGKFDQSRVLPDGSLMEIKKVYALDAVFDNPEDVPEDVKTNKRYAGSSNWTVQEAAECVKKDFGSIDILVHSLANGPEVSKPLLETSRKGYLAAISASSYSFVSLLRHFLPIMNPGGASISLTYIASERIIPGYGGGMSSAKAALESDTRVLAYEAGRKSNIRVNTISAGPLGSRAAKAIGFIDTMIEYSYNNGPIQKTLTADEVGNAAAFLASPLASAITGATIYVDNGLNAMGVALDSPVFKDLNSKN

SEQ ID NO: 101252 - DNA, 1233 bp, Arabidopsis thaliana
  misc_feature (1)..(1233): Ceres Seq. ID no. 13607372
  misc_feature (1)..(1233): Ortholog of  Ceres SEQ ID NO 15226408 as cited in SEQ ID NO 55563
aattactttagagatttcccaaattccgtctcgaagatgtcaacggagagacgtgcttcgtcgaatccaatgaccaacgaagagaacgctatgttccttgatatattgcatgaagcaccattatttggtcacaggaaatctagaagccttgttggaagttacctctatatgcttctattggcaggttatgctattttagctgctggtgctccttggatgtttcaccgagtccaacagttgaccccttcattgctctgctgctgcgatgttgcgcttttggttgtcacaggtgtctttcaacaatactttgtttatcaagtccagaaaatacgtctccagggttattacagtttcagtcaaaagttgaagcatgttgttcgtctgccatttgcaatcgctgcatatgggactgctgcaatgcttcttgtgatagtgtggaggcctcaaatccacattctttctatttcttctttgcaacggatcatcatgttggttgaagcagtgggcgctggctttttcatgggtttatacatcggttatgtgcaccaatacaattccgtgaattcccggccagatgtcttgaagtcattatattctcctcttcagccgtcaagttctatggaaggtttgaggtattatgaaggccggctttctgatcaacaaacggctttgttacaatatcaacgcgaaaatctccattttctaagcgaggagattctgtgcttgcaagagaaacttagcaaatatgaacaatctgatgatggaagcacacctcaggttgatctcgcacatcttttagctgctcgagatcaagagctgaggacactttcagctgagatgaatcagcttcagtctgagctacggcttgctcgttctttaatagccgagagagatgcagaggtgcagcgtgtcaacagtaccaacaaccagtatatcgaagaaaacgaaagactgagggcaattttgagtgaatggagcatgcgggcagcgaatcttgagagagctttggaagtggaacggatgtcgaactcagaactacagaaggaagtagcaagcacgcgtagaaagcagatgcttgagacaacaacgtctgagcaaccttaattctaatatgggaatcaaagcttatataggtttttaacataatctctaaagtttgatggtgtaactataaagatcatggaatgtgtctacggaaagaagtttgtgtagtaaacggctcttttgtttttt

SEQ ID NO: 101253 - protein, 367 aa, Arabidopsis thaliana; identical to SEQ ID NO: 36679
  peptide (1)..(367): Ceres Seq. ID no. 13607373

SEQ ID NO: 101254 - protein, 355 aa, Arabidopsis thaliana; identical to SEQ ID NO: 36680
  peptide (1)..(355): Ceres Seq. ID no. 13607374

SEQ ID NO: 101255 - protein, 344 aa, Arabidopsis thaliana; identical to SEQ ID NO: 36681
  peptide (1)..(344): Ceres Seq. ID no. 13607375

SEQ ID NO: 101256 - DNA, 735 bp, Arabidopsis thaliana
  misc_feature (1)..(735): Ceres Seq. ID no. 13607387
  misc_feature (1)..(735): Ortholog of  Ceres SEQ ID NO 15178291 as cited in SEQ ID NO 0
attttgctctcaaatcgcgactcctctctgggctctctccttctgtatctctctaaggggaacaacgaaatcatcaccttctcttttatcgtcaccggcgatcattcaagactcgatctccggtaatcagaacattttcattcgccgacatggcgatgaccatcgaagacttgctggacttgctttcatgttttcatctagtatcctcctacagatcctggcatgcgcgatatatggtaactggtggccaatgctatcagcactcatgtatgtagtggtgcctatgccttgtatgttctttggaggaggctcaacccaattccttattagtcgggacggtggagggtggatagacgcagcgaagttcttgaccggagcatcgaccgtgggaagccttgctatcccaatcatcttaaggcacgcacagatgatcgagacaggtgcaatgctcatagagttcacatcattcttcatattcatttgcactgtcatgtgttttcaccgggctagtctcgatgatgactggtaacgtagatgttgctgctcgtgaattactaattggattcgtatgagaaagagagtgtgaagaaaagatgaggttactatgagtggttaagaaagttgtgttcttctccctctttttgtaaagctttgtatcactcaatgtttgtaaaaagttttattcatcactgtgaatcttttcctgaaactaagtgccaaaatattttgtttcgc

SEQ ID NO: 101257 - protein, 175 aa, Arabidopsis thaliana
  peptide (1)..(175): Ceres Seq. ID no. 13607388
FCSQIATPLWALSFCISLRGTTKSSPSLLSSPAIIQDSISGNQNIFIRRHGDDHRRLAGLAFMFSSSILLQILACAIYGNWWPMLSALMYVVVPMPCMFFGGGSTQFLISRDGGGWIDAAKFLTGASTVGSLAIPIILRHAQMIETGAMLIEFTSFFIFICTVMCFHRASLDDDW

SEQ ID NO: 101258 - protein, 113 aa, Arabidopsis thaliana; identical to SEQ ID NO: 21390
  peptide (1)..(113): Ceres Seq. ID no. 13607389

SEQ ID NO: 101259 - protein, 92 aa, Arabidopsis thaliana
  peptide (1)..(92): Ceres Seq. ID no. 13607390
MLSALMYVVVPMPCMFFGGGSTQFLISRDGGGWIDAAKFLTGASTVGSLAIPIILRHAQMIETGAMLIEFTSFFIFICTVMCFHRASLDDDW

SEQ ID NO: 101260 - DNA, 1390 bp, Arabidopsis thaliana
  misc_feature (1)..(1390): Ceres Seq. ID no. 13607397
  misc_feature (1)..(1390): Ortholog of  Ceres SEQ ID NO 13495628 as cited in SEQ ID NO 60727
cactctatatcaaacatttcttttaaaaatgagaaagttgttggcatcgccgtttagttcattactcgccgtcgttttcatttccgtcatctccgtcgtcagatgctgctctcctaaagatcagacggctctcaatgctttcaagtcgtcactgagcgaaccaaacctcggtatcttcaacacttggtctgaaaacactgattgttgcaaggaatggtacggtatcagctgcgatcctgattcgggtcgggtcactgatatttctctccggggagaatctgaagacgccattttccaaaaggcaggccggtccggttatatgtccggttcgattgatccagcagtttgtgacttaaccgcactcacttccctcgttctcgccgactggaaaggaatcaccggagagattcctccgtgcattacttccctagcttcgctccgtatcctcgatctcgccggcaacaagatcaccggggagattcccgcggaaatcggcaaactctcgaaactcgctgttttaaacctcgccgagaatcaaatgtccggcgagattccggcgtcactgacgtcactcatcgagttgaagcatcttgaattgacggaaaatggaatcaccggcgtgatcccggccgatttcggatcgttgaagatgttgagcagagttttactgggccgtaacgaactaaccgggtcaattccagagtcgatctcgggtatggaacggttagcggatctggatctatccaaaaaccatatcgaaggtccgatacccgaatggatgggtaacatgaaggtactctcacttttgaatctcgattgcaattcgttaaccggtccaatccccggttcgcttcttagcaattccggtttagatgttgccaatttgagccgaaatgcgttggaaggaactatacccgacgttttcgggtcaaaaacgtatttagtttcgcttgatctgtcacacaatagtctatcgggtcggatcccggattcgttgtcgtcagctaagtttgtgggacatttggatattagccataacaagctttgtgggcgtattccaacgggttttccttttgatcaccttgaagctacgtcgtttagtgacaaccaatgtctctgcggtggccctttgacgacgtcatgttaataacaaggatatggtttctggttttactgaaccgggttattctttttgctgttgctcttgttcgttgtatcaaacttgtgatattttgcttttcatttcttcgtctttcagattttagtttctaaagctaagatatgttactggcaacggacaggtacaccgatccaatatggtttgcggtctatgtacaatgaatccggatgtaaaatcaaaagcaatgttatagaatttaatttcaagatc

SEQ ID NO: 101261 - protein, 381 aa, Arabidopsis thaliana; identical to SEQ ID NO: 21325
  peptide (1)..(381): Ceres Seq. ID no. 13607398

SEQ ID NO: 101262 - protein, 372 aa, Arabidopsis thaliana; identical to SEQ ID NO: 21326
  peptide (1)..(372): Ceres Seq. ID no. 13607399

SEQ ID NO: 101263 - protein, 275 aa, Arabidopsis thaliana; identical to SEQ ID NO: 21327
  peptide (1)..(275): Ceres Seq. ID no. 13607400

SEQ ID NO: 101264 - DNA, 859 bp, Arabidopsis thaliana
  misc_feature (1)..(859): Ceres Seq. ID no. 13607405
  misc_feature (1)..(859): Ortholog of  Ceres SEQ ID NO 14302000 as cited in SEQ ID NO 52175
  misc_feature (1)..(859): Ortholog of  Ceres SEQ ID NO 14316371 as cited in SEQ ID NO 60113
attctagggttttagagtttccgcacgaatcacgaatctctctctctttcacacacttcacactttcaatatacactctcattatgactaccgaagagaaagagatcctcgccgccaaattggaagaacagaagatcgatctcgataagcccgaagttgaggacgatgatgataacgaagacgatgactctgatgacgatgataaggatgatgacgaggctgatggactagatggagaggcaggaggtaagtcaaaacaaagcagaagtgagaagaagagtcgcaaagccatgctcaagcttggcatgaaacccatcactggtgttagccgagtcaccgtcaaaaagagcaagaatatcttgtttgtcatatcaaagcctgatgtgttcaagagtccagcatcagacacatatgtgatctttggagaggcgaagatcgaggatttgagctctcagatccagtcgcaagcagcagagcaattcaaggcaccagatctcagcaatgtgatctcaaagggtgagtcatcgagcgctgcagtggttcaggatgatgaggaggttgacgaggaaggtgttgagccaaaggacattgagttggtgatgactcaagcaggagtgtctaggccaaatgctgtgaaggctctcaaggctgcagatggagatattgtctctgccatcatggagcttaccacctaaaccaaagtcttttctacttagatgtggtttaacctgagttatgtgccagagattgtccaaagaattcggaaatttttggtttcaatgtttttcatgaagtgattttcgatgttgtatcagtataaacctcataagtttttgattttcagtttgattttatattg

SEQ ID NO: 101265 - protein, 230 aa, Arabidopsis thaliana
  peptide (1)..(230): Ceres Seq. ID no. 13607406
SRVLEFPHESRISLSFTHFTLSIYTLIMTTEEKEILAAKLEEQKIDLDKPEVEDDDDNEDDDSDDDDKDDDEADGLDGEAGGKSKQSRSEKKSRKAMLKLGMKPITGVSRVTVKKSKNILFVISKPDVFKSPASDTYVIFGEAKIEDLSSQIQSQAAEQFKAPDLSNVISKGESSSAAVVQDDEEVDEEGVEPKDIELVMTQAGVSRPNAVKALKAADGDIVSAIMELTT

SEQ ID NO: 101266 - protein, 203 aa, Arabidopsis thaliana; identical to SEQ ID NO: 26528
  peptide (1)..(203): Ceres Seq. ID no. 13607407

SEQ ID NO: 101267 - protein, 134 aa, Arabidopsis thaliana; identical to SEQ ID NO: 26529
  peptide (1)..(134): Ceres Seq. ID no. 13607408

SEQ ID NO: 101268 - DNA, 944 bp, Arabidopsis thaliana
  misc_feature (1)..(944): Ceres Seq. ID no. 13607416
  misc_feature (1)..(944): Ortholog of  Ceres SEQ ID NO 13582619 as cited in SEQ ID NO 56520
  misc_feature (1)..(944): Ortholog of  Ceres SEQ ID NO 13660872 as cited in SEQ ID NO 60830
  misc_feature (1)..(944): Ortholog of  Ceres SEQ ID NO 12616221 as cited in SEQ ID NO 63291
atggaggagacagaaaagaataagggcagcataagtatggttgaggctaatctacctcctggttttagattccatcctagagacgacgagctcgtctgtgactacttaatgagaagaaccgttcgcagcctctatcaaccagttgtcttgatcgacgtcgatcttaacaaatgcgagccttgggacattcctcaaacggcgagagtgggagggaaagaatggtacttttacagccaaaaagaccgtaaatacgcaacaggctacagaacaaaccgggctacggccaccggttattggaaagccaccgggaaagatagagcaatccaaagaaacggtggtcttgtgggtatgagaaagacacttgtgttttaccgaggtcgatcccctaaaggtcgtaaaactgattgggtcatgcatgagtttcgtctccaaggaaaacttcttcaccactcccctaattctctcgaggaagagtgggtattgtgtagagttttccacaagaacagcaacggagctgatatagacgacatcacaaggagctgctctgatgcaacagcttctgcattcatggactcttacatcaacttcgaccatcatcacatcatcaatcagcatgtaccctgcttctccaataatttgtcacataaccaaaccaaccaatccggtttaatctccaagaactccagcccattgtttaatgcttcccctgatcaaatgattctcagaactttgctaagtcaactcacaaaaaaagtcgaagaatcacagagtcgtggagacggaagctcagagagccaattgaccgacattggcatcccaagccatgcatggaattactgattatgaataaggcttaccagatatatcactatgtataagtatcatattcatgattcgaaacaatttattcaaccctcttatgtaaactgttataccattatatt

SEQ ID NO: 101269 - protein, 279 aa, Arabidopsis thaliana
  peptide (1)..(279): Ceres Seq. ID no. 13607417
MEETEKNKGSISMVEANLPPGFRFHPRDDELVCDYLMRRTVRSLYQPVVLIDVDLNKCEPWDIPQTARVGGKEWYFYSQKDRKYATGYRTNRATATGYWKATGKDRAIQRNGGLVGMRKTLVFYRGRSPKGRKTDWVMHEFRLQGKLLHHSPNSLEEEWVLCRVFHKNSNGADIDDITRSCSDATASAFMDSYINFDHHHIINQHVPCFSNNLSHNQTNQSGLISKNSSPLFNASPDQMILRTLLSQLTKKVEESQSRGDGSSESQLTDIGIPSHAWNY

SEQ ID NO: 101270 - protein, 267 aa, Arabidopsis thaliana
  peptide (1)..(267): Ceres Seq. ID no. 13607418
MVEANLPPGFRFHPRDDELVCDYLMRRTVRSLYQPVVLIDVDLNKCEPWDIPQTARVGGKEWYFYSQKDRKYATGYRTNRATATGYWKATGKDRAIQRNGGLVGMRKTLVFYRGRSPKGRKTDWVMHEFRLQGKLLHHSPNSLEEEWVLCRVFHKNSNGADIDDITRSCSDATASAFMDSYINFDHHHIINQHVPCFSNNLSHNQTNQSGLISKNSSPLFNASPDQMILRTLLSQLTKKVEESQSRGDGSSESQLTDIGIPSHAWNY

SEQ ID NO: 101271 - protein, 243 aa, Arabidopsis thaliana
  peptide (1)..(243): Ceres Seq. ID no. 13607419
MRRTVRSLYQPVVLIDVDLNKCEPWDIPQTARVGGKEWYFYSQKDRKYATGYRTNRATATGYWKATGKDRAIQRNGGLVGMRKTLVFYRGRSPKGRKTDWVMHEFRLQGKLLHHSPNSLEEEWVLCRVFHKNSNGADIDDITRSCSDATASAFMDSYINFDHHHIINQHVPCFSNNLSHNQTNQSGLISKNSSPLFNASPDQMILRTLLSQLTKKVEESQSRGDGSSESQLTDIGIPSHAWNY

SEQ ID NO: 101272 - DNA, 1317 bp, Arabidopsis thaliana
  misc_feature (1)..(1317): Ceres Seq. ID no. 13607426
  misc_feature (1)..(1317): Ortholog of  Ceres SEQ ID NO 13596039 as cited in SEQ ID NO 62117
acaattcagatttcaatttctcaaaatcttaaaaactttctctcaattctctctaccgtgatcaagatgcagatctttgttaagactctcaccggaaagacaatcaccctcgaggtggaaagctccgacaccatcgacaacgttaaggccaagatccaggataaggagggcattcctccggatcagcagaggcttattttcgccggcaagcagctagaggatggccgtacgttggctgattacaatatccagaaggaatccaccctccacttggtcctcaggctccgtggtggtatgcagattttcgttaaaaccctaacgggaaagacgattactcttgaggtggagagttctgacaccatcgacaacgtcaaggccaagatccaagacaaagagggtattcctccggaccagcagagattgatcttcgccggaaaacaacttgaagatggcagaactttggccgactacaacattcagaaggagtccacactccacttggtcttgcgtctgcgtggaggtatgcagatcttcgtgaagactctcaccggaaagaccatcactttggaggtggagagttctgacaccattgataacgtgaaagccaagatccaggacaaagagggtatcccaccggaccagcagagattgatcttcgccggaaagcaacttgaagatggaagaactttggctgactacaacattcagaaggagtccacacttcacttggtcttgcgtctgcgtggaggtatgcagatcttcgtgaagactctcaccggaaagactatcactttggaggtagagagctctgacaccattgacaacgtgaaggccaagatccaggataaggaaggaatccctccggaccagcagaggttgatctttgccggaaaacaattggaggatggtcgtactttggcggattacaacatccagaaggagtcgacccttcacttggtgttgcgtctgcgtggaggtatgcagatcttcgtcaagactttgaccggaaagaccatcacccttgaagtggaaagctccgacaccattgacaacgtcaaggccaagatccaggacaaggaggtattcctccggaccagcagcgtctcatcttcgctggaaagcagcttgaggatggacgtactttggccgactacaacatccagaaggagtctactcttcacttggtcctgcgtcttcgtggtggtttctaaatctcgtctctgttatgcttaagaagttcaatgtttcgtttcatgtaaaactttggtggtttgtgttttggggccttgtataatccctgatgaataagtgttctac

SEQ ID NO: 101273 - protein, 410 aa, Arabidopsis thaliana; identical to SEQ ID NO: 100816
  peptide (1)..(410): Ceres Seq. ID no. 13607427

SEQ ID NO: 101274 - protein, 388 aa, Arabidopsis thaliana; identical to SEQ ID NO: 100817
  peptide (1)..(388): Ceres Seq. ID no. 13607428

SEQ ID NO: 101275 - protein, 312 aa, Arabidopsis thaliana; identical to SEQ ID NO: 100818
  peptide (1)..(312): Ceres Seq. ID no. 13607429

SEQ ID NO: 101276 - DNA, 2984 bp, Arabidopsis thaliana
  misc_feature (1)..(2984): Ceres Seq. ID no. 13607434
  misc_feature (1)..(2984): Ortholog of  Ceres SEQ ID NO 15170666 as cited in SEQ ID NO 63386
tttaacgaaaaaaaaaaaaactttggcctctccggtgactcttccttcttctgctaccgaacttttcgcttccttctctgaccaatttttttcaacaacctctcttcttcaacaaattctcttctcaaatcctccaaatcctctctgccatgaacgctactttcttcctcctctccaccaccgtctccaccgtcacaatcaccggattcaacggtctcgatttctcatcttagaaccacatgcatcccttctgttgcgttacaactgtctccgatcactctccttcgatgcctccgttacctgaaccacaaccgcctctaccgaattacgccgccgattttggttcggcgagatccgaaccgattataactcgatctgcttctcaaagttataatcattcaggtcaattcaataacaatcttattcatagtctctcgtttaatcatcaccagagtgatgtaacggatcgattggggcaacgcgttttagctttgccggcggcggttagagaaccaccggttgatgttaagattaacgatatcgttgggaatggaattgctgggattttgtataagtgggtgaattatggtagaggatggagacctaggtggtttgttttgcaagatggtgttctttcttattataagattcatggacctgataagatctttgttagtcctgaaactgagaaaggatctaaagtcattggagatgagtctgctcgtatgatctctaggcataatcgccgtggcggtagcagtagtagttgccagcttcgtcgcaagccattcggagaagtccatctcaaggtttcttcagttagagagagtagatcagatgataagaggttttccatttttactggtaccaagaggcttcatttgcgtgcggagacgcgagaggaccgaacaacttgggttgaggctttacaagctgttaaagatatgtttccaaggatgtctaatagtgagttgatggctccgactaacaatttggctatgtcgacggagaagattaggttaaggttgattgaggaaggagtaagtgagttagctattcaggactgtgagcaaattatgaagtctgagttctcagcacttcagagccagctggtgcttcttaaacagaagcagtggcttctcattgatactcttaggcagttggagacagaaaaggtagatcttgagaacacagttgtagatgaaagtcaaagacaggctgataatggatgttccggtgaattaagacacgagaagttcagtgaaggcactgccactgagtctgatgatgataatgaacgaggtgatgccgccgaggaggaatttgatgaggaagaaaataccttttttgatacacgtgattttctttcttcaagttctttcaagagtagtggttctggttttcgtacatcatcattttcgtccgatgaagatggctttgagtctgaagatgatattgatccttccatcaagtctattggatgcaattatcctcgcgtcaaaaggaggaagaatttacctgatccggttgaaaaagagaaaagtgttagcctttggtcaatgatcaaagacaatatagggaaggatctcacaaaagtctgtcttcctgtttacttcaacgagccactttcttctttacagaaatgttttgaggatttggaatattcgtaccttcttgaccgagcatttgaatatggcaaaaggggaaatagcctcatgaggatacttaatgtagctgcttttgctgtatctgggtatgcatcaactgaaggaagaatttgcaaaccttttaatccattgttaggtgaaacatacgaggcagactatccagacaaaggccttcgatttttttcagaaaaggtcagtcatcatcctatggttgtcgcatgccattgtgatggcaccggatggaaattctggggagacagcaatcttaggagcaaattctggggtcgatctattcagcttgatcctgttggtgtattgactttgcaatttgatgatggagaaatccttcagtggagtaaggtgactacatcaatatacaatctcatacttggtaaactatactgtgatcactatggtactatgcgtattgagggtagtgcagaatactcatgtaaacttaaattcaaggagcagtccatcatagaccgaaatcctcatcaggttcatggtatagttcaaaacaagagtgggaagacagtggcaactatgtttgggaaatgggatgagagcatacactttgtgacgggtgattgttctggaaaagggaaattgagtgaagatatgtcaggagctcaacttctctggaaacggagcaaacctcctggaaacgcaacaaagtataatctaacacgttttgcaatcacattgaatgagcttacacctgggcttaaggagaggctgccaccaacggattcaaggctgcgaccggaccagaggtatctcgagaacggagagtttgaaatggccaacacagaaaagttgcggctggaacagcgacaacgtcaggcgaggaagatgcaggagagaggatggaagccgaggtggttcatgaaggagaaaggaagcgagtcttaccgatacaaaggaggttactgggaagcccgagaggatggatcatgggtagactgtccagacatcttcggccacatcgattccgatcaacaaatgatagagtaaaacgaaattaccattcacatcgattcttgaatcacgaagtattaaattcctcctatcttcctttctaattacgttttcgtttcttctattatttttcttcctttttcatctcattattctttactcgccatttcacgttacaggacctttacctttagtctctttttttcttttcttctttgtatatcatgaaatagtttcgcgtcatacccaaatttgtccaatccttgtaagtggaagaatgtgctccaaatcatacatggctatattgaataagcaaaaggaagaaagttacttatg

SEQ ID NO: 101277 - protein, 814 aa, Arabidopsis thaliana
  peptide (1)..(814): Ceres Seq. ID no. 13607435
MHPFCCVTTVSDHSPSMPPLPEPQPPLPNYAADFGSARSEPIITRSASQSYNHSGQFNNNLIHSLSFNHHQSDVTDRLGQRVLALPAAVREPPVDVKINDIVGNGIAGILYKWVNYGRGWRPRWFVLQDGVLSYYKIHGPDKIFVSPETEKGSKVIGDESARMISRHNRRGGSSSSCQLRRKPFGEVHLKVSSVRESRSDDKRFSIFTGTKRLHLRAETREDRTTWVEALQAVKDMFPRMSNSELMAPTNNLAMSTEKIRLRLIEEGVSELAIQDCEQIMKSEFSALQSQLVLLKQKQWLLIDTLRQLETEKVDLENTVVDESQRQADNGCSGELRHEKFSEGTATESDDDNERGDAAEEEFDEEENTFFDTRDFLSSSSFKSSGSGFRTSSFSSDEDGFESEDDIDPSIKSIGCNYPRVKRRKNLPDPVEKEKSVSLWSMIKDNIGKDLTKVCLPVYFNEPLSSLQKCFEDLEYSYLLDRAFEYGKRGNSLMRILNVAAFAVSGYASTEGRICKPFNPLLGETYEADYPDKGLRFFSEKVSHHPMVVACHCDGTGWKFWGDSNLRSKFWGRSIQLDPVGVLTLQFDDGEILQWSKVTTSIYNLILGKLYCDHYGTMRIEGSAEYSCKLKFKEQSIIDRNPHQVHGIVQNKSGKTVATMFGKWDESIHFVTGDCSGKGKLSEDMSGAQLLWKRSKPPGNATKYNLTRFAITLNELTPGLKERLPPTDSRLRPDQRYLENGEFEMANTEKLRLEQRQRQARKMQERGWKPRWFMKEKGSESYRYKGGYWEAREDGSWVDCPDIFGHIDSDQQMIE

SEQ ID NO: 101278 - protein, 798 aa, Arabidopsis thaliana
  peptide (1)..(798): Ceres Seq. ID no. 13607436
MPPLPEPQPPLPNYAADFGSARSEPIITRSASQSYNHSGQFNNNLIHSLSFNHHQSDVTDRLGQRVLALPAAVREPPVDVKINDIVGNGIAGILYKWVNYGRGWRPRWFVLQDGVLSYYKIHGPDKIFVSPETEKGSKVIGDESARMISRHNRRGGSSSSCQLRRKPFGEVHLKVSSVRESRSDDKRFSIFTGTKRLHLRAETREDRTTWVEALQAVKDMFPRMSNSELMAPTNNLAMSTEKIRLRLIEEGVSELAIQDCEQIMKSEFSALQSQLVLLKQKQWLLIDTLRQLETEKVDLENTVVDESQRQADNGCSGELRHEKFSEGTATESDDDNERGDAAEEEFDEEENTFFDTRDFLSSSSFKSSGSGFRTSSFSSDEDGFESEDDIDPSIKSIGCNYPRVKRRKNLPDPVEKEKSVSLWSMIKDNIGKDLTKVCLPVYFNEPLSSLQKCFEDLEYSYLLDRAFEYGKRGNSLMRILNVAAFAVSGYASTEGRICKPFNPLLGETYEADYPDKGLRFFSEKVSHHPMVVACHCDGTGWKFWGDSNLRSKFWGRSIQLDPVGVLTLQFDDGEILQWSKVTTSIYNLILGKLYCDHYGTMRIEGSAEYSCKLKFKEQSIIDRNPHQVHGIVQNKSGKTVATMFGKWDESIHFVTGDCSGKGKLSEDMSGAQLLWKRSKPPGNATKYNLTRFAITLNELTPGLKERLPPTDSRLRPDQRYLENGEFEMANTEKLRLEQRQRQARKMQERGWKPRWFMKEKGSESYRYKGGYWEAREDGSWVDCPDIFGHIDSDQQMIE

SEQ ID NO: 101279 - protein, 652 aa, Arabidopsis thaliana
  peptide (1)..(652): Ceres Seq. ID no. 13607437
MISRHNRRGGSSSSCQLRRKPFGEVHLKVSSVRESRSDDKRFSIFTGTKRLHLRAETREDRTTWVEALQAVKDMFPRMSNSELMAPTNNLAMSTEKIRLRLIEEGVSELAIQDCEQIMKSEFSALQSQLVLLKQKQWLLIDTLRQLETEKVDLENTVVDESQRQADNGCSGELRHEKFSEGTATESDDDNERGDAAEEEFDEEENTFFDTRDFLSSSSFKSSGSGFRTSSFSSDEDGFESEDDIDPSIKSIGCNYPRVKRRKNLPDPVEKEKSVSLWSMIKDNIGKDLTKVCLPVYFNEPLSSLQKCFEDLEYSYLLDRAFEYGKRGNSLMRILNVAAFAVSGYASTEGRICKPFNPLLGETYEADYPDKGLRFFSEKVSHHPMVVACHCDGTGWKFWGDSNLRSKFWGRSIQLDPVGVLTLQFDDGEILQWSKVTTSIYNLILGKLYCDHYGTMRIEGSAEYSCKLKFKEQSIIDRNPHQVHGIVQNKSGKTVATMFGKWDESIHFVTGDCSGKGKLSEDMSGAQLLWKRSKPPGNATKYNLTRFAITLNELTPGLKERLPPTDSRLRPDQRYLENGEFEMANTEKLRLEQRQRQARKMQERGWKPRWFMKEKGSESYRYKGGYWEAREDGSWVDCPDIFGHIDSDQQMIE

SEQ ID NO: 101280 - DNA, 626 bp, Arabidopsis thaliana
  misc_feature (1)..(626): Ceres Seq. ID no. 13607450
  misc_feature (1)..(626): Ortholog of  Ceres SEQ ID NO 14310057 as cited in SEQ ID NO 225
  misc_feature (1)..(626): Ortholog of  Ceres SEQ ID NO 15225572 as cited in SEQ ID NO 61651
attcttcaacagaattagggttacatgtgcggactctatataaatcttttttgcctcctacgaatcacaagtaataagaaaacaatggagcaaacttttattatgatcaagcctgacggcgtccagagaggactcatcggtgaagtcatctgcaggtttgagaagaagggtttcactttgaaaggtctgaagttgatcagtgtagagagatcttttgctgagaagcactacgaagacttatcttcaaagtctttcttcagtggactcgttgactacattgtatccggccctgttgttgctatgatctgggaaggaaagaatgttgtcttgaccggaagaaagatcattggagctaccaacccagcagcttctgagcctggaactatccgtggggactttgctattgacattggcaggaacgtgatccatggtagtgactctgtcgagagtgcaagaaaggagattgctttgtggttccctgatggacctgtcaactggcagagcagcgttcacccttgggtctatgaaacttgatgatctgttgctttttcagtagtgtgttttcgacattgcttgtcttttgaacaagacttctatatttaagttgagtttgattatccttctct

SEQ ID NO: 101281 - protein, 169 aa, Arabidopsis thaliana
  peptide (1)..(169): Ceres Seq. ID no. 13607451
MCGLYINLFCLLRITSNKKTMEQTFIMIKPDGVQRGLIGEVICRFEKKGFTLKGLKLISVERSFAEKHYEDLSSKSFFSGLVDYIVSGPVVAMIWEGKNVVLTGRKIIGATNPAASEPGTIRGDFAIDIGRNVIHGSDSVESARKEIALWFPDGPVNWQSSVHPWVYET

SEQ ID NO: 101282 - protein, 149 aa, Arabidopsis thaliana; identical to SEQ ID NO: 21514
  peptide (1)..(149): Ceres Seq. ID no. 13607452

SEQ ID NO: 101283 - protein, 143 aa, Arabidopsis thaliana; identical to SEQ ID NO: 21515
  peptide (1)..(143): Ceres Seq. ID no. 13607453

SEQ ID NO: 101284 - DNA, 1265 bp, Arabidopsis thaliana
  misc_feature (1)..(1265): Ceres Seq. ID no. 13607454
  misc_feature (1)..(1265): Ortholog of  Ceres SEQ ID NO 13596891 as cited in SEQ ID NO 62868
  misc_feature (1)..(1265): Ortholog of  Ceres SEQ ID NO 12617235 as cited in SEQ ID NO 63990
  misc_feature (1)..(1265): Ortholog of  Ceres SEQ ID NO 13655371 as cited in SEQ ID NO 68945
agatctgaccaaagcaagaagggcttttactaagagtaaaacagaggaatatggagaccaccgtgaaaaacaagcaagtgatactgagaaattatgtgaagggtatccctaaagaatctgacctaatgattatcacagcttcagaccccgtggaactcaaggttaagcccggatcagcggcggttatggtgaggaatctttacttgtcttgtgacccttacatggggattctcatgagagaaccaactccttccactctagcacttttggatgccttcatccccggaaagcctatagctggaattggagtgtctcaagtaatagattctgatgatccatcttttacgaaaggcgatatgatttggggaattgtgaactgggaggagtttagtactatcaacccggctgctatattcaaaatcgacgtcaatatcaatgttcctctcagctactatactggaatcctcggtatgataggtttaactgcttacgccgggtttttcgagatatgttcacctaagaaaggagacacagtgttcgtgtctgctgcttctggcgcggttggacagctcgtgggtcagtttgcaaagttgatgggctgctatgttgttggaagtgccggaagtaaacaaaaggtcgatctcctgctgaacaaattcggttacgatgatgcattcaattataaggaagagcctgaccttgactccgccttgaagaggtgtgtaccaaaaggtattgacatatactttgagaacgtgggaggcaaaatgcttgacgcggttctacttaacatgaaaacgtatggacgaatcgctgtatgtgggatgatatctcagtaccatcttgaaaccagagacaggttacaaaatctacctgacatcatattcaagaagataaggatgcaagggtttgcttcttatgactttatagatagattcccaaagttcttggagtttgttcttccctacataaaagaagagaaattagcgtacgtggaagacattgttgaaggactcgagaatggtcctgctgctcttgtaggacttcttcatggaaaaaacgttggtaagcaagttctcaaggttgcttgagagtaaagaaatctatccatgtatggatatatgtaaaattacaaaaaaactaccttgtatgtcgtattttaagggtatgggttctaattggaatttatatgaaataaaagggcatatagttaaattccatattttcgtgtttaaatgggcccaagtgaagcgcagcttaataat

SEQ ID NO: 101285 - protein, 346 aa, Arabidopsis thaliana; identical to SEQ ID NO: 21097
  peptide (1)..(346): Ceres Seq. ID no. 13607455

SEQ ID NO: 101286 - protein, 321 aa, Arabidopsis thaliana; identical to SEQ ID NO: 21098
  peptide (1)..(321): Ceres Seq. ID no. 13607456

SEQ ID NO: 101287 - protein, 301 aa, Arabidopsis thaliana; identical to SEQ ID NO: 21099
  peptide (1)..(301): Ceres Seq. ID no. 13607457

SEQ ID NO: 101288 - DNA, 653 bp, Arabidopsis thaliana
  misc_feature (1)..(653): Ceres Seq. ID no. 13607482
  misc_feature (1)..(653): Ortholog of  Ceres SEQ ID NO 13594922 as cited in SEQ ID NO 55751
ctggaactagccactgcgatcggagaagaaaaagctcgagagacgccatggaaatttcccaagctcgttcaagcttcgtttgtcttcttcttctgttactctccatgtgtttcgttccctgcgtcttttccaaatctcctcgtcctatctccgatgtggagatcaggcagaagaagagcgaatgctacggtgatatagagagtgggttatggggttggcaatgcaaatcttctgcaatagcgaaagagaattgtgcgctgcgatgcctttctccggtttgctatcaactcatttatgagagtgatccgcttgaagaaggtgaaaaagatttgattaggagccaagagtacaagtattgtatgtacaagtcatcactcggggaaagcttagagggtgttcgaggcatcttttgatggtatcaaataagactttctcagtgaagacatttgccaaaatctgagctaagctcttgaatttctgatcagtagtattctgctctgtcgcgtttgaagccatgtaaggcttcttttattataaacctcaatttttgggttaatggttgtttatatgaaacgtttacgtttatgattggcaaatccactgaatcttgaaaccattgtacaaatcagtcttaatacgcacagattggtccc

SEQ ID NO: 101289 - protein, 136 aa, Arabidopsis thaliana
  peptide (1)..(136): Ceres Seq. ID no. 13607483
GTSHCDRRRKSSRDAMEISQARSSFVCLLLLLLSMCFVPCVFSKSPRPISDVEIRQKKSECYGDIESGLWGWQCKSSAIAKENCALRCLSPVCYQLIYESDPLEEGEKDLIRSQEYKYCMYKSSLGESLEGVRGIF

SEQ ID NO: 101290 - protein, 121 aa, Arabidopsis thaliana
  peptide (1)..(121): Ceres Seq. ID no. 13607484
MEISQARSSFVCLLLLLLSMCFVPCVFSKSPRPISDVEIRQKKSECYGDIESGLWGWQCKSSAIAKENCALRCLSPVCYQLIYESDPLEEGEKDLIRSQEYKYCMYKSSLGESLEGVRGIF

SEQ ID NO: 101291 - protein, 102 aa, Arabidopsis thaliana
  peptide (1)..(102): Ceres Seq. ID no. 13607485
MCFVPCVFSKSPRPISDVEIRQKKSECYGDIESGLWGWQCKSSAIAKENCALRCLSPVCYQLIYESDPLEEGEKDLIRSQEYKYCMYKSSLGESLEGVRGIF

SEQ ID NO: 101292 - DNA, 1209 bp, Arabidopsis thaliana
  misc_feature (1)..(1209): Ceres Seq. ID no. 13607494
  misc_feature (1)..(1209): Ortholog of  Ceres SEQ ID NO 15177991 as cited in SEQ ID NO 53915
  misc_feature (1)..(1209): Ortholog of  Ceres SEQ ID NO 15174347 as cited in SEQ ID NO 58577
  misc_feature (1)..(1209): Ortholog of  Ceres SEQ ID NO 13596609 as cited in SEQ ID NO 63070
  misc_feature (1)..(1209): Ortholog of  Ceres SEQ ID NO 12616895 as cited in SEQ ID NO 63909
  misc_feature (1)..(1209): Ortholog of  Ceres SEQ ID NO 13598574 as cited in SEQ ID NO 69083
aacagatttcgtaacggacaaagttcccaattctttttttttgcataataagatctgaaatcggagatagaaaaaaaaatcacatttttatttccgccggaacaaaaagcgatggttcagtgtagcaacaatctcctcggaatcctcaatttcttcacattcctcctctcaatcccaattctctccgccgggatctggctcggcaaaaatgcagcaaccgaatgcgaacgtttcctcgacaaaccaatggtcgtactcggaatcttcctcatgttcgtctcaatcgccggactcgtcggtgcttgttgccgtgtctcttgcctcctctggctttacctcttcgctatgttcctcctcattctcctcggcttctgtttcacaatcttcgctttcgcagtcacaaaccgcggcgccggtgaggttatatcggatcgagggtataaagagtatcatgtcgccgattactctaattggttgcagaaacgtgtcaacaatgctaagaattgggaacggatcaggagttgtttgatgtactctgacgtttgctccacttatcgtactcgttatgccagcattaacgttgaagatttctacaaatctaatcttaatgctcttcagtctggttgttgtaagccgtccaatgactgtaacttcacctatgtgaacccgactacttggacaaagactcctggtccatacaaaaacgaggactgtaatgtgtgggacaacaaaccaggaactctctgctacgactgtgaagcctgcaaggctggtctgcttgacaacatcaagaactcatggaaaaaggtggctaaggtcaacattgtcttcctcatattcctcattatcgtctactctgttggttgttgtgcgttcaggaacaacaggaaacgcagttggtaatagattctaatgcgttgaaaccaagactaaggccagagaagatatctgaagtgtcatcatcttactgtcaagtaagttaaagcagcatttaagacaactcgttgatcgcttgtcttgtgtgtgggggattgcaatttcaatgtattttctctcttaaatttgcaacataatgagttacaaaagcacttgcttgtgcttctatttcgactcttttgtgtgttgagtagcttatacatctgttgagacgagtgagatttgtaaaagaagttccatttcactttgcgttattatcattttcatattctt

SEQ ID NO: 101293 - protein, 263 aa, Arabidopsis thaliana; identical to SEQ ID NO: 25093
  peptide (1)..(263): Ceres Seq. ID no. 13607495

SEQ ID NO: 101294 - protein, 218 aa, Arabidopsis thaliana; identical to SEQ ID NO: 25094
  peptide (1)..(218): Ceres Seq. ID no. 13607496

SEQ ID NO: 101295 - protein, 210 aa, Arabidopsis thaliana; identical to SEQ ID NO: 25095
  peptide (1)..(210): Ceres Seq. ID no. 13607497

SEQ ID NO: 101296 - DNA, 769 bp, Arabidopsis thaliana
  misc_feature (1)..(769): Ceres Seq. ID no. 13607498
  misc_feature (1)..(769): Ortholog of  Ceres SEQ ID NO 15225138 as cited in SEQ ID NO 65710
  misc_feature (1)..(769): Ortholog of  Ceres SEQ ID NO 15176713 as cited in SEQ ID NO 0
acgattctcccgccaccacaccacagctttttgcttcatctccttcttactctctgtgtctctaactcctcgtgcactcagacatcacagatatggcttgtgttcggtcgattggttctttaacttctgtcaaccattctcaacgaaatgttcctcgctcaggcattgtcttatcttcatgctctgttcttcccatcaaaagctcatctttcactggatcccctgtttctctcccgcgggctcaaccatcatcccgaacagctctaagaccgatgaaacccgtctctatcacgatgatggtaaagccggcgctccaattcatccaagggacggatgagatgacaatccctgatgttaagctgactcgatcaagagacggaagcaacggaatggcactgttctctttcgaccaaccatccgttttcgactcgagcggtgaagtcggagagattacaggattgtacatgattgatgaggaaggtgtgattcagtcgacggatgtgaacgcgagattcgtgaatgggaaaccggaagggattgtggcgaagcacataatgcgatcgccgaaagaatgggacaggttcatgaggtttatggagcgatactcggaccagaatggcttgcagtttgttaagaagcaatgaggttggagagaattttcaatgagcaaaacaaaatgtgtatgttacattaaattttttcactcttttgatttataatcttgtactctcctagttttgatctttacttgagtttcaacttacaatgg

SEQ ID NO: 101297 - protein, 183 aa, Arabidopsis thaliana; identical to SEQ ID NO: 26298
  peptide (1)..(183): Ceres Seq. ID no. 13607499

SEQ ID NO: 101298 - protein, 123 aa, Arabidopsis thaliana; identical to SEQ ID NO: 26299
  peptide (1)..(123): Ceres Seq. ID no. 13607500

SEQ ID NO: 101299 - protein, 116 aa, Arabidopsis thaliana; identical to SEQ ID NO: 26300
  peptide (1)..(116): Ceres Seq. ID no. 13607501

SEQ ID NO: 101300 - DNA, 1158 bp, Arabidopsis thaliana
  misc_feature (1)..(1158): Ceres Seq. ID no. 13607502
  misc_feature (1)..(1158): Ortholog of  Ceres SEQ ID NO 13599444 as cited in SEQ ID NO 517
  misc_feature (1)..(1158): Ortholog of  Ceres SEQ ID NO 15169431 as cited in SEQ ID NO 60449
  misc_feature (1)..(1158): Ortholog of  Ceres SEQ ID NO 12615444 as cited in SEQ ID NO 62593
  misc_feature (1)..(1158): Ortholog of  Ceres SEQ ID NO 14302204 as cited in SEQ ID NO 63150
ctaaacccctttctccacgatcttccttttcctctctctgcgacttgaagcaaagtttccagaaaaagagatgaacaacgtcaaagttccaaagataccaggtggtggtgccatttcgacgttgcttaaggttgggattattggtgggcttggtctctatggtgctacgcacagtctctacaatgttgaaggaggacatcgagccatcatgttcaatcgtttagtcggtattaaagataaggtttaccctgagggtacacaccttatgattccttggtttgaaaggccggtcatctatgacgttcgtgctcgaccttaccttgttgagagtacatccggaagccgtgatcttcagatggtgaaaattgggcttagggttctcacacgtcccatggcagaccagttacctgaaatctacagaagccttggtgagaactacagcgagagagttctaccttctataatcaacgagactttgaaagctgtggttgctcagtacaatgcaagccagcttattactcagagagaggcggtcagtagggagatcaggaagattctgactgaacgagcagcaaacttcaatgttgcgcttgacgatgtgtccatcacaaacctgacattcgggaaggagttcacagctgccattgaagcaaagcaggtggcggctcaagaggctgagcgggctaagttcattgttgagaaggccgaacaagacaagagaagtgctgttatccgcgcccagggagaagccaagagtgctcagctcattggtcaagcaattgcaaacaaccaagcgtttatcacgctcaggaagatcgaggctgcaagagagattgcacagaccatagcaaactcggcgaacaaggtttacttgagctcagacgatcttttgcttaacctacaagggatgaatttggatgttgatgcaaagaactagagaggtttcttaagtaaaactgcatgtgggtcatttcgtcttttaagttcctagaatccgttggaacaaaagcttgatttgtactactaaatactacttttaaaattcttgggatcagtctatctcaaggtgaaagttgaaaaagaagatactgtcttgctgaatgagttaattgtaataaacttgtcgtttgggggagaaaaacacttgcatttggattt

SEQ ID NO: 101301 - protein, 288 aa, Arabidopsis thaliana; identical to SEQ ID NO: 25453
  peptide (1)..(288): Ceres Seq. ID no. 13607503

SEQ ID NO: 101302 - protein, 242 aa, Arabidopsis thaliana; identical to SEQ ID NO: 25454
  peptide (1)..(242): Ceres Seq. ID no. 13607504

SEQ ID NO: 101303 - protein, 223 aa, Arabidopsis thaliana; identical to SEQ ID NO: 25455
  peptide (1)..(223): Ceres Seq. ID no. 13607505

SEQ ID NO: 101304 - DNA, 722 bp, Arabidopsis thaliana
  misc_feature (1)..(722): Ceres Seq. ID no. 13607506
  misc_feature (1)..(722): Ortholog of  Ceres SEQ ID NO 12557737 as cited in SEQ ID NO 81
ctagtttaatgtcttggtataaaagcctatattttgcatttttcatccgactctctgcgttaggtttcattttagcggcagacgagagagcaaaagcaaggagaaaccctaaccatggcgacacaaccagctactgaatctgtgcaatgcttcggaaggaagaagaccgcagtggccgtcactcactgcaagcgtggatctggtttaattaagctcaacggttgcccaatcgagcttttccagccagagatcctccgattcaagatcttcgagccgattcttctcctcggaaagcaccgtttcgcaggtgtgaacatgaggatccgtgtcaacggtggtggtcacacatcacaggtttacgccatccgtcagagtatcgcgaaggctcttgttgcgtactaccagaagtatgtggatgagcagtcgaagaaggagattaaagatatcttggtgaggtatgataggactctgcttgtggcggatccgaggaggtgtgagccgaagaagtttggtggtcgtggtgctcgttctcgttaccagaagagttaccgttaaacaaagctgggttttttttttttcaatttcgattcatctcaaggtttttggagtttttgattatggacttgtgagactcttagaatttctgttttatgatttattggataactgtgattctccaagaacttatgtcttatatgattttgtcttcatttcgttgcttc

SEQ ID NO: 101305 - protein, 146 aa, Arabidopsis thaliana [sequence omitted]

SEQ ID NO: 101306 - protein, 88 aa, Arabidopsis thaliana
  peptide (1)..(88): Ceres Seq. ID no. 13607508
MIGLCLWRIRGGVSRRSLVVVVLVLVTRRVTVKQSWVFFFSISIHLKVFGVFDYGLVRLLEFLFYDLLDNCDSPRTYVLYDFVFISLL

SEQ ID NO: 101307 - protein, 79 aa, Arabidopsis thaliana; identical to SEQ ID NO: 21210
  peptide (1)..(79): Ceres Seq. ID no. 13607509

SEQ ID NO: 101308 - DNA, 1975 bp, Arabidopsis thaliana
  misc_feature (1)..(1975): Ceres Seq. ID no. 13607514
  misc_feature (1)..(1975): Ortholog of  Ceres SEQ ID NO 15178931 as cited in SEQ ID NO 1125
  misc_feature (1)..(1975): Ortholog of  Ceres SEQ ID NO 13596648 as cited in SEQ ID NO 63080
  misc_feature (1)..(1975): Ortholog of  Ceres SEQ ID NO 13584744 as cited in SEQ ID NO 69137
atggaacatggatcatcccgtggctttatttggctgattctatttctcgattttgtttccagagtcaccggaaaaacacaagttgatgctctcattgctctaagaagcagtttatcatcaggtgaccatacaaacaatatactccaaagctggaatgccactcacgttactccatgttcatggtttcatgttacttgcaatactgaaaacagtgttactcgtcttgacctggggagtgctaatctatctggagaactggtgccacagcttgctcagcttccaaatttgcagtacttggaactttttaacaataatattactggggagatacctgaggagcttggcgacttgatggaactagtaagcttggacctttttgcaaacaacataagcggtcccatcccttcctctcttggcaaactaggaaaactccgcttcttgcgtctttataacaacagcttatctggagaaattccaaggtctttgactgctctgccgctggatgttcttgatatctcaaacaatcggctcagtggagatattcctgttaatggttccttttcgcagttcacttctatgagttttgccaataataaattaaggccgcgacctgcatctccttcaccatcaccttcaggaacgtctgcagcaatagtagtgggagttgctgcgggtgcagcacttctatttgcgcttgcttggtggctgagaagaaaactgcagggtcactttcttgatgtacctgctgaagaagacccagaggtttatttaggacaatttaaaaggttctccttgcgtgaactgctagttgctacagagaaatttagcaaaagaaatgtattgggcaaaggacgttttggtatattgtataaaggacgtttagctgatgacactctagtggctgtgaaacggctaaatgaagaacgtaccaagggtggggaactgcagtttcaaaccgaagttgagatgatcagtatggccgttcataggaacttgcttcggcttcgtggcttttgcatgactccaactgaaagattacttgtttatccctacatggctaatggaagtgttgcttcttgtttaagagagcgtcctgaaggcaatccagcccttgactggccaaaaagaaagcatattgctctgggatcagcaagggggctcgcatatttacacgatcattgcgaccaaaagatcattcacctggatgtgaaagctgcaaatatactgttagatgaagagtttgaagctgttgttggagattttgggctagcaaaattaatgaattataacgactcccatgtgacaactgctgtacggggtacgattggccatatagcgcccgagtacctctcgacaggaaaatcttctgagaagactgatgtttttgggtacggggtcatgcttctcgagctcatcactggacaaaaggctttcgatcttgctcggcttgcaaatgatgatgatatcatgttactcgactgggtgaaagaggttttgaaagagaagaagttggaaagccttgtggatgcagaactcgaaggaaagtacgtggaaacagaagtggagcagctgatacaaatggctctgctctgcactcaaagttctgcaatggaacgtccaaagatgtcagaagtagtgagaatgctggaaggagatggtttagctgagagatgggaagaatggcaaaaggaggagatgccaatacatgattttaactatcaagcctatcctcatgctggcactgactggctcatcccctattccaattcccttatcgaaaacgattacccctcggggccaagataaccttttagaaagggtcatttcttgtgggttcttcaacaagtatatatataggtagtgaagttgtaagaagcaaaaccccacattcacctttgaatatcactactctataatactaatcatatctactatactttctctccacttccattaagcaataaaaactattctt

SEQ ID NO: 101309 - protein, 601 aa, Arabidopsis thaliana
  peptide (1)..(601): Ceres Seq. ID no. 13607515
MEHGSSRGFIWLILFLDFVSRVTGKTQVDALIALRSSLSSGDHTNNILQSWNATHVTPCSWFHVTCNTENSVTRLDLGSANLSGELVPQLAQLPNLQYLELFNNNITGEIPEELGDLMELVSLDLFANNISGPIPSSLGKLGKLRFLRLYNNSLSGEIPRSLTALPLDVLDISNNRLSGDIPVNGSFSQFTSMSFANNKLRPRPASPSPSPSGTSAAIVVGVAAGAALLFALAWWLRRKLQGHFLDVPAEEDPEVYLGQFKRFSLRELLVATEKFSKRNVLGKGRFGILYKGRLADDTLVAVKRLNEERTKGGELQFQTEVEMISMAVHRNLLRLRGFCMTPTERLLVYPYMANGSVASCLRERPEGNPALDWPKRKHIALGSARGLAYLHDHCDQKIIHLDVKAANILLDEEFEAVVGDFGLAKLMNYNDSHVTTAVRGTIGHIAPEYLSTGKSSEKTDVFGYGVMLLELITGQKAFDLARLANDDDIMLLDWVKEVLKEKKLESLVDAELEGKYVETEVEQLIQMALLCTQSSAMERPKMSEVVRMLEGDGLAERWEEWQKEEMPIHDFNYQAYPHAGTDWLIPYSNSLIENDYPSGPR

SEQ ID NO: 101310 - protein, 484 aa, Arabidopsis thaliana; identical to SEQ ID NO: 91782
  peptide (1)..(484): Ceres Seq. ID no. 13607516

SEQ ID NO: 101311 - protein, 409 aa, Arabidopsis thaliana; identical to SEQ ID NO: 91783
  peptide (1)..(409): Ceres Seq. ID no. 13607517

SEQ ID NO: 101312 - DNA, 1855 bp, Arabidopsis thaliana
  misc_feature (1)..(1855): Ceres Seq. ID no. 13607547
  misc_feature (1)..(1855): Ortholog of  Ceres SEQ ID NO 15175923 as cited in SEQ ID NO 54037
  misc_feature (1)..(1855): Ortholog of  Ceres SEQ ID NO 14303366 as cited in SEQ ID NO 54418
  misc_feature (1)..(1855): Ortholog of  Ceres SEQ ID NO 13503610 as cited in SEQ ID NO 62416
  misc_feature (1)..(1855): Ortholog of  Ceres SEQ ID NO 13657610 as cited in SEQ ID NO 66165
  misc_feature (1)..(1855): Ortholog of  Ceres SEQ ID NO 13598312 as cited in SEQ ID NO 68448
  misc_feature (1)..(1855): Ortholog of  Ceres SEQ ID NO 13596100 as cited in SEQ ID NO 68573
aaatcataaaaacacaagttttcgacagatcaactgttttcttcattacgtgttcttcaatggcgtcacttcactgattctattcctatcaaacccacttacccattcccttttatatgcacaaattctcataaagttttcaattttattccatttttctcggaagccatggaagctgctaatgagcctgttaatggcggatccgtacagatccgaacagagaacaacgaaagacgaaagcttcctaatttcttacaaagcgtcaacatgaaatacgtcaagctaggttatcattacctcattactcatctcttcaagctctgtttggttccattaatggcggttttagtcacagagatctctcgattaacaacagacgatctttaccagatttggcttcatctccaatacaatctcgttgctttcatctttctctctgctttagctatctttggctccaccgtttacatcatgagtcgtcccagatctgtttatctcgttgattactcttgttatcttcctccggagagtcttcaggttaagtatcagaagtttatggatcattctaagttgattgaagatttcaatgagtcatctttagagtttcagaggaagattcttgaacgttctggtttaggagaagagacttatctccctgaagctttacattgtatccctccgaggcctacgatgatggcggctcgtgaggaatctgagcaggtaatgtttggtgctcttgataagcttttcgagaataccaagattaaccctagggatattggtgtgttggttgtgaattgtagcttgtttaatcctacaccttcgttgtcagctatgattgttaacaagtataagcttagagggaatgttaagagttttaaccttggtggaatggggtgtagtgctggtgttatctctatcgatttagctaaagatatgttgcaagttcataggaatacttatgctgttgtggttagtactgagaacattactcagaattggtattttgggaataagaaggctatgttgattccgaattgtttgtttcgtgttggtggttcggcgattttgttgtcgaacaaggggaaagatcgtagacggtctaagtataagcttgttcataccgttaggactcataaaggagctgttgagaaggctttcaactgtgtttaccaagagcaagatgataatgggaagaccggggtttcgttgtcgaaagatcttatggctatagctggggaagctcttaaggcgaatatcactactttaggtcctttggttcttcctataagtgagcagattctgtttttcatgactttggttacgaagaaactgtttaactcgaagctgaagccgtatattccggatttcaagcttgcgtttgatcatttctgtatccatgctggtggtagagctgtgattgatgagcttgagaagaatctgcagctttcgcagactcatgtcgaggcatccagaatgacactgcacagatttggaaacacttcttcgagctcgatttggtatgaactggcttacatagaggctaaaggtaggatgaagaaaggaaaccgggtttggcagattgcttttggaagtgggtttaagtgtaacagtgcagtttgggtggctctaaacaatgtcaagccttcggttagtagtccgtgggaacactgcatcgaccgatatccggttaagctcgacttctgatttaatgaaaaaccatttgtttggttagtcctagtcttactagactctgccttgtttatttttcttcttttctggttaagctcttgtactcttaatgtgacgcttcttgattattactctcgcgttttattctatggcatctttatcc

SEQ ID NO: 101313 - protein, 512 aa, Arabidopsis thaliana
  peptide (1)..(512): Ceres Seq. ID no. 13607548
MEAANEPVNGGSVQIRTENNERRKLPNFLQSVNMKYVKLGYHYLITHLFKLCLVPLMAVLVTEISRLTTDDLYQIWLHLQYNLVAFIFLSALAIFGSTVYIMSRPRSVYLVDYSCYLPPESLQVKYQKFMDHSKLIEDFNESSLEFQRKILERSGLGEETYLPEALHCIPPRPTMMAAREESEQVMFGALDKLFENTKINPRDIGVLVVNCSLFNPTPSLSAMIVNKYKLRGNVKSFNLGGMGCSAGVISIDLAKDMLQVHRNTYAVVVSTENITQNWYFGNKKAMLIPNCLFRVGGSAILLSNKGKDRRRSKYKLVHTVRTHKGAVEKAFNCVYQEQDDNGKTGVSLSKDLMAIAGEALKANITTLGPLVLPISEQILFFMTLVTKKLFNSKLKPYIPDFKLAFDHFCIHAGGRAVIDELEKNLQLSQTHVEASRMTLHRFGNTSSSSIWYELAYIEAKGRMKKGNRVWQIAFGSGFKCNSAVWVALNNVKPSVSSPWEHCIDRYPVKLDF

SEQ ID NO: 101314 - protein, 479 aa, Arabidopsis thaliana
  peptide (1)..(479): Ceres Seq. ID no. 13607549
MKYVKLGYHYLITHLFKLCLVPLMAVLVTEISRLTTDDLYQIWLHLQYNLVAFIFLSALAIFGSTVYIMSRPRSVYLVDYSCYLPPESLQVKYQKFMDHSKLIEDFNESSLEFQRKILERSGLGEETYLPEALHCIPPRPTMMAAREESEQVMFGALDKLFENTKINPRDIGVLVVNCSLFNPTPSLSAMIVNKYKLRGNVKSFNLGGMGCSAGVISIDLAKDMLQVHRNTYAVVVSTENITQNWYFGNKKAMLIPNCLFRVGGSAILLSNKGKDRRRSKYKLVHTVRTHKGAVEKAFNCVYQEQDDNGKTGVSLSKDLMAIAGEALKANITTLGPLVLPISEQILFFMTLVTKKLFNSKLKPYIPDFKLAFDHFCIHAGGRAVIDELEKNLQLSQTHVEASRMTLHRFGNTSSSSIWYELAYIEAKGRMKKGNRVWQIAFGSGFKCNSAVWVALNNVKPSVSSPWEHCIDRYPVKLDF

SEQ ID NO: 101315 - protein, 456 aa, Arabidopsis thaliana
  peptide (1)..(456): Ceres Seq. ID no. 13607550
MAVLVTEISRLTTDDLYQIWLHLQYNLVAFIFLSALAIFGSTVYIMSRPRSVYLVDYSCYLPPESLQVKYQKFMDHSKLIEDFNESSLEFQRKILERSGLGEETYLPEALHCIPPRPTMMAAREESEQVMFGALDKLFENTKINPRDIGVLVVNCSLFNPTPSLSAMIVNKYKLRGNVKSFNLGGMGCSAGVISIDLAKDMLQVHRNTYAVVVSTENITQNWYFGNKKAMLIPNCLFRVGGSAILLSNKGKDRRRSKYKLVHTVRTHKGAVEKAFNCVYQEQDDNGKTGVSLSKDLMAIAGEALKANITTLGPLVLPISEQILFFMTLVTKKLFNSKLKPYIPDFKLAFDHFCIHAGGRAVIDELEKNLQLSQTHVEASRMTLHRFGNTSSSSIWYELAYIEAKGRMKKGNRVWQIAFGSGFKCNSAVWVALNNVKPSVSSPWEHCIDRYPVKLDF

SEQ ID NO: 101316 - DNA, 979 bp, Arabidopsis thaliana
  misc_feature (1)..(979): Ceres Seq. ID no. 13607551
  misc_feature (1)..(979): Ortholog of  Ceres SEQ ID NO 13582619 as cited in SEQ ID NO 56520
  misc_feature (1)..(979): Ortholog of  Ceres SEQ ID NO 12611392 as cited in SEQ ID NO 56826
  misc_feature (1)..(979): Ortholog of  Ceres SEQ ID NO 13660872 as cited in SEQ ID NO 60830
atgggaaaagatattgagctcccgggttttaggttccacccgactgaggaagagcttcttgatttctacctcaagaacatggtttacggtaagagatcgagtgtcgaagtcattggtttccttaacatataccgtcatgatccatgggacttacctggtttatcgagaatcggggagagggaatggtacttctttgtaccaagggaaaggaagcatgggaacggtgggaggccaagcaggacaactgaaaaaggatattggaaagcaactggatccgatcgtaaaatcataagcttgtctgagccaaaacgtgttatagggctcaagaagacgcttgtgttctatagaggaagagcaccaggaggaagcaagactgattgggtgatgaacgagtttcggatgcccgataattgctccttaccaaaggatgttgtgctttgtaagatatatagaaaagctacttcattgaaagtattggagcaaagggcagagatggaagctaagatgaatcaaacatgtcctaactctcctctttcgtcttccgagacgatttctttcgttggtaaagaagaaaacatgatgacttcgttccgtgctcctcaagtaatagctatggaagaagcaaacaagatccaaatgcatcaagaaaacgcgaaaaccgaagagaaacaaagagaagcagagaccaaagaaccttcttcatcactgaagctaccgtttggaagtttaccagagctacaattaccaaaaccaggagtagaatgggaccagttgttgagtataagcccatggctccagaatcttacaccaatagttaacatatattggtaggatatgtaaagaacaaatacatttaaatattcttactctcgtaaaaaacagagcttgtaccaaatagtatttactaaacttttatgtatcttttgtaattttgtaacataagaaaatttgtaacactatttatagtcatatttgacga

SEQ ID NO: 101317 - protein, 276 aa, Arabidopsis thaliana
  peptide (1)..(276): Ceres Seq. ID no. 13607552
MGKDIELPGFRFHPTEEELLDFYLKNMVYGKRSSVEVIGFLNIYRHDPWDLPGLSRIGEREWYFFVPRERKHGNGGRPSRTTEKGYWKATGSDRKIISLSEPKRVIGLKKTLVFYRGRAPGGSKTDWVMNEFRMPDNCSLPKDVVLCKIYRKATSLKVLEQRAEMEAKMNQTCPNSPLSSSETISFVGKEENMMTSFRAPQVIAMEEANKIQMHQENAKTEEKQREAETKEPSSSLKLPFGSLPELQLPKPGVEWDQLLSISPWLQNLTPIVNIYW

SEQ ID NO: 101318 - protein, 250 aa, Arabidopsis thaliana; identical to SEQ ID NO: 89514
  peptide (1)..(250): Ceres Seq. ID no. 13607553

SEQ ID NO: 101319 - protein, 148 aa, Arabidopsis thaliana; identical to SEQ ID NO: 89515
  peptide (1)..(148): Ceres Seq. ID no. 13607554

SEQ ID NO: 101320 - DNA, 1224 bp, Arabidopsis thaliana
  misc_feature (1)..(1224): Ceres Seq. ID no. 13607555
  misc_feature (1)..(1224): Ortholog of  Ceres SEQ ID NO 13596189 as cited in SEQ ID NO 68452
ctcattacttgttcatcaatggcaagtctttgtttccaatctccttccaaacccatttcctatttccaacccaaatccaatccatcgccaccgttattcgccaaagtctccgtctttcgatgcagagcttccgtacaaaccctcgtcgccgttgagccggagccagttttcgtctccgtcaagacttttgcgccagccaccgtcgctaatttgggaccagggtttgatttcttaggatgtgccgtcgatggtctcggagaccatgtgactctccgtgtagatccctctgtacgagccggtgaggtctcaatctcggagatcaccggaaccacaacaaaactcagcacgaaccctctccggaactgcgccggaatcgctgctattgctacgatgaagatgttagggatcagatcggttggtttatcattagatttgcataaaggtcttcctttaggtagcggtttaggttctagtgcagctagtgccgccgcagctgctgtggcggttaatgagatctttggccggaaattagggagtgatcaattggtattagccggtttagaatcggaagcgaaagtctccggttatcacgctgataatatcgcaccagcgatcatgggtggattcgttttgattagaaactacgaaccacttgatttgaaaccattgaggttcccatctgataaagatctcttctttgttctagtaagccctgactttgaagctccaactaagaaaatgagagctgcattgcctacagagattccaatggttcatcatgtttggaacagtagccaagcagctgctttagtcgctgctgtgttagaaggtgacgcagtgatgcttgggaaggcattgtcgtcggataagattgtggagccgactagagcgccgttgattccgggaatggaagctgtgaagaaggcggctttagaagctggagcatttggatgtactattagcggagctggaccaacagcggttgcggtgattgattcggaggagaagggtcaagtcattggagagaagatggtggaagcgttttggaaagttggtcatttgaaatctgttgcttctgtgaagaagcttgataatgttggtgctaggcttgtcaacagcgtctccagatgatctttgtgtgctgtttgattatgttaagattggaactaatcttgctctgtactgtaatttctagatgataataaagttctttgttttctacac

SEQ ID NO: 101321 - protein, 376 aa, Arabidopsis thaliana
  peptide (1)..(376): Ceres Seq. ID no. 13607556
LITCSSMASLCFQSPSKPISYFQPKSNPSPPLFAKVSVFRCRASVQTLVAVEPEPVFVSVKTFAPATVANLGPGFDFLGCAVDGLGDHVTLRVDPSVRAGEVSISEITGTTTKLSTNPLRNCAGIAAIATMKMLGIRSVGLSLDLHKGLPLGSGLGSSAASAAAAAVAVNEIFGRKLGSDQLVLAGLESEAKVSGYHADNIAPAIMGGFVLIRNYEPLDLKPLRFPSDKDLFFVLVSPDFEAPTKKMRAALPTEIPMVHHVWNSSQAAALVAAVLEGDAVMLGKALSSDKIVEPTRAPLIPGMEAVKKAALEAGAFGCTISGAGPTAVAVIDSEEKGQVIGEKMVEAFWKVGHLKSVASVKKLDNVGARLVNSVSR

SEQ ID NO: 101322 - protein, 370 aa, Arabidopsis thaliana; identical to SEQ ID NO: 26642
  peptide (1)..(370): Ceres Seq. ID no. 13607557

SEQ ID NO: 101323 - protein, 246 aa, Arabidopsis thaliana; identical to SEQ ID NO: 26643
  peptide (1)..(246): Ceres Seq. ID no. 13607558

SEQ ID NO: 101324 - DNA, 1444 bp, Arabidopsis thaliana
  misc_feature (1)..(1444): Ceres Seq. ID no. 13607559
  misc_feature (1)..(1444): Ortholog of  Ceres SEQ ID NO 14313264 as cited in SEQ ID NO 67300
  misc_feature (1)..(1444): Ortholog of  Ceres SEQ ID NO 14302824 as cited in SEQ ID NO 67794
cttcgttccaaaaagtcgcaactcttcttcatcttcttcctctgacgatcattttcagaagaatctgattccgatcaaaattgcagaagaagatgtctcgccaatcgttttctctactgaagaatcttcgtagcatcgcttccggttccaaaatccagacccgatccgtgacttacatgcccagacccggtgacggaaaaccaagaccagtgacgttaatccccggagacggagttggtccgttggtaacaaacgcggttcaacaagtgatggaagcgatgcacgctccggtttacttcgaaccgttcgaagttcatggagatatgaagagtttacctgaaggattgttggaatcgattaagaagaacaaagtttgtttgaaaggtggtcttaagactcccgtcggtggtggtgtgagctctctcaatgttaatctgagaaaggagcttgatctctttgcttctttggtcaactgtttcaatttgcctggtttagcttctcgtcatgagaatgttgatattgttgtgattagagagaacactgaaggtgaatatgcaggtcttgaacatgaagttgttcctggtgttgttgagagccttaaggtgattacaaagttctgttcagagcgtattgcaaagtatgcgtttgagtatgcctacttgaacaacaggaagaaagttacagcagtgcacaaggctaatatcatgaaattggctgatggtttgttcttggagtcttgtcaagaggttgctaagaagtatccaagcattgcttacaatgaaatcattgttgataattgttgtatgcaacttgtggctagaccagagcaattcgatgtcatggtgacgcctaatctctatggtaatctagtggcaaacactgctgctggtattgctggaggtactggagtcatgcctggaggaaatgttggggcggagtatgcggtctttgagcaaggtgcatcagcgggaaacgtggggaaggatacaacggaagagcaaaagaatgcaaaccctgtggctttgttgctgtcatcagccatgatgcttagacaccttcagttcccttcttttgctgacaggcttgaaaccgctgtgaagcgtgttatcgctgaagggaattgtcggactgaagatcttggtggaaacagtaccactcaagaggtcgttgacgctgtcattgcaaatttggattgacttgacaattccaacttcgcttgtgtaaagcatcagtcacacgtcggtatgattcacgcttactggaaaatacttctagttcccacattctttcgagataactcgaattgggatttcagatttcgagaaaaataacatatggttttttgttttgtttttcttctttttgttcatgtaatatgcaaagtgcaaagtgaaaactgcctcagagcattattttttgaataatgaaaattatgtttaacttc

SEQ ID NO: 101325 - protein, 367 aa, Arabidopsis thaliana; identical to SEQ ID NO: 26195
  peptide (1)..(367): Ceres Seq. ID no. 13607560

SEQ ID NO: 101326 - protein, 339 aa, Arabidopsis thaliana; identical to SEQ ID NO: 26196
  peptide (1)..(339): Ceres Seq. ID no. 13607561

SEQ ID NO: 101327 - protein, 308 aa, Arabidopsis thaliana; identical to SEQ ID NO: 26197
  peptide (1)..(308): Ceres Seq. ID no. 13607562

SEQ ID NO: 101328 - DNA, 2864 bp, Arabidopsis thaliana
  misc_feature (1)..(2864): Ceres Seq. ID no. 13607571
  misc_feature (1)..(2864): Ortholog of  Ceres SEQ ID NO 12586556 as cited in SEQ ID NO 64667
  misc_feature (1)..(2864): Ortholog of  Ceres SEQ ID NO 13660894 as cited in SEQ ID NO 67475
atgttgttacagttccgagcaaagacttttttcaacaacattgctcaagattctctggttactcttatcaccaaacgagttggattgggttacaggtttttgtcttcgttatgccaaccaaagaacacggctttagattccgaaggttacaagatactttttcagacagctgcaaaatcaggctccgtggtactgggaaagctcgctcatggacacatgatcaagtcctccttgaacccgtgtctgtacttgctcaacaatcttctgaacatgtattgcaagtgccgggaattgggttttgcacgccagttgttcgacagaatgcctgaacgaaacattatttcttttaattctttgatttctgggtacactcagatgggattttatgaacaggccatggaattgtttcttgaagctagagaagctaatttgaagctcgataagttcacgtatgccggtgcattgggcttttgtggagaaaggtgtgatcttgatttaggggaattgttgcacgggttggttgttgtgaatggtctatctcagcaagtgtttttgatcaatgtgttgattgacatgtatagtaagtgtggaaagcttgaccaagctatgtctttatttgatagatgcgatgaaagggatcaagtttcatggaattctttgatttccggttatgttcgggttggcgcagcggaagaaccgctaaatctgttggctaaaatgcatagagacggcctaaatctgactacgtatgctctggggagtgtgctaaaggcttgttgtattaacctgaacgaaggatttatagaaaaaggtatggcaattcactgttatacagcaaaactaggaatggagtttgatatagttgtccgtactgcattgcttgacatgtatgccaaaaacggaagtttgaaagaggcgataaagcttttcagtttgatgccttcgaagaatgtggttacgtataacgcaatgatatctgggtttctccaaatggatgaaataaccgatgaagcttctagtgaagcctttaagctcttcatggatatgcaaagacggggtttggaaccctcgccatcgacattttcagttgtgctcaaagcttgtagtgcagcgaaaaccttggaatatggaaggcagattcacgctctcatctgtaagaacaattttcagtctgatgagtttattgggagcgctctaatcgagctgtatgcgttaatgggttcaactgaagatggaatgcaatgctttgcttcaacatcaaagcaagatatcgcctcatggacatcgatgatagattgccatgtccaaaacgagcagcttgaaagcgcatttgatctgttccgacaacttttttcatcccatataagaccagaagagtatacagtttcccttatgatgagtgcttgtgctgattttgctgcattaagctcaggagagcagattcagggttatgccataaagagtggaattgatgctttcaccagtgttaagacgtcaagcatttctatgtatgcaaagtcaggtaacatgccgcttgctaatcaagtatttatcgaggtccaaaacccagacgttgcaacatactcggctatgatctcaagccttgctcaacacggttctgctaacgaagccttaaacatctttgaatcgatgaaaacccacggaattaaaccgaaccagcaagcctttctcggtgttctaatagcttgttgccacggaggattagtcacacaaggactaaagtatttccaatgcatgaagaacgattacaggattaacccaaacgagaaacatttcacttgcctcgtcgatcttttaggtcgcacgggaagattatcagatgctgagaatctgattttgagctctggttttcaagaccatccagtgacgtggagagcattactgagttcttgtagagtttacaaagacagcgtaattgggaaacgcgttgcggagagactgatggaacttgaacccgaggcctctggctcatacgtattgctccacaacatttacaacgattctggagtcaattcttcagcagaggaggtgagagaactgatgagagatcgaggggttaagaaagaaccagccttgagctggatcgtaatcggtaaccaaactcattccttcgccgtcgctgatttgtctcacccttcgagccagatgatctacacaatagagaactgtgcgacgcttttcgcaatctcggagaagggaggaaaaatggcggccaaaaccctaatcaggtcaggagcttcgttgatgaatcggtttctaacgaagccgacaacgaatatcgtgcagaacaatctcagatcttcttttcaatacatagctcctcagggacaagaaatcccgccgtattttttcccgtcgttgtcgaatctacagagctcactcatttcgcgccctaacgacactgcttcgctccaggaactcaacgaacgtggatttctttacccttctggtcttccttcactcgaattcttcttgccagaagttgatccttcaagtgagccattgcttctgtttcctaagaggacattccaaccaagcactataaggcgtaaacggaaccatggattctttgctcggaaggcaaccaaaggtggacggagagtcatagctcggagaatagcaaaagggcgtcacagagtcacagcctagaatctctctaatctttccattgatgaatctccggttattcaggctagaaaacctgaaacttccatctcctaaataacttgtcttcttatccatgttctcatgtgttgttgatctcagaattgatctgaagttaaaattttaacgatctcagctcttttgtaatggatagtttatatcaatgaatccttttttcc

SEQ ID NO: 101329 - protein, 889 aa, Arabidopsis thaliana
  peptide (1)..(889): Ceres Seq. ID no. 13607572
MLLQFRAKTFFNNIAQDSLVTLITKRVGLGYRFLSSLCQPKNTALDSEGYKILFQTAAKSGSVVLGKLAHGHMIKSSLNPCLYLLNNLLNMYCKCRELGFARQLFDRMPERNIISFNSLISGYTQMGFYEQAMELFLEAREANLKLDKFTYAGALGFCGERCDLDLGELLHGLVVVNGLSQQVFLINVLIDMYSKCGKLDQAMSLFDRCDERDQVSWNSLISGYVRVGAAEEPLNLLAKMHRDGLNLTTYALGSVLKACCINLNEGFIEKGMAIHCYTAKLGMEFDIVVRTALLDMYAKNGSLKEAIKLFSLMPSKNVVTYNAMISGFLQMDEITDEASSEAFKLFMDMQRRGLEPSPSTFSVVLKACSAAKTLEYGRQIHALICKNNFQSDEFIGSALIELYALMGSTEDGMQCFASTSKQDIASWTSMIDCHVQNEQLESAFDLFRQLFSSHIRPEEYTVSLMMSACADFAALSSGEQIQGYAIKSGIDAFTSVKTSSISMYAKSGNMPLANQVFIEVQNPDVATYSAMISSLAQHGSANEALNIFESMKTHGIKPNQQAFLGVLIACCHGGLVTQGLKYFQCMKNDYRINPNEKHFTCLVDLLGRTGRLSDAENLILSSGFQDHPVTWRALLSSCRVYKDSVIGKRVAERLMELEPEASGSYVLLHNIYNDSGVNSSAEEVRELMRDRGVKKEPALSWIVIGNQTHSFAVADLSHPSSQMIYTIENCATLFAISEKGGKMAAKTLIRSGASLMNRFLTKPTTNIVQNNLRSSFQYIAPQGQEIPPYFFPSLSNLQSSLISRPNDTASLQELNERGFLYPSGLPSLEFFLPEVDPSSEPLLLFPKRTFQPSTIRRKRNHGFFARKATKGGRRVIARRIAKGRHRVTA

SEQ ID NO: 101330 - protein, 817 aa, Arabidopsis thaliana
  peptide (1)..(817): Ceres Seq. ID no. 13607573
MIKSSLNPCLYLLNNLLNMYCKCRELGFARQLFDRMPERNIISFNSLISGYTQMGFYEQAMELFLEAREANLKLDKFTYAGALGFCGERCDLDLGELLHGLVVVNGLSQQVFLINVLIDMYSKCGKLDQAMSLFDRCDERDQVSWNSLISGYVRVGAAEEPLNLLAKMHRDGLNLTTYALGSVLKACCINLNEGFIEKGMAIHCYTAKLGMEFDIVVRTALLDMYAKNGSLKEAIKLFSLMPSKNVVTYNAMISGFLQMDEITDEASSEAFKLFMDMQRRGLEPSPSTFSVVLKACSAAKTLEYGRQIHALICKNNFQSDEFIGSALIELYALMGSTEDGMQCFASTSKQDIASWTSMIDCHVQNEQLESAFDLFRQLFSSHIRPEEYTVSLMMSACADFAALSSGEQIQGYAIKSGIDAFTSVKTSSISMYAKSGNMPLANQVFIEVQNPDVATYSAMISSLAQHGSANEALNIFESMKTHGIKPNQQAFLGVLIACCHGGLVTQGLKYFQCMKNDYRINPNEKHFTCLVDLLGRTGRLSDAENLILSSGFQDHPVTWRALLSSCRVYKDSVIGKRVAERLMELEPEASGSYVLLHNIYNDSGVNSSAEEVRELMRDRGVKKEPALSWIVIGNQTHSFAVADLSHPSSQMIYTIENCATLFAISEKGGKMAAKTLIRSGASLMNRFLTKPTTNIVQNNLRSSFQYIAPQGQEIPPYFFPSLSNLQSSLISRPNDTASLQELNERGFLYPSGLPSLEFFLPEVDPSSEPLLLFPKRTFQPSTIRRKRNHGFFARKATKGGRRVIARRIAKGRHRVTA

SEQ ID NO: 101331 - protein, 799 aa, Arabidopsis thaliana
  peptide (1)..(799): Ceres Seq. ID no. 13607574
MYCKCRELGFARQLFDRMPERNIISFNSLISGYTQMGFYEQAMELFLEAREANLKLDKFTYAGALGFCGERCDLDLGELLHGLVVVNGLSQQVFLINVLIDMYSKCGKLDQAMSLFDRCDERDQVSWNSLISGYVRVGAAEEPLNLLAKMHRDGLNLTTYALGSVLKACCINLNEGFIEKGMAIHCYTAKLGMEFDIVVRTALLDMYAKNGSLKEAIKLFSLMPSKNVVTYNAMISGFLQMDEITDEASSEAFKLFMDMQRRGLEPSPSTFSVVLKACSAAKTLEYGRQIHALICKNNFQSDEFIGSALIELYALMGSTEDGMQCFASTSKQDIASWTSMIDCHVQNEQLESAFDLFRQLFSSHIRPEEYTVSLMMSACADFAALSSGEQIQGYAIKSGIDAFTSVKTSSISMYAKSGNMPLANQVFIEVQNPDVATYSAMISSLAQHGSANEALNIFESMKTHGIKPNQQAFLGVLIACCHGGLVTQGLKYFQCMKNDYRINPNEKHFTCLVDLLGRTGRLSDAENLILSSGFQDHPVTWRALLSSCRVYKDSVIGKRVAERLMELEPEASGSYVLLHNIYNDSGVNSSAEEVRELMRDRGVKKEPALSWIVIGNQTHSFAVADLSHPSSQMIYTIENCATLFAISEKGGKMAAKTLIRSGASLMNRFLTKPTTNIVQNNLRSSFQYIAPQGQEIPPYFFPSLSNLQSSLISRPNDTASLQELNERGFLYPSGLPSLEFFLPEVDPSSEPLLLFPKRTFQPSTIRRKRNHGFFARKATKGGRRVIARRIAKGRHRVTA

SEQ ID NO: 101332 - DNA, 1111 bp, Arabidopsis thaliana
  misc_feature (1)..(1111): Ceres Seq. ID no. 13607590
  misc_feature (1)..(1111): Ortholog of  Ceres SEQ ID NO 13598735 as cited in SEQ ID NO 64586
gcttagaattattgattgcattgcaagaaacaagactaatgatgacccaaaaaccacgaactgtgatctgcgtcggagacatccatggaaacatatcaaagctcaataaactctggcttaatcttcaatccgatatccaaaactcagatttcagctcagctctcgtcatcttcctcggcgactactgcgatcgtggaccggagactcgaaaagtcatcgacttcttgatctctttgccggagaaacatcccgatcagacccatgtctttcttgccggaaaccacgactttgcttttgctggcttcttgggtttgttacctcgcccttcagatgggtctgagtttaaggaaacgtggaaagagtactcaaaaagtgaggagagagaaggatggtataaaggtgaagggtttgagaatatgcatctccaaagcaggagatgggcgggaaagattagggttcagttcgattattccgcatatggagtgttgtataatggatcaatatacgatgcggcgtctacttttgaatcttatggcgttcctcatggatcttctgatttgataaaggcagtacctgagagtcacaagaaattcttgaccaatatggtttgggtacataaagaggatgatgtttgtatagaaacagaggaaggccttacgcattgtaagttgattgccgtacatgctggtctagagacaaagaataacgtagaagaacagcttaaactattgagagataaagacacaagcatcccaagaatacaacctctaactggtcggaaaaccgtttgggggatcccacaggaactggatgataaaaagactattgttgttagcggccaccatgggaaacttcacatcgatggcttgagattgatcatcgatgaaggtggtggatataccgatacacctttggctgcaattgttcttccttctaagaagattatccgcgacaccgataatttttccaattaagtatatcatgtcttcatattaaaattgaaacttctagtagtttttgtgattgttctgttgttactttttaattagtgtttcggtcttttccgctacttgtataacttgataatttttttccaaaattagaaaatggt

SEQ ID NO: 101333 - protein, 323 aa, Arabidopsis thaliana; identical to SEQ ID NO: 43052
  peptide (1)..(323): Ceres Seq. ID no. 13607591

SEQ ID NO: 101334 - protein, 311 aa, Arabidopsis thaliana; identical to SEQ ID NO: 43053
  peptide (1)..(311): Ceres Seq. ID no. 13607592

SEQ ID NO: 101335 - protein, 310 aa, Arabidopsis thaliana; identical to SEQ ID NO: 43054
  peptide (1)..(310): Ceres Seq. ID no. 13607593

SEQ ID NO: 101336 - DNA, 1980 bp, Arabidopsis thaliana
  misc_feature (1)..(1980): Ceres Seq. ID no. 13607594
  misc_feature (1)..(1980): Ortholog of  Ceres SEQ ID NO 14314536 as cited in SEQ ID NO 52436
atgatcgatcagatatctcaatttcaggaacccagaaagagggacttgtcttttacctccaaagggttcctgccgtttcttttctacaatttttctcctgctaattatcaaatttttcttctgattttcattgtttgttagagattcttcttctcctctgcttttctattctctgggagctcgatgatggatgataaagctcgcaaagaagaagaacatcatgtgtctcaccaacataatcattctcctctgcaaagggatggaaattctgctgagattgcacaaggacaagagctatcatcaccgggccgagacctatggaggcgaggtcttgtgttagatttaccatcaacaacacctgaagatactacaagagatgatctttttagacgaaatgcatctttaacttcaagtcctgttgccaaaagagtcaacttttctccaatgtccagccctagagtcggacaacgtggtgcatccttgagtccttcttcttctacttcttcttcttcaagaaacaaacctaatagcctgaagaatctaatccccaagttaagctttaagaaccggaacagcaataacgataatgtggatatcgagaaagccgcggatttgggctttgtgtcctccccttcttcaggaaatggcagggacaggtctacatggactctcactaatattttaactccaagattgaagaaaactgagtctcttcctgtaacccctatagctcactcaaatcctgagtccactcacgggagatttgccgttgatctagttacttccacgaaaaaagggcctccactgcctatccaccgttcacgctctgtcccagcattcaacaaagatggaagtcaaaggcaattaggtgttttccgggtgattccaactccaaacatgtctccaaccagaaatactattaaacttaacgacgcgaatgttgatggagctgaagatgttcctgaagaagaagctgtgtgtagaatctgccttgtagaattgggagaagattcagaagccttcaagatggaatgtttgtgtagaggggaactagctcttgcccacaaagaatgtacaatcaaatggttcaccattaaaggaaacagaacatgtgatgtgtgcaagcaagaggttcagaatctccctgtgacccttcttcgcatgcagaattctcggggtagtattggagctccagacgccgaggctgcacactacagtttatggcaggatgttccaattcttgtgattgtaagcatgcttgcatacttctgttttctcgagcagcttctgcttacaaaaatgcaatctggcgccattgcagtttctttaccattctcgtgcgttcttggtctttttgcttcgatgacggcaacaacaatggtgccgaagagatatgtctggatttacgctacaactcagttcggtcttgttgtttttttctctcacattttcttcacattggttcgcatgcagccggttgtggccattctcttagccactatcgttgggtttggactcaccatgagcggtacaacaggtatagtcgagttttcgaaatggaggagaagcaataggacagctgaacttccaagcagtagtcaagtggatcaaccactggttgagacaacagatcagaacatttctggatcaagaaactgaaagccagaggtccgtcaatactaatcatatgttccagtagtggtctatgatctcgatggagatccatctatttagagatgtgagaacagattggtcatgtgagttaagtagtggtagttgacgagattaaggctcgatttttgggggtctcttttgtgtgtgaatgtgagtgtgagtgtgagtgtatgtatatcatctgttgttttcttaaagaaaaacaaaaagaagaagttttgtatcttttagtatattaaactattgggcttttataaagtcttgcaaattcgctacggcccataaagcccaacaagttttaaaatt

SEQ ID NO: 101337 - protein, 491 aa, Arabidopsis thaliana; identical to SEQ ID NO: 42719
  peptide (1)..(491): Ceres Seq. ID no. 13607595

SEQ ID NO: 101338 - protein, 490 aa, Arabidopsis thaliana; identical to SEQ ID NO: 42720
  peptide (1)..(490): Ceres Seq. ID no. 13607596

SEQ ID NO: 101339 - protein, 404 aa, Arabidopsis thaliana; identical to SEQ ID NO: 42721
  peptide (1)..(404): Ceres Seq. ID no. 13607597

SEQ ID NO: 101340 - DNA, 1081 bp, Arabidopsis thaliana
  misc_feature (1)..(1081): Ceres Seq. ID no. 13607602
  misc_feature (1)..(1081): Ortholog of  Ceres SEQ ID NO 12616162 as cited in SEQ ID NO 63260
aatctatcaaccaaaagcaaagaaagagagggggaaaaaacacaaggaaaaaaatggctcaattggctgctttgtcgggaaagcaagctgatgagtacttgaacgcaaggccgaaatatcctacaatatggtacaaagtgttggctggtcgaaccagcaaccataaggtggcttgggatgttgggaccggcaacggtcaggctgctattggggtcgctgagtactaccagaaagtggtggcaactgatataaatgaatcacaactccaacgtgcaatgaagcacccaaaagtcacttactatcacactccatcatcaatgtccgacgacgatctagtgactctactcggtggagaaaactccatagatatcataatagccgctcaagctcttcactacttcgacctaaagagattctaccccatagtgaaacgtgttcttcgtaaacaaggcggtatcatcgtagtttgggtttacaacgatctcatcatcaccccaaaggttgattccatcatgaaacgtcttgtggattcaacattaccttacagaaacccgactatgaatttggcgtttgatggttataaaacaatagagtttccttttaaaaacattaggatggggactcaaggaaggcctaaagctcttgacatcccacacatgctttcgctagatggatttctagggttcttaaaatcatggcagcctctagtgaaagcaaaggagcaaggagaggatcttttaacttcttatatgattgatgagtttaaggaagcttggggtgatgatgaacaagtcaaggatgttcactacaaggcatttatgcttgcagggaaactttaggtaattaatatatgttcccctttgagatatatattaactatatgtcatacacgcatgtcatcaatgatcaatcgaattaggattgaaaacttatgtttaacaggtcttgagagcaacctggttgatttaaatgcggatcattactttgtataactttcgtttctgtataaattaatatattaattaatatatttatagcactgtaaatataaagatgttatatataaataaaaggttaatat

SEQ ID NO: 101341 - protein, 278 aa, Arabidopsis thaliana
  peptide (1)..(278): Ceres Seq. ID no. 13607603
SINQKQRKRGGKNTRKKMAQLAALSGKQADEYLNARPKYPTIWYKVLAGRTSNHKVAWDVGTGNGQAAIGVAEYYQKVVATDINESQLQRAMKHPKVTYYHTPSSMSDDDLVTLLGGENSIDIIIAAQALHYFDLKRFYPIVKRVLRKQGGIIVVWVYNDLIITPKVDSIMKRLVDSTLPYRNPTMNLAFDGYKTIEFPFKNIRMGTQGRPKALDIPHMLSLDGFLGFLKSWQPLVKAKEQGEDLLTSYMIDEFKEAWGDDEQVKDVHYKAFMLAGKL

SEQ ID NO: 101342 - protein, 261 aa, Arabidopsis thaliana; identical to SEQ ID NO: 26263
  peptide (1)..(261): Ceres Seq. ID no. 13607604

SEQ ID NO: 101343 - protein, 187 aa, Arabidopsis thaliana; identical to SEQ ID NO: 26264
  peptide (1)..(187): Ceres Seq. ID no. 13607605

SEQ ID NO: 101344 - DNA, 1900 bp, Arabidopsis thaliana
  misc_feature (1)..(1900): Ceres Seq. ID no. 13607622
  misc_feature (1)..(1900): Ortholog of  Ceres SEQ ID NO 14307964 as cited in SEQ ID NO 66191
  misc_feature (1)..(1900): Ortholog of  Ceres SEQ ID NO 13502874 as cited in SEQ ID NO 66298
  misc_feature (1)..(1900): Ortholog of  Ceres SEQ ID NO 12614124 as cited in SEQ ID NO 68392
cctttcgtcttaaaccccacagcaaaaagccactctcctttctctctctctcttgttcctctgcatccatggccaccaagctcgacaccagtagcttacttttggccctcttgtccaaatgtagcctccttactcaaaccaatcttgctctctctctcctcgtagcctccctagcttctctcgctctttctctcttcttctggtctcatcccggaggacccgcatggggaaagtacttcctccaccgccgccgtcaaaccaccgtgatacccgggccaagaggcttaccttttgtcggaagcatgtctctcatgtcaaacactctggctcaccgttgcatagccgcaaccgcagagaaatttagagccgaacggttaatggcgtttagtttgggagaaactcgcgtgatcgtcacgtgcaatcctgatgtagctaaagagattctaaacagtccggttttcgctgaccgcccggttaaggaatcagcttattccctcatgtttaaccgtgctatcggtttcgctccttacggcgtttactggcgaaccttgagaaaaatcgcgtctaatcatcttttcagcccgaaacagattaaacgttccgaaacgcagagaagcgtgatcgcgaatcaaatcgtgaagtgtctcacaaaacagagtaacaccaaaggtctctgtttcgcacgtgacttgatcaaaacggcatcgcttaataacatgatgtgctctgttttcggaaaagaatacgagcttgaggaagagcatgaagaagtgagtgagctacgtgaattggtggaagaaggttatgatttactcggtacactgaattggaccgatcatctcccatggctctctgaatttgatcctcaaagaatccggtctagatgctctaatctcgtcccaaaagtaaaccggtttgtgaaccggattatctctgaccaccgtgaacaaactcgtgactcaccgagtgacttcgttgacgtattgctctctctcgatggtcctgataaattatccgaccctgatatcatcgccgttctatgggaaatgatattcagaggaactgacacggtggctgttttgatcgagtggattcttgctaggatggtccttcatccagatattcaatcgacggttcacaatgagcttgatcaaatcgtgggacgatcaagggctgtcgaagagtctgacgtggtgtctctagtatatctaacggctgtggtgaaagaagtcttgaggcttcacccgccaggcccactactctcatgggcccgtttagcaatcacagacacgatcatcgacggtcgtcgtgttccggcggggaccaccgcaatggtgaacatgtgggctattgcacacgatccacacgtgtgggagaatccgttggagtttaaacccgaacgttttgtagccaaggaaggtgaggttgagttctcggttcttgggtctgatttgaggcttgcaccgttcgggtccggtcgtcgggtttgccccgggaagaatcttggtttgaccaccgtgacgttttggactgcgacgcttttgcatgagtttgaatggctgacgccgtccgatgagaagaccgttgacttgtccgagaaactgaggctctcgtgtgagatggctaatcctcttgctgctaaattacgccccaggcgcagttttagtgtatgataaggctaaggctatacacagatacagtggtaactaaagcgaaggaaaattagtgtgaatttaaagcaaaagaataaaataaagaacaaagaaagtaaaggaaacaaaaaaaaagaatcatacaaaaaatactaataagaatggtaatgaagcttttatattaaactaacatcttgatacgtgttgtatatatgatgaaaacattaatgtcacaaagaaaagttaat

SEQ ID NO: 101345 - protein, 556 aa, Arabidopsis thaliana; identical to SEQ ID NO: 21313
  peptide (1)..(556): Ceres Seq. ID no. 13607623

SEQ ID NO: 101346 - protein, 534 aa, Arabidopsis thaliana; identical to SEQ ID NO: 21314
  peptide (1)..(534): Ceres Seq. ID no. 13607624

SEQ ID NO: 101347 - protein, 456 aa, Arabidopsis thaliana; identical to SEQ ID NO: 21315
  peptide (1)..(456): Ceres Seq. ID no. 13607625

SEQ ID NO: 101348 - DNA, 1249 bp, Arabidopsis thaliana
  misc_feature (1)..(1249): Ceres Seq. ID no. 13607626
  misc_feature (1)..(1249): Ortholog of  Ceres SEQ ID NO 13597019 as cited in SEQ ID NO 64303
  misc_feature (1)..(1249): Ortholog of  Ceres SEQ ID NO 13654191 as cited in SEQ ID NO 68235
  misc_feature (1)..(1249): Ortholog of  Ceres SEQ ID NO 15179513 as cited in SEQ ID NO 0
aaactaacccacagtagaactaaattacacttctctttcaatcatttgcgtctcaccggctaatctcattcctctgtcatttttacagttcttcgatcgaaaaccggatgtgagaagcctcgaggttcaaggatttgcagaggctcaaagctttgctttcaaagaaaaagaggaagaaagcttacaagatacagttccatttctacagatgctgcaaagtgaagacccctcatcgtttttttcaatcaaagagccaaactttctgacgctactgtctcttcaaaccctcaaggagccttgggaactcgaaagatatctttcacttgaggattcacaatttcattcaccggtccaatctgagaccaaccgcttcatggaaggagccaatcaagctgtgtcaagccaagaaattccctttagccaagcaaacatgacactcccttcttctacctcatcaccactcagtgcacattcaagacgaaagcgcaaaatcaaccacttgctgcctcaagaaatgactagagaaaagagaaagaggaggaaaacaaaaccaagtaaaaacaatgaagagattgagaatcaaagaataaaccacattgctgttgaacgaaacagaagacgtcaaatgaacgaacatatcaactctctccgggcccttctcccaccttcctacatccaacgaggagaccaagcttccatagtaggaggagcaataaactacgtgaaggtcctcgagcaaatcatacaatctctcgaatcgcaaaagagaacgcaacaacaaagtaacagtgaggtagtagaaaacgcacttaatcatctctcaggcatttcgtcgaacgacctgtggacaactcttgaagatcaaacttgtatccccaaaatcgaagctacagtgatacaaaaccatgtcagccttaaagttcaatgtgagaagaaacaaggacaacttctcaaaggaatcatatcacttgaaaagcttaaactcactgttcttcatctcaatatcactacttcgtctcattcctctgtttcttattccttcaacctcaagatggaagatgagtgcgacttagagtcagccgacgagattacggcggctgttcatcggattttcgatattccgacaatttgattaaacacatataattccaaaaatattaacagctgacaaaatggtatcttttttttttttcctacttgtaccaattttttaagaattaagagaataaaaaaatttcgtttttcgttc

SEQ ID NO: 101349 - protein, 307 aa, Arabidopsis thaliana; identical to SEQ ID NO: 39873
  peptide (1)..(307): Ceres Seq. ID no. 13607627

SEQ ID NO: 101350 - protein, 252 aa, Arabidopsis thaliana; identical to SEQ ID NO: 39874
  peptide (1)..(252): Ceres Seq. ID no. 13607628

SEQ ID NO: 101351 - protein, 233 aa, Arabidopsis thaliana; identical to SEQ ID NO: 39875
  peptide (1)..(233): Ceres Seq. ID no. 13607629

SEQ ID NO: 101352 - DNA, 2211 bp, Arabidopsis thaliana
  misc_feature (1)..(2211): Ceres Seq. ID no. 13607633
  misc_feature (1)..(2211): Ortholog of  Ceres SEQ ID NO 13594037 as cited in SEQ ID NO 55666
  misc_feature (1)..(2211): Ortholog of  Ceres SEQ ID NO 13657707 as cited in SEQ ID NO 66407
accagccccattaataaaccaccgggctctgtttcaataaaaaaaatcccctccctctcatatttacctcccgaataaaaccggagggagagaaaaaacataaaaagcaaaaaaaaaggtaaaatcaaaaaggggaaaaatatataacaacaaaaaaaaaaagttagaaaaaatggcagtaggaaaggttgtggtatctgtggcatcactcctcctagtggtgggtgttgccataggagttatcacgttcgttaataaaggaggcggcgccaatggcgacagtaatggtcccataaactctcatcagaaagcggttcagacaatttgccagtcaaccacagaccaaggttcgtgcgcgaaaacactcgacccagtcaaaagtgatgatccaagcaagcttgtcaaagccttcctgatggctactaaagacgcgatcacaaaatcctcaaacttcacggcttcgaccgaaggaggtatgggtactaacatgaacgcgaccagcaaagccgttcttgattactgcaagagagtattgatgtacgctcttgaggatcttgagaccattgttgaagagatgggtgaggatcttcagcagagtggaactaagcttgaccagctcaaacaatggttaactggagttttcaactaccaaaccgattgtcttgacgacatcgaggaagttgagctaaagaagatcatgggtgaaggaatctctaactccaaggttttgaccagtaacgctatcgatatcttccattccgttgttaccgcgatggcccaaatgggtgtcaaagtcgacgatatgaagaacataaccatgggagccggagccggtggagctgcacgtcgccttcttgaagacaacgactctaagggactccccaaatggttttctggtaaagacaggaagcttatggctaaggccggacgtggcgctccagctggcggtgatgatggtatcggtgaaggcggtggtggtggcggtaagatcaaggcgactcatgtagtggctaaggatggaagtggacagtttaagaccatttctgaggcggttatggcttgcccggataaaaaccctggaaggtgcattatccatatcaaggctggtatctacaatgaacaagtcagaatccctaagaagaagaacaacattttcatgttcggtgatggtgctacacaaaccatcattacctttgacagaagtgttaaacttagcccaggaaccactacttcactcagtggcaccgttcaggtcgaatctgagggattcatggcgaaatggattgggtttaagaacactgctggtccattgggacaccaagcggtcgcactccgtgtgaacggagaccgtgcggtcatattcaactgtagattcgacggttaccaagacacactctacgtcaacaacggacgtcaattctacaggaacattgttgtatccggtacagtggatttcatcttcggaaaatccgcaactgtgatccaaaactctctcatcctcgtccgaaagggaagccccggacaatccaactacgttacggctgacggtaatgaaaagggtgcagcgatgaagatcggtatcgtcctccataactgccgtatcataccggacaaggagctcgaagctgacaagctaaccatcaaatcgtacctaggaaggccgtggaagaagtttgccacgactgtgattattggaactgagattggtgatttgattaaaccagaaggatggaccgaatggcaaggagaacaaaaccacaagactgctaaatacattgagttcaataaccgtggaccgggagctgccactactcagaggcctccttgggttaaggtggctaagtctgcggctgaggttgaaacttacaccgtggctaactgggttggtccagctaactggatccaagaagccaacgtgcccgtccaactaggattgtaagaggacaacacaaaaaagttaagaataaaacagtatgtgataatgttaaggtaacgatacgacgtcgtctctggggatcagaactcttttttggatactatatacaaagatagggttctagacgtgttgagatgatgtttgtataagattgctttcgtttcacgtgcaaaagaggaaaaaaaattgttttgttattttttttgtagtacaaataattaatttttttttatcacatgttgtatccttaagaaaattgatacacaaaatatttt

SEQ ID NO: 101353 - protein, 588 aa, Arabidopsis thaliana; identical to SEQ ID NO: 40064
  peptide (1)..(588): Ceres Seq. ID no. 13607634

SEQ ID NO: 101354 - protein, 507 aa, Arabidopsis thaliana; identical to SEQ ID NO: 40065
  peptide (1)..(507): Ceres Seq. ID no. 13607635

SEQ ID NO: 101355 - protein, 487 aa, Arabidopsis thaliana; identical to SEQ ID NO: 40066
  peptide (1)..(487): Ceres Seq. ID no. 13607636

SEQ ID NO: 101356 - DNA, 850 bp, Arabidopsis thaliana
  misc_feature (1)..(850): Ceres Seq. ID no. 13607637
  misc_feature (1)..(850): Ortholog of  Ceres SEQ ID NO 13589868 as cited in SEQ ID NO 55521
  misc_feature (1)..(850): Ortholog of  Ceres SEQ ID NO 12617659 as cited in SEQ ID NO 65286
  misc_feature (1)..(850): Ortholog of  Ceres SEQ ID NO 12780566 as cited in SEQ ID NO 65822
cctctcacgttcgaagaccatttcttgttctttggacgaccatcggcgacagtgttaagtctagagtcttcttcttcttcggcgtagttttttccccggcttgaaaaatgggtctatccttcggaaagttgttcagcaagctctttgcaaagaaagagatgcgtatcctcatggtgggtctcgatgcagctggtaagactacgatcttgtacaagctcaagcttggagagatcgtgactacgattccaaccattggtttcaatgtggagactgtggaatacaagaacattagctttaccgtgtgggatgtcgggggtcaagacaagattcgtccattgtggaggcactacttccagaacactcagggacttatctttgtggtggacagcaatgatcgtgaccgtgttgtggaagccagagatgagcttcacagaatgttgaacgaagatgagttgagagatgctgtgcttctcgtttttgctaacaagcaagatcttccaaatgcgatgaacgccgctgagataaccgataagcttggacttcactctctccgtcaacgacactggtacatacagagcacatgtgctacctccggagaagggctttatgagggacttgactggctctctaacaacatcgcaaacaaggcttaggagaacaacgtgtggtttggtttttaatcgaggagagtcttgtcttcttccttctatcttttgttctttcgtctcaaactcttatcatttcatactctttgttcttcgctctaataatttacaagtttttttttttgttgcttttatcctataattcagactcttataaaatggggcccaatttcggcggatattcc

SEQ ID NO: 101357 - protein, 181 aa, Arabidopsis thaliana; identical to SEQ ID NO: 29669
  peptide (1)..(181): Ceres Seq. ID no. 13607638

SEQ ID NO: 101358 - protein, 164 aa, Arabidopsis thaliana; identical to SEQ ID NO: 29670
  peptide (1)..(164): Ceres Seq. ID no. 13607639

SEQ ID NO: 101359 - protein, 160 aa, Arabidopsis thaliana; identical to SEQ ID NO: 29671
  peptide (1)..(160): Ceres Seq. ID no. 13607640

SEQ ID NO: 101360 - DNA, 636 bp, Arabidopsis thaliana
  misc_feature (1)..(636): Ceres Seq. ID no. 13607649
  misc_feature (1)..(636): Ortholog of  Ceres SEQ ID NO 13583505 as cited in SEQ ID NO 62240
tctcgagtacacctcatcattcttcttcgtgtgagagagatctttttggaaaacgaaagcgggatttagcgtatagcagcttccaccgtttcgccgaatttcatcgagcttcaagtgaacatgagtaaaccaatggaagaggataccaaccagggaaagactgaggaggaggagttcaacactggaccactctctgttttgatgatgagtgttaagaataacactcaggtgttgatcaattgccgtaacaacaggaaactccttggccgagttagggcttttgacaggcactgcaacatggttcttgaaaatgtcagagaaatgtggactgaggttccgaaaaccggaaaaggaaagaagaaagctcttcctgttaacagagatcgattcatcagcaagatgttcctgcgtggagactcagtcattatcgtcctcaggaaccccaagtgaaagaagctcttcttatgataattctcgcttcttcttgtcaaatcctaattgttgcatcaacagtgagaacatgttttgattatgagccttaaatctactagtgttgccttgtatttttcacttgtcttctatctttgacttgaaacgcagccagtgaactttgtaatatcaaaagagaagttcttt

SEQ ID NO: 101361 - protein, 109 aa, Arabidopsis thaliana; identical to SEQ ID NO: 22047
  peptide (1)..(109): Ceres Seq. ID no. 13607650

SEQ ID NO: 101362 - protein, 105 aa, Arabidopsis thaliana; identical to SEQ ID NO: 22048
  peptide (1)..(105): Ceres Seq. ID no. 13607651

SEQ ID NO: 101363 - protein, 82 aa, Arabidopsis thaliana; identical to SEQ ID NO: 22049
  peptide (1)..(82): Ceres Seq. ID no. 13607652

SEQ ID NO: 101364 - DNA, 1618 bp, Arabidopsis thaliana
  misc_feature (1)..(1618): Ceres Seq. ID no. 13607653
  misc_feature (1)..(1618): Ortholog of  Ceres SEQ ID NO 13639469 as cited in SEQ ID NO 54825
  misc_feature (1)..(1618): Ortholog of  Ceres SEQ ID NO 15179301 as cited in SEQ ID NO 0
aaactgaaagttaggacctttcatttccaatctctaaacccatttctctacgattagagaagctgacatcaaaattgaaacttgggaaatttttggatttgttcttcttctatggcaactgaagacgatggtgaattgtcagctcgttaccagaacacgttggatgcattgtcgtctttgatcacaaaacgtggccgtttagctagtaacaaccaatctcaccgattccgtttgctctttcattatctcaaggttcttgagcttgaagatgcagtttcacaaatgaaaatcattcatgtggccggaactaaaggaaagggatcaacatgtacatttgcggagtctattcttcgttgttacggtcttcgaactggtctcttcacatctcctcacttaatcgatgtccgagagagattccgtcttaacggcattgagataagccaggagaaatttgtgaactacttttggtgttgctttcataagctcaaggagaaaaccagcaatgaggttgatgttgttatactagaagttggcttaggtgggagattcgatgcgactaatgtgattcagaaacctgtcgtctgtggtatttcttctctagggtatgaccatatggagattcttggatacacacttgctgaaattgctgcagagaaagccggtatcttcaagagtggagttcctgcttttacagtggctcaacctgatgaagcaatgcgtgtactcaatgaaaaagcttcaaaattggaggtgaatcttcaggtggtggaaccgttggactcaagccagagactcgggcttcaaggcgaacatcaatatctaaacgctggtcttgctgttgcgttgtgctctacatttcttaaagagattggtattgaggacaagaatggtttggatcagacaaacggtttacccgaaaaattcatctctggattgtcaaatgcttatttgatgggacgagctatgatagtgcctgattcagaactccctgaagagattgtgtattaccttgatggagctcatagtcctgaaagcatggaagcttgcgctatatggttttcaaaacagatcaaacaaaaccaagaaagaaaccagaaaagatcagagcagatactcttgttcaattgtatgtctgttcgtgacccgagtttgcttcttccgcgattaaggagtaaatgcattgatcaaggagttgatttcaagagagccgtttttgtgccaaacgtatcagtgtacaaccaagtgggatcttcgacaaacgttggcacacgtgtcgagtcgatgtcgtggcagttcggtcttcagaggatttgggagagtttagctcgaggtgaagcaaaatctaattcaaaaagtgattctaaaggcaaagaagaagagaagagtttcgttttctcgtcacttcctgtggctgttgactggctccgggacaatgctcgccaaagtaaacaagttcgttttcaggtgttggtaactggttcattacatttggtgggtgatctcttgagatttatcaagaaatgaatatgtttctgccatgtattcttggccaatctttgcctgtaatgactatatatctcacaacatgatttaacaaaagaaaagaaaagatatttcg

SEQ ID NO: 101365 - protein, 470 aa, Arabidopsis thaliana
  peptide (1)..(470): Ceres Seq. ID no. 13607654
MATEDDGELSARYQNTLDALSSLITKRGRLASNNQSHRFRLLFHYLKVLELEDAVSQMKIIHVAGTKGKGSTCTFAESILRCYGLRTGLFTSPHLIDVRERFRLNGIEISQEKFVNYFWCCFHKLKEKTSNEVDVVILEVGLGGRFDATNVIQKPVVCGISSLGYDHMEILGYTLAEIAAEKAGIFKSGVPAFTVAQPDEAMRVLNEKASKLEVNLQVVEPLDSSQRLGLQGEHQYLNAGLAVALCSTFLKEIGIEDKNGLDQTNGLPEKFISGLSNAYLMGRAMIVPDSELPEEIVYYLDGAHSPESMEACAIWFSKQIKQNQERNQKRSEQILLFNCMSVRDPSLLLPRLRSKCIDQGVDFKRAVFVPNVSVYNQVGSSTNVGTRVESMSWQFGLQRIWESLARGEAKSNSKSDSKGKEEEKSFVFSSLPVAVDWLRDNARQSKQVRFQVLVTGSLHLVGDLLRFIKK

SEQ ID NO: 101366 - protein, 413 aa, Arabidopsis thaliana
  peptide (1)..(413): Ceres Seq. ID no. 13607655
MKIIHVAGTKGKGSTCTFAESILRCYGLRTGLFTSPHLIDVRERFRLNGIEISQEKFVNYFWCCFHKLKEKTSNEVDVVILEVGLGGRFDATNVIQKPVVCGISSLGYDHMEILGYTLAEIAAEKAGIFKSGVPAFTVAQPDEAMRVLNEKASKLEVNLQVVEPLDSSQRLGLQGEHQYLNAGLAVALCSTFLKEIGIEDKNGLDQTNGLPEKFISGLSNAYLMGRAMIVPDSELPEEIVYYLDGAHSPESMEACAIWFSKQIKQNQERNQKRSEQILLFNCMSVRDPSLLLPRLRSKCIDQGVDFKRAVFVPNVSVYNQVGSSTNVGTRVESMSWQFGLQRIWESLARGEAKSNSKSDSKGKEEEKSFVFSSLPVAVDWLRDNARQSKQVRFQVLVTGSLHLVGDLLRFIKK

SEQ ID NO: 101367 - protein, 303 aa, Arabidopsis thaliana; identical to SEQ ID NO: 43672
  peptide (1)..(303): Ceres Seq. ID no. 13607656

SEQ ID NO: 101368 - DNA, 893 bp, Arabidopsis thaliana
  misc_feature (1)..(893): Ceres Seq. ID no. 13607673
  misc_feature (1)..(893): Ortholog of  Ceres SEQ ID NO 13585560 as cited in SEQ ID NO 64470
aatcttcatctccgtcgatctccattgatctctaacactaaaattctactactcttcactttctacagcttaggaagagttctcgacaagctgattcttcgagttctcgacaagtttcagtgtttttgtttccgggtcacagagaacaaaggcaatttacaataatggcagagactaaacaaccactgatcggtcttaaatgggaaccaaagcttccaggcttatccttagacttgaaaactggttcaaccagaagcaaaacagctgagagttctaagtcagagcttgttgatggtctttgtcttccacctaatgatccaaggaagattaacaagatgattagaaaacaactcaaagacactactggttctaactggtttgatatgcctgctccaacaatgactcctgagttgaaaagagatcttcagttgcttaagttgagaactgtaatggatcctgctctacactacaagaaatctgtgtcacggtctaaactagctgaaaaatatttccagattggtacagtaattgaaccagctgaagagttttatgggagattgacaaagaagaatagaaaagcaactcttgctgatgagttggtttcagatcctaaaactgctctctacaggaagcgtaaagttagggagattgaggagaagagtagagctgttacgaataagaaatggaataaaaagggaaaccagtctaagaacacaaagccaagaaggaactgaattatttttgttaagagtatgatcatagttttgggacacattttttctatttttaatagaatatggtcatagtattggatacactttcttgcggtgatataggttgtaatgactcttgttgtttatggcctttgtttaaaggattttgtgttattggtt

SEQ ID NO: 101369 - protein, 189 aa, Arabidopsis thaliana; identical to SEQ ID NO: 36771
  peptide (1)..(189): Ceres Seq. ID no. 13607674

SEQ ID NO: 101370 - protein, 132 aa, Arabidopsis thaliana; identical to SEQ ID NO: 36772
  peptide (1)..(132): Ceres Seq. ID no. 13607675

SEQ ID NO: 101371 - protein, 116 aa, Arabidopsis thaliana; identical to SEQ ID NO: 36773
  peptide (1)..(116): Ceres Seq. ID no. 13607676

SEQ ID NO: 101372 - DNA, 2220 bp, Arabidopsis thaliana
  misc_feature (1)..(2220): Ceres Seq. ID no. 13607677
  misc_feature (1)..(2220): Ortholog of  Ceres SEQ ID NO 13596198 as cited in SEQ ID NO 68488
atgcaagatctcttcggttcagttcgccgctcacttgtcttccgttctaccaccgacgatgagaatcaagagaatcatcctcctccgtttccttctctcctcgccgataaaatcacttcctgtatccgcaaatcaatggttttcgccaaatcccagtcacctccgaataactccaccgtacaaatcaaacctccgattcggtggcggaaaggtcagttaattggccgtggcgcttttggtactgtgtatatgggaatgaatctcgattccggtgagcttctcgccgttaaacaggttctgattacatctaattgtgcatccaaggaaaaaactcaggctcatattcaggagcttgaagaggaagtgaagctactcaagaatctctctcatccaaatatagttagatatttgggtacggtgagggaagatgaaactttgaatatcttgcttgaatttgttcctggtggatctatatcttcactcttggagaaatttggagcctttcctgaatctgttgttcggacatacacgaaccaactgcttttgggattggagtaccttcataatcatgccattatgcaccgtgacattaagggtgctaatatccttgtggataatcaaggatgcattaaacttgctgattttggtgcgtccaaacaggtagcggagttggctactatttcgggtgccaaatctatgaaaggaactccctattggatggctccagaagttattcttcaaaccgggcatagcttttctgctgatatttggagtgtaggatgcacagtgattgaaatggtgactggaaaagctccttggagccagcaatataaagagattgctgctattttccacattggaacgacgaaatcgcatcctccaatccctgacaatatctcctctgacgcaaatgattttttgctcaagtgtctgcagcaggaaccaaatctgcggccaaccgcttctgagctgctaaagcatccatttgttacgggcaaacagaaggaatctgcgtctaaagatcttacttcatttatggacaattcatgcagtcctttaccatcagagttgactaacattacgagctatcaaacatctacgagtgacgatgtaggagacatctgtaacttgggtagtctgacttgtacacttgctttccctgagaaatcaatccaaaataacagtttgtgtctgaaaagtaataacgggtatgatgacgatgatgataatgatatgtgtttgattgacgatgagaatttcttgacatataatggagagactggccctagtcttgacaataatactgatgccaagaagagctgtgataccatgagtgagatctctgatattttgaagtgcaaatttgacgaaaattctggaaacggagaaacagagacgaaagttagtatggaagttgaccatccatcatactcggaggatgaaaatgagctgactgagtcgaaaatcaaagctttcttagatgacaaggctgcagagttaaagaagttacagacgcctctgtacgaagaattctacaacggtatgatcacatgctcccccatctgcatggagagtaacatcaataacaataaacgagaggaggcacctcgtggtttcttgaaactgcctccaaaaagtcggtctccgagtcagggccatattggtcgatcaccttctagagcaacagatgcagcctgttgttccaagagtccagaaagtggtaatagctctggtgccccgaagaatagcaatgcaagtgctggtgctgaacaagaatcaaacagtcaaagtgtcgcgctgtcggagatagagaggaagtggaaggaagagcttgatcaagaacttgaaagaaagcgaagagagattacacggcaagcagggatgggatcatccccgagagatagaagcttgagccgacatagagagaagtcaagatttgcatctccaggcaaatgatctgtacaaaagaaaagcagccaattttgcacttttgtctgtaaggcttgtattgcttttgatctttcgatttgctcatctagtatatatgatatagacataaaattgtgccaacttaaagtttgaatatatatagatagctaaactatttgcttaagtagggtgtgatgtgagaatgttggtgcatattgagtgttaagccaaccacagaacaaatattttcgagaaattatcgaaagctttgtttactttcggtccggtccg

SEQ ID NO: 101373 - protein, 651 aa, Arabidopsis thaliana
  peptide (1)..(651): Ceres Seq. ID no. 13607678
MQDLFGSVRRSLVFRSTTDDENQENHPPPFPSLLADKITSCIRKSMVFAKSQSPPNNSTVQIKPPIRWRKGQLIGRGAFGTVYMGMNLDSGELLAVKQVLITSNCASKEKTQAHIQELEEEVKLLKNLSHPNIVRYLGTVREDETLNILLEFVPGGSISSLLEKFGAFPESVVRTYTNQLLLGLEYLHNHAIMHRDIKGANILVDNQGCIKLADFGASKQVAELATISGAKSMKGTPYWMAPEVILQTGHSFSADIWSVGCTVIEMVTGKAPWSQQYKEIAAIFHIGTTKSHPPIPDNISSDANDFLLKCLQQEPNLRPTASELLKHPFVTGKQKESASKDLTSFMDNSCSPLPSELTNITSYQTSTSDDVGDICNLGSLTCTLAFPEKSIQNNSLCLKSNNGYDDDDDNDMCLIDDENFLTYNGETGPSLDNNTDAKKSCDTMSEISDILKCKFDENSGNGETETKVSMEVDHPSYSEDENELTESKIKAFLDDKAAELKKLQTPLYEEFYNGMITCSPICMESNINNNKREEAPRGFLKLPPKSRSPSQGHIGRSPSRATDAACCSKSPESGNSSGAPKNSNASAGAEQESNSQSVALSEIERKWKEELDQELERKRREITRQAGMGSSPRDRSLSRHREKSRFASPGK

SEQ ID NO: 101374 - protein, 606 aa, Arabidopsis thaliana
  peptide (1)..(606): Ceres Seq. ID no. 13607679
MVFAKSQSPPNNSTVQIKPPIRWRKGQLIGRGAFGTVYMGMNLDSGELLAVKQVLITSNCASKEKTQAHIQELEEEVKLLKNLSHPNIVRYLGTVREDETLNILLEFVPGGSISSLLEKFGAFPESVVRTYTNQLLLGLEYLHNHAIMHRDIKGANILVDNQGCIKLADFGASKQVAELATISGAKSMKGTPYWMAPEVILQTGHSFSADIWSVGCTVIEMVTGKAPWSQQYKEIAAIFHIGTTKSHPPIPDNISSDANDFLLKCLQQEPNLRPTASELLKHPFVTGKQKESASKDLTSFMDNSCSPLPSELTNITSYQTSTSDDVGDICNLGSLTCTLAFPEKSIQNNSLCLKSNNGYDDDDDNDMCLIDDENFLTYNGETGPSLDNNTDAKKSCDTMSEISDILKCKFDENSGNGETETKVSMEVDHPSYSEDENELTESKIKAFLDDKAAELKKLQTPLYEEFYNGMITCSPICMESNINNNKREEAPRGFLKLPPKSRSPSQGHIGRSPSRATDAACCSKSPESGNSSGAPKNSNASAGAEQESNSQSVALSEIERKWKEELDQELERKRREITRQAGMGSSPRDRSLSRHREKSRFASPGK

SEQ ID NO: 101375 - protein, 568 aa, Arabidopsis thaliana
  peptide (1)..(568): Ceres Seq. ID no. 13607680
MGMNLDSGELLAVKQVLITSNCASKEKTQAHIQELEEEVKLLKNLSHPNIVRYLGTVREDETLNILLEFVPGGSISSLLEKFGAFPESVVRTYTNQLLLGLEYLHNHAIMHRDIKGANILVDNQGCIKLADFGASKQVAELATISGAKSMKGTPYWMAPEVILQTGHSFSADIWSVGCTVIEMVTGKAPWSQQYKEIAAIFHIGTTKSHPPIPDNISSDANDFLLKCLQQEPNLRPTASELLKHPFVTGKQKESASKDLTSFMDNSCSPLPSELTNITSYQTSTSDDVGDICNLGSLTCTLAFPEKSIQNNSLCLKSNNGYDDDDDNDMCLIDDENFLTYNGETGPSLDNNTDAKKSCDTMSEISDILKCKFDENSGNGETETKVSMEVDHPSYSEDENELTESKIKAFLDDKAAELKKLQTPLYEEFYNGMITCSPICMESNINNNKREEAPRGFLKLPPKSRSPSQGHIGRSPSRATDAACCSKSPESGNSSGAPKNSNASAGAEQESNSQSVALSEIERKWKEELDQELERKRREITRQAGMGSSPRDRSLSRHREKSRFASPGK

SEQ ID NO: 101376 - DNA, 1776 bp, Arabidopsis thaliana
  misc_feature (1)..(1776): Ceres Seq. ID no. 13607702
  misc_feature (1)..(1776): Ortholog of  Ceres SEQ ID NO 15169670 as cited in SEQ ID NO 62085
  misc_feature (1)..(1776): Ortholog of  Ceres SEQ ID NO 13599262 as cited in SEQ ID NO 0
gtatatttcttctcgctcagtaggtctttagggttttagtttcttctcctcaaaaaatggcgatgtatgttatctacgagtcttcttccggctatggtctcttcgaggttcacggactagatgagatcggacagaacactgaggcggttcggacttctgtctccgacctcagtcgctttggccgtgttgttcagctcacagcgtttcatccctttgagtctgctctcgatgctctcaaccaagtcaacgccgtctctgaaggtgttatgactgatgagcttagaagttttctggagttgaatcttcctaaggtcaaggagggaaagaaacccaagttcagtttaggattggctgagcctaaactcggttcacatatatttgaagctactaaaatcccatgccagagcaatgagtttgttcttgagcttctcagaggtgttcgccagcattttgataggtttatcaaggacttaaagcctggtgatcttgaaaaatctcagcttggattagctcacagctacagcagagccaaggtgaagttcaatgttaaccgagtggataacatggttattcaagctatcttcatgcttgacacgcttgataaggatatcaattcctttgccatgagagtcagggaatggtattcgtggcacttccccgaactagtgaagatagtcaatgacaactatctttacgcccgtgtttcaaagatgattgatgacaagtcaaagttgactgaagatcacatccccatgcttactgaagtcttaggggatgaagataaggcaaaggaggtcatcgaagctggaaaagcatccatgggctcggatttatcaccgcttgacttaatcaacgtacagacctttgctcagaaagttatggaccttgctgactacaggaagaagctctatgattatcttgtcactaagatgagcgacattgcccctaatttggctgctttgattggagaaatggtcggtgcccgtttgatttcacatgctggaagtctgactaaccttgctaaatgcccatcttccaccctccagattcttggagccgagaaggctcttttcagggcacttaaaacacgtggaaacactcccaagtatggattgattttccattcttccttcattggccgagcatctgctaagaacaagggccgtatcgctcgttatcttgcaaacaagtgctctatagcatcccggattgattgttttgctgatggtgcaactactgcttttggtgagaagcttcgcgaacaagttgaggaaaggctagaattttatgacaaaggtgttgccccacgcaagaacgtggatgtaatgaaggaggtgatagagaatctaaagcaagaagaggaagggaaggagccagttgatgcctcggtgaagaaaagcaagaagaagaaggcaaagggtgaagaagaagaagaggtggtggcaatggaggaggacaagtcagagaaaaagaagaagaaagagaagaggaagatggagactgcagaggagaacgagaaatcagagaagaagaagacaaagaagagtaaagctggaggagaagaggagactgatgatggtcacagcaccaagaagaagaagaagaagtctaagagcgctgaatagaaagggatgcaacattaacaaaccctgtattgtattttttttttgagctaaattaatgtcgtctgtttttcgtagtgaacatcggagaatttttgttttggtctggaaacgattcaaggtttggcaatatcttaagtttgtttaggttttc

SEQ ID NO: 101377 - protein, 522 aa, Arabidopsis thaliana; identical to SEQ ID NO: 21748
  peptide (1)..(522): Ceres Seq. ID no. 13607703

SEQ ID NO: 101378 - protein, 520 aa, Arabidopsis thaliana; identical to SEQ ID NO: 21749
  peptide (1)..(520): Ceres Seq. ID no. 13607704

SEQ ID NO: 101379 - protein, 452 aa, Arabidopsis thaliana; identical to SEQ ID NO: 21750
  peptide (1)..(452): Ceres Seq. ID no. 13607705

SEQ ID NO: 101380 - DNA, 1387 bp, Arabidopsis thaliana
  misc_feature (1)..(1387): Ceres Seq. ID no. 13607714
  misc_feature (1)..(1387): Ortholog of  Ceres SEQ ID NO 13598582 as cited in SEQ ID NO 65294
  misc_feature (1)..(1387): Ortholog of  Ceres SEQ ID NO 15176114 as cited in SEQ ID NO 67627
gccgtgtcaaatcaatctactgttctctctcctatctgggcaaaaatctcagacaaacctgcaaaattagggtatttgaggatatggattatgatcggtacaagttatttgttggtggtattgcgaaagagacaagtgaagaagctctgaagcagtattttagcagatatggagctgtgttggaagctgttgtagctaaagagaaagtcactggaaaacctagaggttttgggtttgttcgctttgctaatgattgtgatgttgttaaagctcttagagacactcacttcattctcggtaaacccgttgatgtgagaaaggcgattaggaaacatgaactataccaacagccgtttagcatgcagtttttggagagaaaagtgcaacagatgaatggtggtttgcgtgagatgtcgagtaatggtgtgaccagtaggactaagaagatatttgttgggggtttgtcgtctaacacgactgaggaagagtttaagagttactttgagaggtttggtaggactactgatgtagttgtgatgcatgacggtgtgactaacaggccaaggggttttgggtttgttacttatgattcggaggactctgttgaggttgttatgcagagtaatttccatgagttgagtgataaacgcgtggaagtgaaacgggcaatacctaaagaaggaatccagagcaataacggtaatgctgttaatattcctccttcctacagcagctttcaagcaacaccttatgtccctgagcaaaacggatatgggatggttttacagtttcctcctcctgtctttggttatcatcacaatgtccaagccgttcaatatccttatggttaccaattcacagcacaagtggctaacgtttcatggaacaatccgattatgcaacccaccggtttttactgtgctcctcctcatcctactcctcctcccaccaacaatcttggttatatccaatacatgaacgggtttgatctttcgggtacgaacatttccgggtacaatcctctagcatggcctgtaacgggggatgcagctggtgcgctaatacatcagtttgtagatttgaagcttgatgtccacagtcaagcccatcagagaatgaatggaggtaacatgggaataccattgcagaatggtacatatatatgacagttgcagaatgataaatgcaaataggctcacaagggtagtgaaattctttggactcttttaaatggttttttaggttcctcatctttcttcattaactctttggtaaatgtgttgggttggtttggttaccttgtatattgtttaggtatttgattttaaccccaagacttatgtatcatatattactgcatttgtaatatatcacactcatttagttc

SEQ ID NO: 101381 - protein, 387 aa, Arabidopsis thaliana
  peptide (1)..(387): Ceres Seq. ID no. 13607715
RVKSIYCSLSYLGKNLRQTCKIRVFEDMDYDRYKLFVGGIAKETSEEALKQYFSRYGAVLEAVVAKEKVTGKPRGFGFVRFANDCDVVKALRDTHFILGKPVDVRKAIRKHELYQQPFSMQFLERKVQQMNGGLREMSSNGVTSRTKKIFVGGLSSNTTEEEFKSYFERFGRTTDVVVMHDGVTNRPRGFGFVTYDSEDSVEVVMQSNFHELSDKRVEVKRAIPKEGIQSNNGNAVNIPPSYSSFQATPYVPEQNGYGMVLQFPPPVFGYHHNVQAVQYPYGYQFTAQVANVSWNNPIMQPTGFYCAPPHPTPPPTNNLGYIQYMNGFDLSGTNISGYNPLAWPVTGDAAGALIHQFVDLKLDVHSQAHQRMNGGNMGIPLQNGTYI

SEQ ID NO: 101382 - protein, 360 aa, Arabidopsis thaliana
  peptide (1)..(360): Ceres Seq. ID no. 13607716
MDYDRYKLFVGGIAKETSEEALKQYFSRYGAVLEAVVAKEKVTGKPRGFGFVRFANDCDVVKALRDTHFILGKPVDVRKAIRKHELYQQPFSMQFLERKVQQMNGGLREMSSNGVTSRTKKIFVGGLSSNTTEEEFKSYFERFGRTTDVVVMHDGVTNRPRGFGFVTYDSEDSVEVVMQSNFHELSDKRVEVKRAIPKEGIQSNNGNAVNIPPSYSSFQATPYVPEQNGYGMVLQFPPPVFGYHHNVQAVQYPYGYQFTAQVANVSWNNPIMQPTGFYCAPPHPTPPPTNNLGYIQYMNGFDLSGTNISGYNPLAWPVTGDAAGALIHQFVDLKLDVHSQAHQRMNGGNMGIPLQNGTYI

SEQ ID NO: 101383 - protein, 268 aa, Arabidopsis thaliana
  peptide (1)..(268): Ceres Seq. ID no. 13607717
MQFLERKVQQMNGGLREMSSNGVTSRTKKIFVGGLSSNTTEEEFKSYFERFGRTTDVVVMHDGVTNRPRGFGFVTYDSEDSVEVVMQSNFHELSDKRVEVKRAIPKEGIQSNNGNAVNIPPSYSSFQATPYVPEQNGYGMVLQFPPPVFGYHHNVQAVQYPYGYQFTAQVANVSWNNPIMQPTGFYCAPPHPTPPPTNNLGYIQYMNGFDLSGTNISGYNPLAWPVTGDAAGALIHQFVDLKLDVHSQAHQRMNGGNMGIPLQNGTYI

SEQ ID NO: 101384 - DNA, 1695 bp, Arabidopsis thaliana
  misc_feature (1)..(1695): Ceres Seq. ID no. 13607722
  misc_feature (1)..(1695): Ortholog of  Ceres SEQ ID NO 14307682 as cited in SEQ ID NO 54529
atgatcacaagaagcaggtgtcgaagatctttgttatggtttctagtgttccatggcggagctacagccaccggagctccctctggtgggaaagagctttctcagacgcctacttgggcagtcgccgtcgtctgcacctttctcatcctcatttcccatctccttgaaaagggtcttcaaagactcgccaactggctatggaagaagcataaaaactctctccttgaagccttagagaaaatcaaagctgagctgatgatccttggattcatttctttattactcacttttggagaaccatatattctcaagatctgtgttcctcgaaaagctgctctctctatgttaccttgtttatctgaagacacagtgcttttccagaaacttgctccatcatctcttagcaggcatcttttggctgctggtgatacatctattaattgcaaacaaggatctgagccactcataacattgaaaggcttgcaccaacttcacatcttgttgttcttcttggccatctttcatatcgtatatagtttaatcaccatgatgcttagcaggctcaagattcgtggatggaaaaagtgggagcaagagacattatctaatgactatgagttttctattgatcattcaagacttaggctcactcatgagacttcttttgtgagagaacatacaagtttctggacaacaactcctttcttcttttacgtcggatgcttctttaggcagttctttgtatctgttgaaagaaccgactacttgactctgcgccatggattcatctctgcccatttagctccaggaagaaagttcaacttccagagatatatcaaaagatctctcgaggatgatttcaagttggtagttggaataagtccagttctttgggcatcatttgtaatcttcttgctgttcaatgttaatggctggagaacattgttttgggcatcgatacctcctctactcataatcctagctgttggaacaaagcttcaagcaattatggcaacaatggcgctagaaatcgtagagacacatgcagtagttcaggggatgcctttagtgcaaggttcagatcgatacttttggttcgactgtcctcaactacttcttcatcttatccactttgccttgtttcagaatgctttccagataacacacttcttctggatatggtattcttttggattaaaatcatgcttccataaagatttcaatcttgtagtcagcaaactctttctatgcctaggagctttgatcttatgcagctacatcactctcccattgtacgccctcgttactcagatgggttcacacatgaagaaagcagtgtttgatgagcaaatggcaaaggcattgaagaagtggcacaaagacatcaaattgaagaaaggtaaagcgaggaagctcccgagcaagacacttggtgtttcagagagtttcagcctctcttcctcttcctctgcaaccactcttcaccgttccaagaccactggtcactcttctaacatcatatactacaaacaagaagatgaagaagacgaaatgtctgatcttgaagctggagcagaggatgctattgacaggattcaacaacaggagatgcaattccacaactcttagctgctttagtttcttctgttgttacttcatagttcaaatgaaacgatgctgtttactaacttagtc

SEQ ID NO: 101385 - protein, 542 aa, Arabidopsis thaliana
  peptide (1)..(542): Ceres Seq. ID no. 13607723
MITRSRCRRSLLWFLVFHGGATATGAPSGGKELSQTPTWAVAVVCTFLILISHLLEKGLQRLANWLWKKHKNSLLEALEKIKAELMILGFISLLLTFGEPYILKICVPRKAALSMLPCLSEDTVLFQKLAPSSLSRHLLAAGDTSINCKQGSEPLITLKGLHQLHILLFFLAIFHIVYSLITMMLSRLKIRGWKKWEQETLSNDYEFSIDHSRLRLTHETSFVREHTSFWTTTPFFFYVGCFFRQFFVSVERTDYLTLRHGFISAHLAPGRKFNFQRYIKRSLEDDFKLVVGISPVLWASFVIFLLFNVNGWRTLFWASIPPLLIILAVGTKLQAIMATMALEIVETHAVVQGMPLVQGSDRYFWFDCPQLLLHLIHFALFQNAFQITHFFWIWYSFGLKSCFHKDFNLVVSKLFLCLGALILCSYITLPLYALVTQMGSHMKKAVFDEQMAKALKKWHKDIKLKKGKARKLPSKTLGVSESFSLSSSSSATTLHRSKTTGHSSNIIYYKQEDEEDEMSDLEAGAEDAIDRIQQQEMQFHNS

SEQ ID NO: 101386 - protein, 457 aa, Arabidopsis thaliana
  peptide (1)..(457): Ceres Seq. ID no. 13607724
MILGFISLLLTFGEPYILKICVPRKAALSMLPCLSEDTVLFQKLAPSSLSRHLLAAGDTSINCKQGSEPLITLKGLHQLHILLFFLAIFHIVYSLITMMLSRLKIRGWKKWEQETLSNDYEFSIDHSRLRLTHETSFVREHTSFWTTTPFFFYVGCFFRQFFVSVERTDYLTLRHGFISAHLAPGRKFNFQRYIKRSLEDDFKLVVGISPVLWASFVIFLLFNVNGWRTLFWASIPPLLIILAVGTKLQAIMATMALEIVETHAVVQGMPLVQGSDRYFWFDCPQLLLHLIHFALFQNAFQITHFFWIWYSFGLKSCFHKDFNLVVSKLFLCLGALILCSYITLPLYALVTQMGSHMKKAVFDEQMAKALKKWHKDIKLKKGKARKLPSKTLGVSESFSLSSSSSATTLHRSKTTGHSSNIIYYKQEDEEDEMSDLEAGAEDAIDRIQQQEMQFHNS

SEQ ID NO: 101387 - protein, 428 aa, Arabidopsis thaliana
  peptide (1)..(428): Ceres Seq. ID no. 13607725
MLPCLSEDTVLFQKLAPSSLSRHLLAAGDTSINCKQGSEPLITLKGLHQLHILLFFLAIFHIVYSLITMMLSRLKIRGWKKWEQETLSNDYEFSIDHSRLRLTHETSFVREHTSFWTTTPFFFYVGCFFRQFFVSVERTDYLTLRHGFISAHLAPGRKFNFQRYIKRSLEDDFKLVVGISPVLWASFVIFLLFNVNGWRTLFWASIPPLLIILAVGTKLQAIMATMALEIVETHAVVQGMPLVQGSDRYFWFDCPQLLLHLIHFALFQNAFQITHFFWIWYSFGLKSCFHKDFNLVVSKLFLCLGALILCSYITLPLYALVTQMGSHMKKAVFDEQMAKALKKWHKDIKLKKGKARKLPSKTLGVSESFSLSSSSSATTLHRSKTTGHSSNIIYYKQEDEEDEMSDLEAGAEDAIDRIQQQEMQFHNS

SEQ ID NO: 101388 - DNA, 999 bp, Arabidopsis thaliana
  misc_feature (1)..(999): Ceres Seq. ID no. 13607730
  misc_feature (1)..(999): Ortholog of  Ceres SEQ ID NO 13583408 as cited in SEQ ID NO 62616
  misc_feature (1)..(999): Ortholog of  Ceres SEQ ID NO 15179752 as cited in SEQ ID NO 63074
ataaaactcacatcgccgctgataattccgcctctgagaaattgcgttcgattacagctccacagaggattcggaaatggttgagtcaaaggttgtagttccagagtcggtgttgaagaagaggaagagagaggaggaatgggctttggagaagaagcagaatgttgaagccgccaagaagaagaacgccgagaacaggaagcttatcttcaaaagagccgagcaatactccaaggaatatgccgagaaggagaaggagttgatctcgttgaaacgcgaggccaagcttaagggaggtttctatgttgaccctgaagctaagctcttgttcatcatccgtatccgtggtatcaatgccattgaccctaagactaagaagattctccagctcttgcgtttgagacagattttcaatggtgttttccttaaagtcaacaaggctacgatgaacatgcttcgccgtgttgagccctatgtcacttacggattccctaacttgaagagtgtcaaggaattgatctacaagagaggttacggaaagcttaaccaccagaggatagctttgactgacaactctattgtagagcaggctcttggaaagcatggtatcatttgcactgaggatttgatccacgagattctaacagtaggacctcatttcaaggaagccaacaacttcctttggccattccagcttaaggcaccactaggtggcctcaagaagaagagaaatcactacgtggaaggtggtgatgccggaaaccgtgagaacttcatcaatgagcttatcaggaggatgaattagaatgttatcgttttcaatgtcaaacttctctgcgttttcattatgtgcctcctcctggattttgatcttctttctcaagttaaaagacattttgaatcttctcttttgttctctttggatcttaatttgtgctttgattactgcaagtgattctacatttctctttaataggatttttaagaaactgtttcttc

SEQ ID NO: 101389 - protein, 242 aa, Arabidopsis thaliana; identical to SEQ ID NO: 29184
  peptide (1)..(242): Ceres Seq. ID no. 13607731

SEQ ID NO: 101390 - DNA, 514 bp, Arabidopsis thaliana
  misc_feature (1)..(514): Ceres Seq. ID no. 13607746
  misc_feature (1)..(514): Ortholog of  Ceres SEQ ID NO 12476115 as cited in SEQ ID NO 107
gccattttcctcactagcagcaacacacttgaacactactttcgaactctctctttatctctcttgcaatgaagctctctatgcgtttgatctcagctgttctcatcatgttcatgatattcgtcgccactgggatgggaccagtcactgtggaggcacgcacttgtgagtcgcagagccataggttcaagggtacatgcgtgagtgcatcaaactgcgccaacgtgtgccacaacgaaggctttgtcggaggtaactgccgtggattccgtcgtcgttgcttctgcaccagacattgctgatctacccattctcatgcataattcaagctttgatccatcgtcgtgtgtcacttctttcttatctaatcttccgtacagtaccatgaagtaccgtacattagtgtgttctcaaataagtctttggatttgtgtgtttccggtttaaatgtaatgttaaatcaactaatgactttgagcctttgactagtaataatcaaaatctatgttctgat

SEQ ID NO: 101391 - protein, 77 aa, Arabidopsis thaliana; identical to SEQ ID NO: 27682
  peptide (1)..(77): Ceres Seq. ID no. 13607747

SEQ ID NO: 101392 - protein, 73 aa, Arabidopsis thaliana; identical to SEQ ID NO: 27683
  peptide (1)..(73): Ceres Seq. ID no. 13607748

SEQ ID NO: 101393 - protein, 64 aa, Arabidopsis thaliana; identical to SEQ ID NO: 27684
  peptide (1)..(64): Ceres Seq. ID no. 13607749

SEQ ID NO: 101394 - protein, 55 aa, Arabidopsis thaliana; identical to SEQ ID NO: 27685
  peptide (1)..(55): Ceres Seq. ID no. 13607750

SEQ ID NO: 101395 - DNA, 666 bp, Arabidopsis thaliana
  misc_feature (1)..(666): Ceres Seq. ID no. 13607755
  misc_feature (1)..(666): Ortholog of  Ceres SEQ ID NO 12609339 as cited in SEQ ID NO 51780
atggcgaattccggcgaagagaagttgaagctctactcttactggagaagctcgtgtgctcatcgtgtccgtatcgccctcgctttgaaagggcttgattatgagtatataccagtgaatttgctcaagggtgatcaattcgattcagatttcaagaagatcaatccaatgggaactgtaccagctctggtggatggagatgttgtgattaatgattcttttgcgataataatgtatctggatgagaagtaccctgagccacctttgttacctcgtgacctccataaacgagctgtgaattaccaggcaatgagtattgtcttgtctggcatacagcctcatcaaaatctggctgttattaggtatatcgaggaaaagataaatgtggaggagaagactgcctgggttaataatgctatcacaaaaggatttacagctctcgagaaactgttggtgaattgcgctgggaaacatgcgactggtgatgaaatttacctggctgatctctttctagcaccacagatccacggagcaatcaacagattccagattaacatggaaccgtacccaactcttgcaaaatgttacgaatcatacaacgaactgcctgcgtttcaaaatgcactaccggaaaagcagccagatgctccttcttccaccatctga

SEQ ID NO: 101396 - protein, 221 aa, Arabidopsis thaliana; identical to SEQ ID NO: 77595
  peptide (1)..(221): Ceres Seq. ID no. 13607756

SEQ ID NO: 101397 - protein, 165 aa, Arabidopsis thaliana; identical to SEQ ID NO: 77596
  peptide (1)..(165): Ceres Seq. ID no. 13607757

SEQ ID NO: 101398 - protein, 144 aa, Arabidopsis thaliana; identical to SEQ ID NO: 88276
  peptide (1)..(144): Ceres Seq. ID no. 13607758

SEQ ID NO: 101399 - DNA, 1322 bp, Arabidopsis thaliana
  misc_feature (1)..(1322): Ceres Seq. ID no. 13607773
  misc_feature (1)..(1322): Ortholog of  Ceres SEQ ID NO 13655812 as cited in SEQ ID NO 64743
aaatgtgcctctttggttccaaagtcgctctgtaacttaagagagagtgactgttccgttgacagagcaaaatggcccaaacctattgaaaaccccaaaacccttagtttggaatctcatctcattttgcttctgttcttttccatgtaatttcaacaaagtttgaaactttgtttctatagcaactcaattacatggaaattcttaaaagtctactctttaagtcgccctcttggctgaaactcttagcttcttgttataaaacctgaagttcgaaatcattccaataccacaaataactcaactttcttcaagcatggacaatgaagatcaggagtcccttttacttcaaggggttccagataattatggaggtgttaaggtgaacttgacagaaccaatgactattgaggattttgtcccaaagctgagagcttcacttgtgtattggagcaatcaggggacgaaggggatatggttaaagcttgccgatgggcttgacaatcttattgcacctgcaaaagcagaagggtttgtgtgccaccatgccgagagggaatacaccatgcttacatcttggatcgctgatgttcctagtactcttcctgccaatgcgtctcatcgtattggagttggtgcctttgtcctaaacaagaagaccaaagaggtgcttgtggtccaggagattgatggtcatttcaaaggtacaggagtgtggaaactgcctaccggtgttgttaaagagggtgagaatatttgggaaggagcacttagggaagtggaagaagaaactggtattaagacaaaatttgtagaagtcctggctttcagggaaagccaccaagcattcttggaaataaaaacggatatatttttcctctgtgagttagaaccaaccacttttgaaatcaagaaacaagactctgagatcttagctgctaagtggatgccaattgaagaatacgtaaaccaaccctggaaccagaagaaagaactgtttaggttcatggcgaacatctgcttgaagagattgcaggagatggaatacatgggtttctccaaagtccttactacgacttcatctgggaaagagagctatctttactgcaacaccgatcacgccaacctcctcaacgcaacgcgtggcctagcctccacctctggttgaaaaacccttcttcagaacgtgtttatgtttcgttgtttcatgtccattgttcaataaaagcaccagtctcgtgtgtacaacgattggagacttctttatgtaatttaccatcatttcctcactacaacttcatatataatatatttctttggct

SEQ ID NO: 101400 - protein, 283 aa, Arabidopsis thaliana
  peptide (1)..(283): Ceres Seq. ID no. 13607774
MDNEDQESLLLQGVPDNYGGVKVNLTEPMTIEDFVPKLRASLVYWSNQGTKGIWLKLADGLDNLIAPAKAEGFVCHHAEREYTMLTSWIADVPSTLPANASHRIGVGAFVLNKKTKEVLVVQEIDGHFKGTGVWKLPTGVVKEGENIWEGALREVEEETGIKTKFVEVLAFRESHQAFLEIKTDIFFLCELEPTTFEIKKQDSEILAAKWMPIEEYVNQPWNQKKELFRFMANICLKRLQEMEYMGFSKVLTTTSSGKESYLYCNTDHANLLNATRGLASTSG

SEQ ID NO: 101401 - protein, 255 aa, Arabidopsis thaliana
  peptide (1)..(255): Ceres Seq. ID no. 13607775
MTIEDFVPKLRASLVYWSNQGTKGIWLKLADGLDNLIAPAKAEGFVCHHAEREYTMLTSWIADVPSTLPANASHRIGVGAFVLNKKTKEVLVVQEIDGHFKGTGVWKLPTGVVKEGENIWEGALREVEEETGIKTKFVEVLAFRESHQAFLEIKTDIFFLCELEPTTFEIKKQDSEILAAKWMPIEEYVNQPWNQKKELFRFMANICLKRLQEMEYMGFSKVLTTTSSGKESYLYCNTDHANLLNATRGLASTSG

SEQ ID NO: 101402 - protein, 200 aa, Arabidopsis thaliana
  peptide (1)..(200): Ceres Seq. ID no. 13607776
MLTSWIADVPSTLPANASHRIGVGAFVLNKKTKEVLVVQEIDGHFKGTGVWKLPTGVVKEGENIWEGALREVEEETGIKTKFVEVLAFRESHQAFLEIKTDIFFLCELEPTTFEIKKQDSEILAAKWMPIEEYVNQPWNQKKELFRFMANICLKRLQEMEYMGFSKVLTTTSSGKESYLYCNTDHANLLNATRGLASTSG

SEQ ID NO: 101403 - DNA, 1338 bp, Arabidopsis thaliana
  misc_feature (1)..(1338): Ceres Seq. ID no. 13607777
  misc_feature (1)..(1338): Ortholog of  Ceres SEQ ID NO 15177500 as cited in SEQ ID NO 0
agagatgatcaaacaatggcgactttgattctatcattcttgcttcttcttctagcaacaaagcttcctgaatcactagctggtcactgcaccaccacgacggcgacgaaaagcttcgagaaatgtatctctcttccaacacaacaagcgtcaatcgcgtggacataccatccacacaacgctactctcgacctttgtttctttggaactttcatctcaccttccgggtgggttggatgggggattaacccggattccccggcgcagatgactggttctcgtgtcctcatcgcctttccagatccgaattctggtcagctcatcctccttccttacgttcttgactcttcagtcaagcttcagaaaggtcctctgctttcccgtccgcttgaccttgtccgtctctcttcctcctctgcttctctctacggtggtaaaatggccactatccgtaatggtgcttccgttcagatttatgcctctgttaagctctcctcgaacaatactaagatccaccatgtttggaacagaggtctttatgtccaaggttactctcccaccattcatcctactacttccaccgatctctcctccttctccacctttgatgtcacttcaggatttgcaactgttaatcaaaacagcggttcccgagctttaaaagtgactcacggagtagtcaacgcgatatcgtggggttttctcctcccggcgggagcagtaacagctagatacctccgccaaatgcaatcaataggacccacttggttctacatccacgcagcaatacagctaaccggtttcctcctaggaaccattggcttctccattggaatcgtgctcggccataattcccctggagtgacctatgggttacatcggagcctcgggatagctactttcacagcagcggcgctgcaaacactggctttgctgttcagaccaaagacgaccaataagttccggaggtactggaagtcttaccatcattttgtcgggtacgcgtgtgtggtgatgggcgtggtgaatgtgttccaagggtttgaggttttaagggaaggaaggtcgtacgcaaagctcggttactgtctatgtctgtcgacgctggttggtgtctgcgtggccatggaagttaactcgtgggttgtgttttgtcgaaaggctaaagaggagaagatgaagagagatggtttgaccggtgtcgatagatgcagtgggagtcatagttaggtcttgggtcctaattataagacagaaaaagagacacaatatcatttatatatctttgcttagtaccctcatgtacaatgtaacttgttggttcaaagttgacttacc

SEQ ID NO: 101404 - protein, 409 aa, Arabidopsis thaliana
  peptide (1)..(409): Ceres Seq. ID no. 13607778
RDDQTMATLILSFLLLLLATKLPESLAGHCTTTTATKSFEKCISLPTQQASIAWTYHPHNATLDLCFFGTFISPSGWVGWGINPDSPAQMTGSRVLIAFPDPNSGQLILLPYVLDSSVKLQKGPLLSRPLDLVRLSSSSASLYGGKMATIRNGASVQIYASVKLSSNNTKIHHVWNRGLYVQGYSPTIHPTTSTDLSSFSTFDVTSGFATVNQNSGSRALKVTHGVVNAISWGFLLPAGAVTARYLRQMQSIGPTWFYIHAAIQLTGFLLGTIGFSIGIVLGHNSPGVTYGLHRSLGIATFTAAALQTLALLFRPKTTNKFRRYWKSYHHFVGYACVVMGVVNVFQGFEVLREGRSYAKLGYCLCLSTLVGVCVAMEVNSWVVFCRKAKEEKMKRDGLTGVDRCSGSHS

SEQ ID NO: 101405 - protein, 404 aa, Arabidopsis thaliana
  peptide (1)..(404): Ceres Seq. ID no. 13607779
MATLILSFLLLLLATKLPESLAGHCTTTTATKSFEKCISLPTQQASIAWTYHPHNATLDLCFFGTFISPSGWVGWGINPDSPAQMTGSRVLIAFPDPNSGQLILLPYVLDSSVKLQKGPLLSRPLDLVRLSSSSASLYGGKMATIRNGASVQIYASVKLSSNNTKIHHVWNRGLYVQGYSPTIHPTTSTDLSSFSTFDVTSGFATVNQNSGSRALKVTHGVVNAISWGFLLPAGAVTARYLRQMQSIGPTWFYIHAAIQLTGFLLGTIGFSIGIVLGHNSPGVTYGLHRSLGIATFTAAALQTLALLFRPKTTNKFRRYWKSYHHFVGYACVVMGVVNVFQGFEVLREGRSYAKLGYCLCLSTLVGVCVAMEVNSWVVFCRKAKEEKMKRDGLTGVDRCSGSHS

SEQ ID NO: 101406 - protein, 320 aa, Arabidopsis thaliana; identical to SEQ ID NO: 40238
  peptide (1)..(320): Ceres Seq. ID no. 13607780

SEQ ID NO: 101407 - DNA, 1284 bp, Arabidopsis thaliana
  misc_feature (1)..(1284): Ceres Seq. ID no. 13607788
  misc_feature (1)..(1284): Ortholog of  Ceres SEQ ID NO 14311131 as cited in SEQ ID NO 53729
  misc_feature (1)..(1284): Ortholog of  Ceres SEQ ID NO 13594037 as cited in SEQ ID NO 55666
  misc_feature (1)..(1284): Ortholog of  Ceres SEQ ID NO 13657707 as cited in SEQ ID NO 66407
atgtactaagcacattttctttttctggtatagggtttacgtaaaacatgcgacaacgacaaagattgccggaaaactagccggaacttaggggagctaggtgagaccagcggcggttccatcctcgtgagtaaagcagtgatcgtcggtccgttcaaatccgacaacttcacaaccatcaccgatgctattgcagccgcacctaataacactagaccagaggatggttactttgttatctacgcaagagaaggtgtctatgaagaatatattgttgttcccatcaacaaaaagaacttaatgcttatgggagatgggatcaataagacgattattacagggaaccataatgttgttgatggttggactacgtataattgctcgagcttcgctgtggttggagagcggttcatggcggttgatgttacattcagaaacacagccggacctgaaaaacatcaggcagtggctttgaggaacaatgcggaaggatcaagtttttatcggtgtagttttgaaggctatcaagatactctctacgtccattctcttagacaattctatcgcgaatgcgatatatatggtaccgtcgattttatattcggaaatgcagccgcaatttttcaaaactgcaacatatatgctcgaaaaccgatggccaagcaaaagaacgcaataacagcgcatggaagactcgatccaaaccagaataccggaatctctatcatcaattgtacaataaaagccgccccagatcttgcagctgagcctaaatctgccatgacattcttagggagaccgtggaagccatactcaaggacggttttcatgcaatcatacattagtgacattgttcaaccagtcggatggctcgaatggaacggtacaattggactagacacaatctactacggtgagtatagtaactttggaccaggtgctaacacgaaccagagagtgcagtggttagggtacaatttattgaacttggcagaagccatgaacttcacggtctacaacttcaccatgggagatacatggttgcctcaaaccgatattcctttctatggtggtttgcttagcaaagaatgaaattgatgaacaacatattatatgtaaacatatttaattatacgtacttcctcatttaaaaaataaatcaagaaattttcatttgttctagttgttgggacgagtcaatgggagtggttctcatgtaaatctagacgtgcttctaactttatttattgcttcagataaccaataaagctaagttttgatgcc

SEQ ID NO: 101408 - protein, 263 aa, Arabidopsis thaliana
  peptide (1)..(263): Ceres Seq. ID no. 13607789
MLMGDGINKTIITGNHNVVDGWTTYNCSSFAVVGERFMAVDVTFRNTAGPEKHQAVALRNNAEGSSFYRCSFEGYQDTLYVHSLRQFYRECDIYGTVDFIFGNAAAIFQNCNIYARKPMAKQKNAITAHGRLDPNQNTGISIINCTIKAAPDLAAEPKSAMTFLGRPWKPYSRTVFMQSYISDIVQPVGWLEWNGTIGLDTIYYGEYSNFGPGANTNQRVQWLGYNLLNLAEAMNFTVYNFTMGDTWLPQTDIPFYGGLLSKE

SEQ ID NO: 101409 - protein, 261 aa, Arabidopsis thaliana
  peptide (1)..(261): Ceres Seq. ID no. 13607790
MGDGINKTIITGNHNVVDGWTTYNCSSFAVVGERFMAVDVTFRNTAGPEKHQAVALRNNAEGSSFYRCSFEGYQDTLYVHSLRQFYRECDIYGTVDFIFGNAAAIFQNCNIYARKPMAKQKNAITAHGRLDPNQNTGISIINCTIKAAPDLAAEPKSAMTFLGRPWKPYSRTVFMQSYISDIVQPVGWLEWNGTIGLDTIYYGEYSNFGPGANTNQRVQWLGYNLLNLAEAMNFTVYNFTMGDTWLPQTDIPFYGGLLSKE

SEQ ID NO: 101410 - protein, 226 aa, Arabidopsis thaliana
  peptide (1)..(226): Ceres Seq. ID no. 13607791
MAVDVTFRNTAGPEKHQAVALRNNAEGSSFYRCSFEGYQDTLYVHSLRQFYRECDIYGTVDFIFGNAAAIFQNCNIYARKPMAKQKNAITAHGRLDPNQNTGISIINCTIKAAPDLAAEPKSAMTFLGRPWKPYSRTVFMQSYISDIVQPVGWLEWNGTIGLDTIYYGEYSNFGPGANTNQRVQWLGYNLLNLAEAMNFTVYNFTMGDTWLPQTDIPFYGGLLSKE

SEQ ID NO: 101411 - DNA, 1445 bp, Arabidopsis thaliana
  misc_feature (1)..(1445): Ceres Seq. ID no. 13607801
  misc_feature (1)..(1445): Ortholog of  Ceres SEQ ID NO 12582068 as cited in SEQ ID NO 51073
  misc_feature (1)..(1445): Ortholog of  Ceres SEQ ID NO 14303255 as cited in SEQ ID NO 0
ggagaagctattctcagattcacgacaccagttcgtcacaagcttcgagcccagctcggaaaacaaaattggaacttgctgcataaagtttagtttttttattgaatttggaaggatgattgggaatccagtaattcaagttccatcatcactaatgccatcatcctccatgattgcttgtcctcgagtttcacccaatggggttccttatcttccaccaaaacctagaactaggcatttagtggtcagagctgcatccaattccgatgctgctcatggtcaaccatcgtctgatggggggaagaatcctctcaccgttgttttggatgtgcccaggaatatatggagacagactttaaaacctttgagtgattttgggtttggtaagagaagtatttgggaaggtggtgttggtttgtttattgtctctggagctactcttcttgctcttagctgggcttggttgcgaggttttcaaatgcggtcgaagtttaggaaatatcagactgtgtttgagcttagtcatgcttctggtatttgcacgggaacaccggttaggatccgtggggttactgttggtacgattatccgtgttaatccttccttgaagaatattgaagctgttgctgagatagaagatgataagattattatcccgaggaattcattggttgaggtgaatcagtctggtcttctaatggaaactatgatcgacattatgcctaggaatccgataccagaaccttcagtaggacctctgcatcctgaatgtggtaaggaaggtctgatcgtttgtgataggcagacaataaaaggagtgcaaggagttagtttagatgaattagttggaattttcactcgtattggacgcgaagttgaggccattggtgttgccaatacgtattcgcttgctgagagagctgcttcggttattgaggaagcaaggccattgctcaaaaagattcaagccatggctgaagatgctcaacctttgctctctgagtttcgtgatagcggcttgctcaaggaagttgagtgtcttactcgaagccttacccaagcttctgacgatttgagaaaggttaattcgtcaattatgactcctgagaatacagaactcatacagaagtcaatctacactctggtttatactttgaagaacgtcgagagtataagctcagatattctgggattcacaggagatgaagccacaagaaaaaaccttaaactactcatcaaatccctaagcaggctactatgatcagcctgtagattttagactggataaataaaatccagaattttatggtaagcaagttttaaaaattcgaaaaatgtgttgtttcttctttagagttatttttgttttcgttttgtgttctgagattggggtttaatggagagacataattcagtttttataagaacaaaaatgtttgtttctc

SEQ ID NO: 101412 - protein, 419 aa, Arabidopsis thaliana
  peptide (1)..(419): Ceres Seq. ID no. 13607802
EKLFSDSRHQFVTSFEPSSENKIGTCCIKFSFFIEFGRMIGNPVIQVPSSLMPSSSMIACPRVSPNGVPYLPPKPRTRHLVVRAASNSDAAHGQPSSDGGKNPLTVVLDVPRNIWRQTLKPLSDFGFGKRSIWEGGVGLFIVSGATLLALSWAWLRGFQMRSKFRKYQTVFELSHASGICTGTPVRIRGVTVGTIIRVNPSLKNIEAVAEIEDDKIIIPRNSLVEVNQSGLLMETMIDIMPRNPIPEPSVGPLHPECGKEGLIVCDRQTIKGVQGVSLDELVGIFTRIGREVEAIGVANTYSLAERAASVIEEARPLLKKIQAMAEDAQPLLSEFRDSGLLKEVECLTRSLTQASDDLRKVNSSIMTPENTELIQKSIYTLVYTLKNVESISSDILGFTGDEATRKNLKLLIKSLSRLL

SEQ ID NO: 101413 - protein, 381 aa, Arabidopsis thaliana; identical to SEQ ID NO: 30312
  peptide (1)..(381): Ceres Seq. ID no. 13607803

SEQ ID NO: 101414 - protein, 368 aa, Arabidopsis thaliana; identical to SEQ ID NO: 30313
  peptide (1)..(368): Ceres Seq. ID no. 13607804

SEQ ID NO: 101415 - DNA, 1897 bp, Arabidopsis thaliana
  misc_feature (1)..(1897): Ceres Seq. ID no. 13607813
  misc_feature (1)..(1897): Ortholog of  Ceres SEQ ID NO 14310907 as cited in SEQ ID NO 54338
atggtgctccaacaacaaacgcattttctcacaaagaagatagatcaagaagacgaagaagaagaaccttctcatgatttcattttccgatctaagcttcctgatatcttcatccctaaccacctccctctcaccgattacgtcttccaaaggttctccggcgatggcgacggagattcctcaacaacctgtatcatcgacggtgccactggccgtattttgacctacgccgatgtacaaaccaacatgcggaggatagctgccggaatccaccggctcgggatccgccacggagacgtcgtaatgcttctcctcccgaactcgccggagtttgctctgtcttttcttgccgttgcttaccttggagccgtttccactaccgcgaatccgttctacactcagccggagatcgctaaacaggctaaagcctccgccgcgaagatgatcatcacgaagaaatgtttagtcgataaactaacaaacctcaaaaacgacggcgttttgatcgtttgcctagacgatgacggtgacaacggcgttgtttcgtcgagtgatgatggttgcgtgagtttcacggaactgactcaagcggacgaaacagaacttctaaaacctaaaatatcgccggaagacacggtggcgatgccgtactcttccggaacaacgggacttccaaagggagtgatgattactcacaagggtttagttacaagcatcgctcagaaagtcgacggagaaaaccctaaccttaacttcacggccaatgacgtcatcctctgttttctcccaatgtttcacatttacgctctcgacgcgttgatgctttcggcgatgagaaccggtgcagcgttactgatcgtgccgaggttcgagttgaatctggtgatggagctgattcaaaggtacaaagtcacggttgtgccggtggctcctccggtggttttagcattcattaaatcccctgagacggagagatacgacttgagctcggtgagaattatgctatcaggtgcagctacactaaagaaggagcttgaagacgccgtgcgactcaagtttcctaatgccatttttggtcagggttatggaatgaccgagtccggaacggtagctaagtcattagcgtttgcaaagaacccatttaaaaccaagtccggtgcatgtgggactgtgatcagaaacgccgagatgaaagtggtcgataccgaaaccggaatctccttgccgcgcaacaaatctggcgagatctgcgtccgaggtcatcagctcatgaaaggttatttgaatgatccggaagctactgcacgaaccatagacaaagacgggtggttacatacaggagatattgggtttgtggatgatgatgatgagatcttcattgttgatcggttgaaggaactgatcaaattcaaaggctaccaagtggctccagctgagcttgaagcattgcttatttctcatccttctatcgatgatgccgcagttgttgcaatgaaggatgaagtagctgatgaggttccagtagcatttgtagcaagatctcaagggtctcagttaactgaagatgatgtcaagagttacgtaaacaaacaggtggttcactacaagcggattaagatggtgtttttcatagaagttataccaaaagcagtttcgggcaagattctgaggaaggatctgcgagctaaattggaaaccatgtgctctaaatagacacaagagagtttcaaatgtatgtgtaaattcgaacattatagtctctaagaagtaaggagtaagaagcaagtatttggtatttgatttggttttcacgagatcaatcatgtaaagtcaacaaatctaggaaacctaaagctaagctaccctcagaaacataaattcatttcctataatcatc

SEQ ID NO: 101416 - protein, 570 aa, Arabidopsis thaliana
  peptide (1)..(570): Ceres Seq. ID no. 13607814
MVLQQQTHFLTKKIDQEDEEEEPSHDFIFRSKLPDIFIPNHLPLTDYVFQRFSGDGDGDSSTTCIIDGATGRILTYADVQTNMRRIAAGIHRLGIRHGDVVMLLLPNSPEFALSFLAVAYLGAVSTTANPFYTQPEIAKQAKASAAKMIITKKCLVDKLTNLKNDGVLIVCLDDDGDNGVVSSSDDGCVSFTELTQADETELLKPKISPEDTVAMPYSSGTTGLPKGVMITHKGLVTSIAQKVDGENPNLNFTANDVILCFLPMFHIYALDALMLSAMRTGAALLIVPRFELNLVMELIQRYKVTVVPVAPPVVLAFIKSPETERYDLSSVRIMLSGAATLKKELEDAVRLKFPNAIFGQGYGMTESGTVAKSLAFAKNPFKTKSGACGTVIRNAEMKVVDTETGISLPRNKSGEICVRGHQLMKGYLNDPEATARTIDKDGWLHTGDIGFVDDDDEIFIVDRLKELIKFKGYQVAPAELEALLISHPSIDDAAVVAMKDEVADEVPVAFVARSQGSQLTEDDVKSYVNKQVVHYKRIKMVFFIEVIPKAVSGKILRKDLRAKLETMCSK

SEQ ID NO: 101417 - protein, 488 aa, Arabidopsis thaliana; identical to SEQ ID NO: 91877
  peptide (1)..(488): Ceres Seq. ID no. 13607815

SEQ ID NO: 101418 - protein, 469 aa, Arabidopsis thaliana; identical to SEQ ID NO: 91878
  peptide (1)..(469): Ceres Seq. ID no. 13607816

SEQ ID NO: 101419 - DNA, 636 bp, Arabidopsis thaliana
  misc_feature (1)..(636): Ceres Seq. ID no. 13607830
  misc_feature (1)..(636): Ortholog of  Ceres SEQ ID NO 15174289 as cited in SEQ ID NO 1129
  misc_feature (1)..(636): Ortholog of  Ceres SEQ ID NO 12484054 as cited in SEQ ID NO 14991
  misc_feature (1)..(636): Ortholog of  Ceres SEQ ID NO 13591179 as cited in SEQ ID NO 64412
gtctacgaatttagggtttaatttgtgttaatgagccaccgtgtttcgattctatcatctcatttctcacctgcctccgccgtcatggcttccgagaaagaagctgctctcgccgccactccttccgattctcccaccatatttgacaagatcatcagcaaagagattccatccaccgtggtttttgaggatgacaaggtcttagcttttagggacataacgccccagggtcctgttcacatcctccttattccaaaagtgagggatggcctaactggcctctctaaggctgaggaaaggcacatcgacatcttgggccgccttctctacactgccaagcttgtagcaaaacaagaaggcctagcagagggtttcagaattgttatcaatgatggtcctcaaggctgtcaatcggtgtatcacattcatgttcatctcattggaggacgccaaatgaactggcctcctggttaaagatcatcttgaagtggattgttgtcctgatgataagagggacgcttagagtttgctctcgtctactaatgtctctataaataaaaaaacgtgggacatgacttttatgattgttatgcaaaaccttattttatgttatgaaaaggatatttcactgttttc

SEQ ID NO: 101420 - protein, 147 aa, Arabidopsis thaliana; identical to SEQ ID NO: 21147
  peptide (1)..(147): Ceres Seq. ID no. 13607831

SEQ ID NO: 101421 - protein, 129 aa, Arabidopsis thaliana; identical to SEQ ID NO: 21148
  peptide (1)..(129): Ceres Seq. ID no. 13607832

SEQ ID NO: 101422 - DNA, 1473 bp, Arabidopsis thaliana
  misc_feature (1)..(1473): Ceres Seq. ID no. 13607833
  misc_feature (1)..(1473): Ortholog of  Ceres SEQ ID NO 14306565 as cited in SEQ ID NO 53000
  misc_feature (1)..(1473): Ortholog of  Ceres SEQ ID NO 14315491 as cited in SEQ ID NO 57026
  misc_feature (1)..(1473): Ortholog of  Ceres SEQ ID NO 14312192 as cited in SEQ ID NO 59249
atgggttcttctgcttcaaagaccgcttcttccgtttcttctgcttcttcctcatctgcgttttctccaccgccgaccaaattcagctccgattcatcttcaccggcggtgcagagagctttttcgtttccgacgccgttggttcaccatcctccggcgagaaaaggcgactctcatcaccttgtttcccttacatctacatcgtacggttctcttctcctccttgatctcgatggatccaaaaactcctcttccgaccaacaaacgctgcctcgtatctcaatctccgggaagaacacaccagatccggtctctcctgattcagtcataaacacttgggagcttatggatggcttggacgatgaattcgaattcgaaattcccaaaccgggtaagcgtctaaattcggatttttgctctaaacccgacccgaatcggaatgtgagtttaaatgggtcttcgttgaaattggatgaatcttacgagattgtgagaatcgaagaagacgatggagattgggttcctttgacttataaacctaagcaacctttgtggaagcatttgtctgaagaatcatttctctctgatttagatcccagcattgtctcatcctacaagaaagctttgtcttctaagctattaagcaatcatagtaatactagaaaccctcatagacccacaaagtctctctcttgtagcccatcatcaaatccatccatcttaataagcgaagaaccaaaatctgtatcctctagtcaattgatttcatcaccagccaaaccgagattaccaggaacagaagacaagattgtactctacttcacaaccctcagaggaattcgaaagacatacgaggattgttgttgcgttagagcgatattgagaggagttcaagtgtccgtagacgaacgtgacatctctatggattccaaatacaggaaagagcttcaaagcgtgcttggcgccgcagagaaaccggtttgtttgcctcaggtgtttatcagaggaactcacattggtggcgtggaggagattatgcagctaaatgatggtggtgaattagcagagatgttgaaagatttccctgcttgtgaacgcttggggacatgccggagctgtggtgatgcaaggtttgtgccttgtactaactgtgatggtagcaccaaagtgtttgaagaacaagatgaacggtttaagcggtgtcctaaatgcaatgagaatggattggtgcgttgtcgtgtgtgttgtctctaagtgatcagtttgatcaaaagatgtgtgtgagaaaggggatatagattgattgactaaacatggtatttggttagtaatgtatattcaaataagtaagttggctcaagccttttattatttactcttatgagttgtgttcttttgttccatttacgctcttgaccttttgaactaaatgattcttactatatgaagtacatcaaatggtagatgatgatt

SEQ ID NO: 101423 - protein, 417 aa, Arabidopsis thaliana
  peptide (1)..(417): Ceres Seq. ID no. 13607834
MGSSASKTASSVSSASSSSAFSPPPTKFSSDSSSPAVQRAFSFPTPLVHHPPARKGDSHHLVSLTSTSYGSLLLLDLDGSKNSSSDQQTLPRISISGKNTPDPVSPDSVINTWELMDGLDDEFEFEIPKPGKRLNSDFCSKPDPNRNVSLNGSSLKLDESYEIVRIEEDDGDWVPLTYKPKQPLWKHLSEESFLSDLDPSIVSSYKKALSSKLLSNHSNTRNPHRPTKSLSCSPSSNPSILISEEPKSVSSSQLISSPAKPRLPGTEDKIVLYFTTLRGIRKTYEDCCCVRAILRGVQVSVDERDISMDSKYRKELQSVLGAAEKPVCLPQVFIRGTHIGGVEEIMQLNDGGELAEMLKDFPACERLGTCRSCGDARFVPCTNCDGSTKVFEEQDERFKRCPKCNENGLVRCRVCCL

SEQ ID NO: 101424 - protein, 302 aa, Arabidopsis thaliana
  peptide (1)..(302): Ceres Seq. ID no. 13607835
MDGLDDEFEFEIPKPGKRLNSDFCSKPDPNRNVSLNGSSLKLDESYEIVRIEEDDGDWVPLTYKPKQPLWKHLSEESFLSDLDPSIVSSYKKALSSKLLSNHSNTRNPHRPTKSLSCSPSSNPSILISEEPKSVSSSQLISSPAKPRLPGTEDKIVLYFTTLRGIRKTYEDCCCVRAILRGVQVSVDERDISMDSKYRKELQSVLGAAEKPVCLPQVFIRGTHIGGVEEIMQLNDGGELAEMLKDFPACERLGTCRSCGDARFVPCTNCDGSTKVFEEQDERFKRCPKCNENGLVRCRVCCL

SEQ ID NO: 101425 - DNA, 984 bp, Arabidopsis thaliana
  misc_feature (1)..(984): Ceres Seq. ID no. 13607840
  misc_feature (1)..(984): Ortholog of  Ceres SEQ ID NO 13581804 as cited in SEQ ID NO 51424
  misc_feature (1)..(984): Ortholog of  Ceres SEQ ID NO 15169703 as cited in SEQ ID NO 59628
  misc_feature (1)..(984): Ortholog of  Ceres SEQ ID NO 13663874 as cited in SEQ ID NO 67003
atgggaaggggcaagatcgcgattaagaggatcaataactctacgagccgtcaggttacgttctcgaagcgaaggaatggattgttgaagaaagctaaggagcttgcgattctctgcgatgctgaggttggtgtcatcatcttctccagcaccggtaggctctacgatttctccagctccagcatgaaatcggtcatagagagatacagcgatgccaaaggagaaaccagttcagaaaatgatcccgcttcagaaattcagttctggcaaaaggaggctgcgattctaaagcgtcagctacataacttgcaagaaaaccaccggcaaatgatgggggaggagctctctggactaagtgtagaagctttacagaatttggaaaatcagcttgaattgagccttcgtggcgttcgaatgaaaaaggatcaaatgttaatcgaagaaatacaagtacttaaccgagaggggaatctcgttcaccaagagaatttagacctccacaagaaagtaaacctaatgcaccaacagaacatggaactacatgaaaaggtttcagaggtcgagggtgtgaaaatcgcaaacaagaattctcttctcacaaatggtctagacatgagagatacctcgaacgaacatgtccatcttcagctcagccaaccgcagcatgatcatgagacgcattcaaaagctatccaactcaactatttttccttcattgcataatataattcggtgtgccaacacacttatgttgacctcgtcggaatcatatcacaattcactgtgtcagcttgcctctgcataagcgaaaataaaaacataaacatgatcagtttgcattccatatctatcaaacaccagctttgtaacttttaaaactttttctccgtgcaaagacctttggtttggcgcttaagcatgtagtttgatgatcaaaggaaatgggtgttttagcataaagttgtcacccttccgttgcatttt

SEQ ID NO: 101426 - protein, 240 aa, Arabidopsis thaliana
  peptide (1)..(240): Ceres Seq. ID no. 13607841
MGRGKIAIKRINNSTSRQVTFSKRRNGLLKKAKELAILCDAEVGVIIFSSTGRLYDFSSSSMKSVIERYSDAKGETSSENDPASEIQFWQKEAAILKRQLHNLQENHRQMMGEELSGLSVEALQNLENQLELSLRGVRMKKDQMLIEEIQVLNREGNLVHQENLDLHKKVNLMHQQNMELHEKVSEVEGVKIANKNSLLTNGLDMRDTSNEHVHLQLSQPQHDHETHSKAIQLNYFSFIA

SEQ ID NO: 101427 - protein, 179 aa, Arabidopsis thaliana
  peptide (1)..(179): Ceres Seq. ID no. 13607842
MKSVIERYSDAKGETSSENDPASEIQFWQKEAAILKRQLHNLQENHRQMMGEELSGLSVEALQNLENQLELSLRGVRMKKDQMLIEEIQVLNREGNLVHQENLDLHKKVNLMHQQNMELHEKVSEVEGVKIANKNSLLTNGLDMRDTSNEHVHLQLSQPQHDHETHSKAIQLNYFSFIA

SEQ ID NO: 101428 - protein, 131 aa, Arabidopsis thaliana
  peptide (1)..(131): Ceres Seq. ID no. 13607843
MMGEELSGLSVEALQNLENQLELSLRGVRMKKDQMLIEEIQVLNREGNLVHQENLDLHKKVNLMHQQNMELHEKVSEVEGVKIANKNSLLTNGLDMRDTSNEHVHLQLSQPQHDHETHSKAIQLNYFSFIA

SEQ ID NO: 101429 - DNA, 1209 bp, Arabidopsis thaliana
  misc_feature (1)..(1209): Ceres Seq. ID no. 13607852
  misc_feature (1)..(1209): Ortholog of  Ceres SEQ ID NO 13581804 as cited in SEQ ID NO 51424
  misc_feature (1)..(1209): Ortholog of  Ceres SEQ ID NO 14310890 as cited in SEQ ID NO 54290
  misc_feature (1)..(1209): Ortholog of  Ceres SEQ ID NO 13663874 as cited in SEQ ID NO 67003
gttagatgatctgtccatttttttcttttttcttctgtgtataaatatatttgagcacaaagaaaaactaataaccttctgttttcagcaagtagggtcttataaccttcaaagaaatattccttcaattgaaaacccataaaccaaaatagatattacaaaaggaaagagagatattttcaagaacaacataattagaaaagcagaagcagcagttaagtggtactgagataaatgatatagtttctcttcaagaacagtttctcattacccaccttctcctttttgctgatctatcgtaatcttgagaactcaggatcaatggaggaaggtgggagtagtcacgacgcagagagtagcaagaaactagggagagggaaaatagagataaagaggatagagaacacaacaaatcgtcaagttactttctgcaaacgacgcaatggtcttctcaagaaagcttatgaactctctgtcttgtgtgatgccgaagttgccctcgtcatcttctccactcgtggccgtctctatgagtacgccaacaacagtgtgaggggtacaattgaaaggtacaagaaagcttgttccgatgccgtcaaccctccttccgtcaccgaagctaatactcagtactatcagcaagaagcctctaagcttcggaggcagattcgagatattcagaattcaaataggcatattgttggggaatcacttggttccttgaacttcaaggaactcaaaaacctagaaggacgtcttgaaaaaggaatcagccgtgtccgctccaaaaagaatgagctgttagtggcagagatagagtatatgcagaagagggaaatggagttgcaacacaataacatgtacctgcgagcaaagatagccgaaggcgccagattgaatccggaccagcaggaatcgagtgtgatacaagggacgacagtttacgaatccggtgtatcttctcatgaccagtcgcagcattataatcggaactatattccggtgaaccttcttgaaccgaatcagcaattctccggccaagaccaacctcctcttcaacttgtgtaactcaaaacatgataacttgtttcttctcctcataacgattaagagagagacgagagagttcattttatatttataacgcgactgtgtattcatagtttaggttctaataatgataataacaaaactgttgtttctttgctt

SEQ ID NO: 101430 - protein, 248 aa, Arabidopsis thaliana; identical to SEQ ID NO: 35284
  peptide (1)..(248): Ceres Seq. ID no. 13607853

SEQ ID NO: 101431 - DNA, 1252 bp, Arabidopsis thaliana
  misc_feature (1)..(1252): Ceres Seq. ID no. 13607854
  misc_feature (1)..(1252): Ortholog of  Ceres SEQ ID NO 14308359 as cited in SEQ ID NO 55097
  misc_feature (1)..(1252): Ortholog of  Ceres SEQ ID NO 15169195 as cited in SEQ ID NO 55200
  misc_feature (1)..(1252): Ortholog of  Ceres SEQ ID NO 13581611 as cited in SEQ ID NO 59028
  misc_feature (1)..(1252): Ortholog of  Ceres SEQ ID NO 14301693 as cited in SEQ ID NO 69246
aacaagaacacagtaacgcaatcacagactccacagtccaaggagttttgcatactcaccaagccacaatcatttctctcttctctatctctctggttttgaatcggcgacgactgagtcaactcggtgttgttactggtttcgtcgtatgtgttgtaactgattaagttgatggatccgagtgggatgatgaacgaaggaggaccgtttaatctagcggagatctggcagtttccgttgaacggagtttcaaccgccggagattcttctagaagaagcttcgttggaccgaatcagttcggtgatgctgatctaaccacagctgctaacggtgatccagcgcgtatgagtcacgcgttgtctcaggcggttattgaaggtatctccggcgcttggaaacggagggaagatgagtctaagtcggcgaagatcgtctccaccattggcgctagtgaaggtgagaacaaaagacagaagatagatgaagtgtgtgatgggaaagcagaagcagaatcgctaggaacagagacggaacaaaagaagcaacagatggaaccaacgaaagattatattcatgttcgagctagaagaggtcaagctactgatagtcacagtttagctgaaagagcgagaagagagaaaataagtgagcggatgaaaatcttgcaagatcttgttccgggatgtaacaaggttattggaaaagcacttgttctagatgagataattaactatatacaatcattgcaacgtcaagttgagttcttatcgatgaagcttgaagcagtcaactcaagaatgaaccctggtatcgaggtttttccacccaaagagtttggtcagcaagcgtttgagaatccggagatacagttcgggtcgcagtctacgagggaatacagtagaggagcatcaccagagtggttgcacatgcagataggatcaggtggtttcgaaagaacgtcttgataaagaaacaacacttggtcatcatcttactacaaataagatctaaaagctctaatatcccgagaagaaaaagcatacatacatataaatctcattctcattataggtttaaatatatggatgtgaatatacacatcatattgttgttctgaagaaagcaaaatagaaaagaagatatagttagtttcgacatcaagaaaaaacaagctgggaagggtttaaagtagaagaaacctcttgtaaaagaaaaaacgtttgttgttataaaattgtatctcattcttac

SEQ ID NO: 101432 - protein, 264 aa, Arabidopsis thaliana; identical to SEQ ID NO: 35683
  peptide (1)..(264): Ceres Seq. ID no. 13607855

SEQ ID NO: 101433 - protein, 259 aa, Arabidopsis thaliana; identical to SEQ ID NO: 35684
  peptide (1)..(259): Ceres Seq. ID no. 13607856

SEQ ID NO: 101434 - protein, 258 aa, Arabidopsis thaliana; identical to SEQ ID NO: 35685
  peptide (1)..(258): Ceres Seq. ID no. 13607857

SEQ ID NO: 101435 - DNA, 1998 bp, Arabidopsis thaliana
  misc_feature (1)..(1998): Ceres Seq. ID no. 13607858
  misc_feature (1)..(1998): Ortholog of  Ceres SEQ ID NO 14307257 as cited in SEQ ID NO 54628
agtatttatattatcatgcatttctaatctctactttgtcaattcctatactttcactctcttccaattatataatctctggtccatagaaaacatcggtctcttgtcaccgttgattttatttggtcaaaatcattcttcttctcgctgaataatcgttgatttcacttcttcttctggtcttaaaaaaattcaagatctatacgagaaaacacaaaacaagtaaaactttttcaaccgtttttcctgtcggtaaagtttggattcttcttagtaaattttggtcttattgtcgaccaaaagaagaagatggtcgttcagaatgttcaagatttggatgttcttccgaaacatagctcggattcattcgatgatgatggtcgtcccaagcgaaccgggacggtgtggacagcaagtgcacacataataacagcagtaattgggtcaggagtgttgtcattggcatgggccgttgctcagattggttggattggtggtccagtggctatgttactcttttctttcgttactttttacacatctacccttctctgttcttgttaccgatctggtgactctgttaccggcaaaagaaactacacttacatggacgctattcactccaacctcggtgggattaaggtgaaagtatgtggagttgtgcaatatgttaatctatttggtacagcaattggatatacaattgcatcagctataagtttggtagcaatccaaaggacaagttgccaacagatgaatggaccaaatgatccttgtcatgttaatggaaatgtttacatgattgcgtttggtattgtacaaatcatattctctcagattcctgattttgatcagttatggtggctttccattgtcgctgcggtcatgtcttttgcttattctgccattggacttggccttggtgtctctaaagtggtagagaacaaagaaattaaaggtagtctcactggagtcactgttgggacagtgacactgagtgggacagtgacatcgtcgcagaaaatatggagaacatttcagtctcttggcaacattgcgtttgcgtactcttactcgatgattctcatcgaaattcaggacacggtgaaatcaccgcctgccgaagtaaacacgatgagaaaagcgacttttgtaagtgtggcagtgactacagtcttctacatgctatgtggctgtgtagggtatgcagcatttggggataacgcacccggaaatctcctcgctcatggagggtttagaaacccatattggttgcttgacattgctaatctcgctatagtgatccatctagtcggtgcttaccaagtctattgccaacccctctttgccttcgtcgagaaggaagcctctaggaggtttccagagagcgaattcgtcacaaaagagatcaagatccaactcttcccggggaagccctttaacttgaatctcttcaggctcgtatggaggacgttcttcgtgatgacaacaacgttgatctcaatgttaatgcctttctttaacgatgtagtcggtctcttgggggccattggtttttggcctttaacggtttatttcccagtggaaatgtacattgcacagaagaatgttccgagatggggcacaaagtgggtttgtctacaagtcttgagtgtgacatgtctttttgtgtccgtagccgcggccgcgggatctgttattggcattgttagtgatctcaaggtctacaaacctttccagtctgaattctgagatcatacgggaaaaataaactcctgctaaaagggttaagattagaattgaatgttttaatgtcatatttgtattagttaactttgtgtaagtgttcaattataaatcatgtttctaccgagaattcttacaacattgaactatcaatgattaaaagtagtcatgtataaggatagctttttcgacacttgaggtagtagagatgtattaaacatttaatacttataattaattttagaagtctat

SEQ ID NO: 101436 - protein, 480 aa, Arabidopsis thaliana
  peptide (1)..(480): Ceres Seq. ID no. 13607859
MVVQNVQDLDVLPKHSSDSFDDDGRPKRTGTVWTASAHIITAVIGSGVLSLAWAVAQIGWIGGPVAMLLFSFVTFYTSTLLCSCYRSGDSVTGKRNYTYMDAIHSNLGGIKVKVCGVVQYVNLFGTAIGYTIASAISLVAIQRTSCQQMNGPNDPCHVNGNVYMIAFGIVQIIFSQIPDFDQLWWLSIVAAVMSFAYSAIGLGLGVSKVVENKEIKGSLTGVTVGTVTLSGTVTSSQKIWRTFQSLGNIAFAYSYSMILIEIQDTVKSPPAEVNTMRKATFVSVAVTTVFYMLCGCVGYAAFGDNAPGNLLAHGGFRNPYWLLDIANLAIVIHLVGAYQVYCQPLFAFVEKEASRRFPESEFVTKEIKIQLFPGKPFNLNLFRLVWRTFFVMTTTLISMLMPFFNDVVGLLGAIGFWPLTVYFPVEMYIAQKNVPRWGTKWVCLQVLSVTCLFVSVAAAAGSVIGIVSDLKVYKPFQSEF

SEQ ID NO: 101437 - protein, 414 aa, Arabidopsis thaliana
  peptide (1)..(414): Ceres Seq. ID no. 13607860
MLLFSFVTFYTSTLLCSCYRSGDSVTGKRNYTYMDAIHSNLGGIKVKVCGVVQYVNLFGTAIGYTIASAISLVAIQRTSCQQMNGPNDPCHVNGNVYMIAFGIVQIIFSQIPDFDQLWWLSIVAAVMSFAYSAIGLGLGVSKVVENKEIKGSLTGVTVGTVTLSGTVTSSQKIWRTFQSLGNIAFAYSYSMILIEIQDTVKSPPAEVNTMRKATFVSVAVTTVFYMLCGCVGYAAFGDNAPGNLLAHGGFRNPYWLLDIANLAIVIHLVGAYQVYCQPLFAFVEKEASRRFPESEFVTKEIKIQLFPGKPFNLNLFRLVWRTFFVMTTTLISMLMPFFNDVVGLLGAIGFWPLTVYFPVEMYIAQKNVPRWGTKWVCLQVLSVTCLFVSVAAAAGSVIGIVSDLKVYKPFQSEF

SEQ ID NO: 101438 - protein, 381 aa, Arabidopsis thaliana
  peptide (1)..(381): Ceres Seq. ID no. 13607861
MDAIHSNLGGIKVKVCGVVQYVNLFGTAIGYTIASAISLVAIQRTSCQQMNGPNDPCHVNGNVYMIAFGIVQIIFSQIPDFDQLWWLSIVAAVMSFAYSAIGLGLGVSKVVENKEIKGSLTGVTVGTVTLSGTVTSSQKIWRTFQSLGNIAFAYSYSMILIEIQDTVKSPPAEVNTMRKATFVSVAVTTVFYMLCGCVGYAAFGDNAPGNLLAHGGFRNPYWLLDIANLAIVIHLVGAYQVYCQPLFAFVEKEASRRFPESEFVTKEIKIQLFPGKPFNLNLFRLVWRTFFVMTTTLISMLMPFFNDVVGLLGAIGFWPLTVYFPVEMYIAQKNVPRWGTKWVCLQVLSVTCLFVSVAAAAGSVIGIVSDLKVYKPFQSEF

SEQ ID NO: 101439 - DNA, 1682 bp, Arabidopsis thaliana
  misc_feature (1)..(1682): Ceres Seq. ID no. 13607862
  misc_feature (1)..(1682): Ortholog of  Ceres SEQ ID NO 14302935 as cited in SEQ ID NO 20442
atcaatttcgaggaataaaagtaagaaacattgcgacaaaaaaaaaaaaaagagatattgaggaatggctgcgaagaaggtttttggatcggcggaagcgagtaatttggtgacggagcttcgtcggagttttgatgatggtgtgacacgtggttatgaatggagagtgactcagcttaagaaactgatgattatttgtgataatcatgagcctgagatcgtcgcggctcttcgcgatgatcttggtaagcctgagcttgaatcttctgtttatgaggtatctctactgagaaactctatcaagttggctcttaagcagctaaagaactggatggctccggagaaggcaaagacttctctaacaacgtttcctgcatccgcggagattgtgtctgagcctcttggtgttgtgctagtgatctcggcttggaactatccttttctgttgtctattgatcctgttattggtgcaatttctgctgggaatgctgttgttttaaagccatcagaattggctccagcttcgtcagctctgctcactaagttactggaacagtatcttgatccttctgcggtgcgagttgtcgaaggagctgttaccgaaacaagtgctctgctagagcagaagtgggacaagatattctacacaggtagttcaaaaatcggacgtgtcataatggcggcagctgcgaagcatctcacaccggttgttctagagcttggaggaaaatctcctgtcgttgtagactcggataccgatttgaaagttaccgtcaggcggataatcgtaggcaaatggggttgtaacaacggacaggcgtgcgtttcgccggactatatcttgacgacaaaagaatatgctcctaaattgattgatgccatgaagcttgaattggagaaattttatgggaagaaccctatagagtcgaaagatatgtcacgtatcgtaaactcgaatcactttgatcgcttgtctaagttgttagacgagaaggaagtttctgacaaaattgtctatggtggtgaaaaggacagagaaaacttgaaaattgctccgacaatcttgctcgatgtaccattagattctctgatcatgagtgaagaaatatttggccctctccttccaatcctcacgcttaacaacttggaagagagctttgacgtgattcgttctcgacctaagccacttgcggcatacttgtttacacataacaagaagttgaaagagagattcgcagcgacagtctccgctggaggcatagtagtcaatgacatagctgttcatcttgcacttcacacattgccattcggaggagttggtgaaagtggaatgggtgcttaccatggtaaattctcatttgatgcttttagtcacaagaaggcggttctctacagaagccttttcggtgattcagccgtcaggtatccgccatactcgagaggaaagcttagattgttaaaagcccttgtcgacagcaatatattcgatttattcaaagtccttctcggtttagcttaaacggtaaaaagaccgaggacacttccctttgtaccttatttacttgttttatttttcaaacatggacttagttggttgatatgttttggtttggtgttgattctatgaatattgaagttgataaataaaagattttcggttgattatggaaaccggtttcttc

SEQ ID NO: 101440 - protein, 484 aa, Arabidopsis thaliana; identical to SEQ ID NO: 77950
  peptide (1)..(484): Ceres Seq. ID no. 13607863

SEQ ID NO: 101441 - protein, 443 aa, Arabidopsis thaliana; identical to SEQ ID NO: 77951
  peptide (1)..(443): Ceres Seq. ID no. 13607864

SEQ ID NO: 101442 - protein, 395 aa, Arabidopsis thaliana; identical to SEQ ID NO: 74729
  peptide (1)..(395): Ceres Seq. ID no. 13607865

SEQ ID NO: 101443 - DNA, 1131 bp, Arabidopsis thaliana
  misc_feature (1)..(1131): Ceres Seq. ID no. 13607866
  misc_feature (1)..(1131): Ortholog of  Ceres SEQ ID NO 13639033 as cited in SEQ ID NO 55960
acaagatacaatgagaatgttagttcttcgcactcccaccggacctgtctccgccgtcagattcatcaccaaatccaaaccttctcctttctcttctcccgattcatggctcctccctgcaccaaacactcaccggagtcgtccccgcgtcgtcctcgctctctctaaccccgacggaagcgtcaactcaaaaccctcaacctcagcttctcaaatcccttcttcaggagatgaaacagttttcgtgggtcaagataatgttcctctcgagggcgtgattcaattcgataaaccgtcatctacttcatcttctaacattaccaaatggggtcgtgtggctttacttgcgggtggtgatgttttagctctgcttatcttctctgccattgggagatttagccatggtttccctgttttttctcttgatactctccacacagctgaccctttcattgcgggatggtttctgagtgcttatttcttggggggttatgcggaggaaggacgaggaatgaagggaaagtctaaagctgtggttgcagctgcgaaatcttggattgtcggaactccgcttggaattatcattaggtcagcttcatcaggtcacattccggcatatagctttgtgttggtgacaatgggaagtactgctgttttacttataggatggagagcattgttattcagtgtgcttcctacagagtccaagaagaaagatgatacgtatcggaagggtagtgcattcgagctatttgagttgcttacttcattgataagacgatggtgaaggagcatccatgaatattcggtcggttggaggttgagatttaagtatgcacaacaaaaatgtaaatgtactttgtcacaagtcacaaccgctaacagatcatataaatatgtgtgttgagaagttccaggaccaagtgtaatatcgatatagttgcagtggccagtggaggaggaaagcaatgatgagagatgatttgtctcaagtcaaacaataaacagaggaagtaaactccagtactcttttttgggtggtttttctccattgacagtaagaatcaaagattttcagtatatatccaattaacagagaaatgaaatgaaaacaaaaatatcattacagtg

SEQ ID NO: 101444 - protein, 261 aa, Arabidopsis thaliana; identical to SEQ ID NO: 30919
  peptide (1)..(261): Ceres Seq. ID no. 13607867

SEQ ID NO: 101445 - protein, 258 aa, Arabidopsis thaliana; identical to SEQ ID NO: 30920
  peptide (1)..(258): Ceres Seq. ID no. 13607868

SEQ ID NO: 101446 - protein, 256 aa, Arabidopsis thaliana; identical to SEQ ID NO: 30921
  peptide (1)..(256): Ceres Seq. ID no. 13607869

SEQ ID NO: 101447 - DNA, 1444 bp, Arabidopsis thaliana
  misc_feature (1)..(1444): Ceres Seq. ID no. 13607874
  misc_feature (1)..(1444): Ortholog of  Ceres SEQ ID NO 15177414 as cited in SEQ ID NO 57242
  misc_feature (1)..(1444): Ortholog of  Ceres SEQ ID NO 13594151 as cited in SEQ ID NO 58886
cactcatccgatctctcaatcctctcaaatctcaaactctctcttcccatcactctctcgctctctcttcaatctcatctcaatcatgacagagcaagagatctgcgtgagggttacaagagcggcggcgaaacgaaaagcttcgacggcgatgggtattgacggagatcgggtcaacaagaagagagttgttctcggtgagcttctaaacgtctccaatgtcaatctcttggctaatctcaatcagaagaaagaaacccagaagccaaaaaggaatcttaaacctcctccggcgaaacagattaagtcagctccggtggctattattgacctagaatcaaaatctgacattgattctcgatctgatgatcctcaaatgtgtggaccttatgttgctgatatctatgagtatcttcgtcaacttgaggtgaagccaaagcagagacctttaccagattacatagagaaagttcagaaagatgtaacaccaagtatgagaggtgttttggttgattggttagtggaagttgctgaagagtataaacttggatctgaaacactttatctcactgtctcacatattgatagattcttgtctttaaagactgttaacaagcaaaagctacagcttgttggagtttctgctatgcttattgcttcgtaatatgaagagataagtcctcctaaagtggatgatttttgttacattacggataatacgttttcgaaacaagatgttgtgaagatggaagctgatatacttcttgctcttcagtttgagttgggaagaccaacgattaatacttttatgagacggtttactagagttgcacaagacgatttcaaagttccacatttgcagctagagcctctttgttgctatttgtcagaattgagtatattagattataagactgtgaagtttgtgccgtctctgttggctgcttctgctgtttttctcgctcggttcatcatccgtccgaaacaacatccttggaaccaaatgttagaagagtacacaaagtacaaagcggctgatctacaagtgtgtgttggaatcatacatgacttgtatttgagcagaagaggaggtgctttacaagctgttagagagaaatataagcaccataagttccaatgcgttgcgaccatgcctgtttcaccagagctgccggttaccttttgggaggatgttaccatttgatctgaggttatgctatcttaagcaaatgttacggagctggattaccgaatcttgtttcaaatagtataatggacacagatcttcaagtgaagctagaagagtaagaaatatagaagtgaaggcaggagcaaataagtctgcgttatgtgaagatgtgtgatgtattattgaaatctcttcttttttatttacaaaattttagtgtgaaattcggaataatataattttatacaattatgc

SEQ ID NO: 101448 - protein, 220 aa, Arabidopsis thaliana
  peptide (1)..(220): Ceres Seq. ID no. 13607875
THPISQSSQISNSLFPSLSRSLFNLISIMTEQEICVRVTRAAAKRKASTAMGIDGDRVNKKRVVLGELLNVSNVNLLANLNQKKETQKPKRNLKPPPAKQIKSAPVAIIDLESKSDIDSRSDDPQMCGPYVADIYEYLRQLEVKPKQRPLPDYIEKVQKDVTPSMRGVLVDWLVEVAEEYKLGSETLYLTVSHIDRFLSLKTVNKQKLQLVGVSAMLIAS

SEQ ID NO: 101449 - protein, 192 aa, Arabidopsis thaliana
  peptide (1)..(192): Ceres Seq. ID no. 13607876
MTEQEICVRVTRAAAKRKASTAMGIDGDRVNKKRVVLGELLNVSNVNLLANLNQKKETQKPKRNLKPPPAKQIKSAPVAIIDLESKSDIDSRSDDPQMCGPYVADIYEYLRQLEVKPKQRPLPDYIEKVQKDVTPSMRGVLVDWLVEVAEEYKLGSETLYLTVSHIDRFLSLKTVNKQKLQLVGVSAMLIAS

SEQ ID NO: 101450 - protein, 170 aa, Arabidopsis thaliana
  peptide (1)..(170): Ceres Seq. ID no. 13607877
MGIDGDRVNKKRVVLGELLNVSNVNLLANLNQKKETQKPKRNLKPPPAKQIKSAPVAIIDLESKSDIDSRSDDPQMCGPYVADIYEYLRQLEVKPKQRPLPDYIEKVQKDVTPSMRGVLVDWLVEVAEEYKLGSETLYLTVSHIDRFLSLKTVNKQKLQLVGVSAMLIAS

SEQ ID NO: 101451 - DNA, 939 bp, Arabidopsis thaliana
  misc_feature (1)..(939): Ceres Seq. ID no. 13607878
  misc_feature (1)..(939): Ortholog of  Ceres SEQ ID NO 13664283 as cited in SEQ ID NO 61283
  misc_feature (1)..(939): Ortholog of  Ceres SEQ ID NO 12635513 as cited in SEQ ID NO 0
  misc_feature (1)..(939): Ortholog of  Ceres SEQ ID NO 15179044 as cited in SEQ ID NO 0
  misc_feature (1)..(939): Ortholog of  Ceres SEQ ID NO 15179333 as cited in SEQ ID NO 0
ccacgcgtccgagagtcagaacagaacaaaaacgtaagcaaaaaaaaataaaacagagcaaaatggccgtagttttacgtggaggcatcaccggaggatttcttcaccatcgtcgtgacgcttcatccgtcatcacaagaagaatctcatccgtcaaagccgcaggaggaggcatcaacccaacggtggctgttgaacgtgccacgtggctacctggactaaaccctcctccttatcttgatggaaatttagctggagattacgggtttgacccactcgggttaggagaggatccggaaagcttgaagtggtatgttcaagcagagcttgttcactctcgtttcgctatgctcggtgttgcaggaatactcttcactgatctccttcggaccacagggattcgtaatttaccggtttggtatgaagctggagctgtgaaatttgattttgctagtacaaaaactctcatagttgtacagtttctacttatggggtttgctgagactaaaaggtatatggattttgtctctccgggatcacaagccaaagaaggatcgtttttctttggacttgaagcagcactcgaggggctcgagcctggatatcccggaggaccgcttttaaacccattaggccttgctaaggatgttcaaaatgctcatgactggaagcttaaggagatcaagaacggtcgtctagcgatgatggcgatgctcgggttctttgttcaagcctctgtgactcacactggccctattgataaccttgttgagcatctctctaatccatggcataagaccatcattcaaaccctcttcacctctacatcttagtttcaggagtcacattactactgcttgcttgtggggtcacattactactgcttgcttgttcaccaaatgtaaacgttgttggttgatgcaaagccgatttagactt

SEQ ID NO: 101452 - protein, 276 aa, Arabidopsis thaliana
  peptide (1)..(276): Ceres Seq. ID no. 13607879
TRPRVRTEQKRKQKKIKQSKMAVVLRGGITGGFLHHRRDASSVITRRISSVKAAGGGINPTVAVERATWLPGLNPPPYLDGNLAGDYGFDPLGLGEDPESLKWYVQAELVHSRFAMLGVAGILFTDLLRTTGIRNLPVWYEAGAVKFDFASTKTLIVVQFLLMGFAETKRYMDFVSPGSQAKEGSFFFGLEAALEGLEPGYPGGPLLNPLGLAKDVQNAHDWKLKEIKNGRLAMMAMLGFFVQASVTHTGPIDNLVEHLSNPWHKTIIQTLFTSTS

SEQ ID NO: 101453 - protein, 256 aa, Arabidopsis thaliana; identical to SEQ ID NO: 37618
  peptide (1)..(256): Ceres Seq. ID no. 13607880

SEQ ID NO: 101454 - protein, 161 aa, Arabidopsis thaliana; identical to SEQ ID NO: 37619
  peptide (1)..(161): Ceres Seq. ID no. 13607881

SEQ ID NO: 101455 - DNA, 1260 bp, Arabidopsis thaliana
  misc_feature (1)..(1260): Ceres Seq. ID no. 13607882
  misc_feature (1)..(1260): Ortholog of  Ceres SEQ ID NO 13597533 as cited in SEQ ID NO 64942
ctcgcactgaacttcaattctctctttccttttttccgttcgatgagagcttaagctctgccgcgttttcgttctccgatctttttccatttttatcagtttcttctcttccaaattagggtttttcttttcagtctttgggaatgattttgatgcggtgaaaaagttttttttttttgagggggaaggatttctgggtttgctcttagggttttgtcttttcaatcgccggagcctgaaataatccggcagatatggcgtctgaattgccgatgagccctcatttggagcagattcacggagaaatccgtgaccatttccgagccctcgcgaatggcttccagaggttggataagatcaaggattctagtagacaaagcaagcaactcgaagaacttgctgagaagatgagagactgtaaaaggttggttaaggagtttgatcgtgaactcaaagatggggaagctcgaaattctcctcaagtaaataagcaattgaatgatgagaaacaatctatgattaaggaactcaactcttatgttgcactaagaaaaacgtacttgaatacactcggcaacaagaaagttgaactttttgatactggagctggagtcagcggtgaacccacagctgaagaaaacgtccaaatggcttcaacaatgtcaaaccaagagcttgtcgatgctggaatgaaaaggatggacgagactgaccaggctattgaacgttctaaacaggttgtgcatcagacactcgaagttggcactcaaactgcatctaacttaaagggacagacggatcaaatgggccgcgttgtaaacgacctagacacaattcagttctctcttaagaaagcttcgcagctggtgaaagagataggaagacaggtagctacagataaatgcataatggcgttcctgtttctgattgtctgtggtgttatagctataatcattgtgaagatcgtgaacccaaacaacaaagacatcagagacatccctggactagctcctccagcgcaatcgagaaagctcttgtacttcagagaatagccttttggcagggccgagagggaaggtttggtgcatattacacttgctgttgcgtgtgtgttcattctttcatgaaagagggcttgtttatgtcatttaaatttgagctttcattagagttttgtatcatatatcatcattctttaacttatgaccacatgttgtataattttataccaagttcaatatattttataagatccgtttt

SEQ ID NO: 101456 - protein, 265 aa, Arabidopsis thaliana; identical to SEQ ID NO: 30750
  peptide (1)..(265): Ceres Seq. ID no. 13607883

SEQ ID NO: 101457 - protein, 259 aa, Arabidopsis thaliana; identical to SEQ ID NO: 30751
  peptide (1)..(259): Ceres Seq. ID no. 13607884

SEQ ID NO: 101458 - protein, 214 aa, Arabidopsis thaliana; identical to SEQ ID NO: 30752
  peptide (1)..(214): Ceres Seq. ID no. 13607885

SEQ ID NO: 101459 - DNA, 1296 bp, Arabidopsis thaliana
  misc_feature (1)..(1296): Ceres Seq. ID no. 13607906
  misc_feature (1)..(1296): Ortholog of  Ceres SEQ ID NO 14305750 as cited in SEQ ID NO 52458
  misc_feature (1)..(1296): Ortholog of  Ceres SEQ ID NO 14314252 as cited in SEQ ID NO 57492
  misc_feature (1)..(1296): Ortholog of  Ceres SEQ ID NO 12608276 as cited in SEQ ID NO 57871
  misc_feature (1)..(1296): Ortholog of  Ceres SEQ ID NO 13598492 as cited in SEQ ID NO 63882
  misc_feature (1)..(1296): Ortholog of  Ceres SEQ ID NO 13657914 as cited in SEQ ID NO 66230
  misc_feature (1)..(1296): Ortholog of  Ceres SEQ ID NO 13595877 as cited in SEQ ID NO 67702
  misc_feature (1)..(1296): Ortholog of  Ceres SEQ ID NO 13622667 as cited in SEQ ID NO 0
ataaaaatccttatccaaaaaagtgcaacctctttcgccgtagaaaatattccgggaaccatgctccgaagaatcacttgttcttcttcacttgcttcaccctctctcttcctccgcttctttcgccaactccctcgctcttactcctcaccgaccaccatcgccgtctcaggccgcaacattcgccgactatcaactccaaccactcttcgttgcatttgttcacactcttcatctgaaatcatctccgagcatcctccgttcgtcagggtttacaaagacggtcgtatcgaacgtctttccggcaccgaaacagtcccggcttctctaaacccacgaaacgacgtcgtttcaaaagacgttgtctactcaccggggcataacctctccgttcgtctctttctccctcacaaatcaacacaactcgccgccggtaacaaactccctctacttatctacttccacggcggagcttggataaacgaatcccctttctccccaatctaccacaatttcctcacggaggtagttaaatccgctaactgcctcgccgtctcggttcaataccgccgtgcaccggaagatccggttccggctgcctatgaagatacatggtctgctattcaatggattttctcacattcctgtggatctggtgaagaagattggattaacaaatacgctgatttcgaaagagtttttctcgccggagatagtgccggtggtaatatatctcatcacatggctatgagagctggtaaagagaagcttaagcctagaatcaaagggactgtgattgtgcatccagcgatttgggggaaagatccggtcgatgagcacgatgtgcaagatagagagatcagagacggagttgcagaagtttgggagaaaattgtgagtccgaatagtgttgatggagcggatgatccgtggtttaatgtggttggatccgggtcgaatttttccgggatgggatgtgacaaggttttggttgaggtggctgggaaagatgtgttttggcggcaaggattagcttacgcggcgaagctaaagaagagtgggtggaaaggagaggtggaggtgattgaggaagaagatgaagagcattgcttccatctcttaaatccaagttctgaaaatgctcccagcttcatgaagagatttgtggagtttatcactggttaacattgttctttgtgtgacacgaataaattttgatgtaacctttgaatttgatttggttctctatataattatggttaaggaattaaatacaggaatgactcggttgtgact

SEQ ID NO: 101460 - protein, 394 aa, Arabidopsis thaliana
  peptide (1)..(394): Ceres Seq. ID no. 13607907
IKILIQKSATSFAVENIPGTMLRRITCSSSLASPSLFLRFFRQLPRSYSSPTTIAVSGRNIRRLSTPTTLRCICSHSSSEIISEHPPFVRVYKDGRIERLSGTETVPASLNPRNDVVSKDVVYSPGHNLSVRLFLPHKSTQLAAGNKLPLLIYFHGGAWINESPFSPIYHNFLTEVVKSANCLAVSVQYRRAPEDPVPAAYEDTWSAIQWIFSHSCGSGEEDWINKYADFERVFLAGDSAGGNISHHMAMRAGKEKLKPRIKGTVIVHPAIWGKDPVDEHDVQDREIRDGVAEVWEKIVSPNSVDGADDPWFNVVGSGSNFSGMGCDKVLVEVAGKDVFWRQGLAYAAKLKKSGWKGEVEVIEEEDEEHCFHLLNPSSENAPSFMKRFVEFITG

SEQ ID NO: 101461 - protein, 374 aa, Arabidopsis thaliana
  peptide (1)..(374): Ceres Seq. ID no. 13607908
MLRRITCSSSLASPSLFLRFFRQLPRSYSSPTTIAVSGRNIRRLSTPTTLRCICSHSSSEIISEHPPFVRVYKDGRIERLSGTETVPASLNPRNDVVSKDVVYSPGHNLSVRLFLPHKSTQLAAGNKLPLLIYFHGGAWINESPFSPIYHNFLTEVVKSANCLAVSVQYRRAPEDPVPAAYEDTWSAIQWIFSHSCGSGEEDWINKYADFERVFLAGDSAGGNISHHMAMRAGKEKLKPRIKGTVIVHPAIWGKDPVDEHDVQDREIRDGVAEVWEKIVSPNSVDGADDPWFNVVGSGSNFSGMGCDKVLVEVAGKDVFWRQGLAYAAKLKKSGWKGEVEVIEEEDEEHCFHLLNPSSENAPSFMKRFVEFITG

SEQ ID NO: 101462 - DNA, 1247 bp, Arabidopsis thaliana
  misc_feature (1)..(1247): Ceres Seq. ID no. 13607917
  misc_feature (1)..(1247): Ortholog of  Ceres SEQ ID NO 15178173 as cited in SEQ ID NO 54139
  misc_feature (1)..(1247): Ortholog of  Ceres SEQ ID NO 14304136 as cited in SEQ ID NO 59024
aactttgtccatcccaattctctcttttttttttgtttccctaatgttttagacaaacacaattttccataattatttatttattcaatttttatctgtttttgggttacatatatcatcatcattggagactgccatatttgttaatcgtgatattaatttaactaatgtctcaaacaagctactaccgatcaccgttcggagacacgacttacaccaaagtgttcgtcggaggattagcgtgggaaactcctaccgacgaaatgcgtcgttacttcgaacagttcggagagattcttgaagccgtcatcatcaccgataaaaacaccggcaagtctaaaggctacggattcgtgacgtttcgggagtcggactcagccacgagagccgtcgctgatccaaatccggtgatcgacggaagaaaagccaattgtaatattgcatcttttggacggcctcgaccatcgccgcctcgaggtcgaggacaaacaggaagtccgagtcagtaccaaagtggaggaccatcaacctataccgggatggctgcaccactgccaccggctgcagctccccagctcatgtatccgtcgtacgggtacacctataaccctgatcaatttgggtaccaccaagcattgtacaacacacagttgcaacaagcacaatactatcagcagcagcaacagctttatggaggaggagcaacatcaccatcatcatcaggagcaaccatcatgccttctccatactattatggctattctcttcaagctcctagagtaccataccaacaccatcatcatcttcctcaaccatataatcctcaacaacatcatcatcaacggttttcttctccttctttcctcgtttacccatccaattcctcttttgcccctcctctccaaggagtactatcttcttccaccgaatctgaagcagtaccacaacaagtaccagctgcagaaggcgaagcaacaacgactgctcctgaaatcacaacaagcaacaccaaagaacctatttcttcttgatctctctctcatttcccaatttgtacaatcttcacatttttacctctctctctctgaaaaaaagaaaacagctaattcatttatttctcaaccagagcaatgacttgagccccaagaagacagactcaacactgtcaaacttaaaaagacggctcaagataaatctcttgtcatattttgctctttttctgacggaatatatataaaaatttgagc

SEQ ID NO: 101463 - protein, 287 aa, Arabidopsis thaliana; identical to SEQ ID NO: 41742
  peptide (1)..(287): Ceres Seq. ID no. 13607918

SEQ ID NO: 101464 - protein, 255 aa, Arabidopsis thaliana; identical to SEQ ID NO: 41743
  peptide (1)..(255): Ceres Seq. ID no. 13607919

SEQ ID NO: 101465 - protein, 163 aa, Arabidopsis thaliana; identical to SEQ ID NO: 41744
  peptide (1)..(163): Ceres Seq. ID no. 13607920

SEQ ID NO: 101466 - DNA, 2363 bp, Arabidopsis thaliana
  misc_feature (1)..(2363): Ceres Seq. ID no. 13607948
  misc_feature (1)..(2363): Ortholog of  Ceres SEQ ID NO 14304565 as cited in SEQ ID NO 53297
  misc_feature (1)..(2363): Ortholog of  Ceres SEQ ID NO 15172170 as cited in SEQ ID NO 58957
  misc_feature (1)..(2363): Ortholog of  Ceres SEQ ID NO 13654989 as cited in SEQ ID NO 63117
  misc_feature (1)..(2363): Ortholog of  Ceres SEQ ID NO 13584744 as cited in SEQ ID NO 69137
agagaaaaaaaaaatgaagagaaggagactttttttctctgttctactctctatcctaactctgttcatcaatggtcctttgataacgacagctcaatctccaccttcttcttcaacttcatgtaaccgtatctgtggaggaatcgagattccttttccttttggaatcggacgaagagactgttttctcaacgactggtacgaggttgtctgtaacagcaccacctccggtaaatccttagctccgttcctctataagatcaacagagaattagttagcatcactcttcgaagcagcatcgacagttcctacggagttgttcacattaaatctccggtgacttcctccggctgttctcaacgacccgtaaagcctcttcctttaaacctcaccggtaaaggaagtccctttttcatcaccgactcgaatcgtctcgtctcagttggttgtgacaacagagcattgattacagacatcgaatctcagatcacaggatgcgaatcgagctgcgacggagataagagtcgtttagacaagatctgcggtggttacacatgttgtcaggcgaagattccggcggatagaccgcaagtaatcggcgttgaccttgaaagctccggtggtaacacaactcaaggaggaaactgtaaagttgctttcttgacgaatgagacttactctccggcgaatgttacagagccggaacaattttatactaatgggtttacggtgattgagcttggttggtactttgatacatcagattctcggttaacgaatcctgtgggttgtgtgaatttgacggaaacagggatttacacgagcgcaccgagctgtgtttgtgagtatggtaacttctctggctttggttacagtaactgttactgcaatcagattggttacagagggaatccttatcttcctggtggatgcattgacattgacgaatgtgaggaaggaaaaggactaagcagctgtggagaactaacttgtgtgaatgttcctggatcgtggaggtgcgagctgaatggagtagggaagatcaagcctctgtttccaggtcttgttctaggttttccactgttgttcttggtacttgggatatggggattgatcaagttcgttaagaagagaaggaagattatccgaaagagaatgttctttaaacgtaatggaggcttgttgttgaaacaacagttaactacaagaggaggtaatgtgcagtcatcgaagatattcagttcgaaagagctggagaaagcgacggataacttcaatatgaacagggttcttgggcaaggaggtcaaggcactgtctacaaaggaatgttggtagatgggcgaattgttgctgtgaaaagatctaaagttttagatgaagataaagttgaggagtttatcaatgaagttggtgttctctcgcagattaaccatagaaatattgtcaaactcatggggtgttgtctcgagacagaggttcctatcttggtttatgaacatattccaaatggagacctattcaagcggcttcaccatgattctgatgattacactatgacttgggatgtgcgattgcgcatctctgttgagattgcaggagcacttgcttacttgcactcggctgcatcaactccggtctatcatagagatgtcaagaccacaaacatacttttggatgagaagtatagagccaaggtatcggatttcgggacctcgagatccataaacgtagatcaaactcacttgactactctagttgcaggtacttttggatacttggatccagagtactttcaaactagccagtttacggataaaagtgatgtttatagttttggggtcgtcttggttgagctcataactggagaaaagccgttttctgtaatgcggcccgaagaaaacagaggacttgtgtctcatttcaatgaggctatgaaacagaacagagttcttgatattgttgattctcggatcaaagaaggttgcacgttggaacaagtgttggctgtggcgaaacttgccagaaggtgtttaagtctaaaagggaagaaacgaccaaatatgagagaggtttcagttgagcttgagaggatccgttcatcacccgaagatttggagttacatattgaagaggaggacgaagaagaatgcgccatggaaatcaacatggatgattcttggagcgtcgacatgactgctccagcttccctctttgatttatcgcccaagttagacgttgaaccgctggttcctcaacgaacatggtgatgatggaacctaaaacactgcaaatgtacaaagtgctgtgataacaaattctctcaatgttccattctttattaataaaaaatttgatgatgtc

SEQ ID NO: 101467 - protein, 755 aa, Arabidopsis thaliana
  peptide (1)..(755): Ceres Seq. ID no. 13607949
EKKKMKRRRLFFSVLLSILTLFINGPLITTAQSPPSSSTSCNRICGGIEIPFPFGIGRRDCFLNDWYEVVCNSTTSGKSLAPFLYKINRELVSITLRSSIDSSYGVVHIKSPVTSSGCSQRPVKPLPLNLTGKGSPFFITDSNRLVSVGCDNRALITDIESQITGCESSCDGDKSRLDKICGGYTCCQAKIPADRPQVIGVDLESSGGNTTQGGNCKVAFLTNETYSPANVTEPEQFYTNGFTVIELGWYFDTSDSRLTNPVGCVNLTETGIYTSAPSCVCEYGNFSGFGYSNCYCNQIGYRGNPYLPGGCIDIDECEEGKGLSSCGELTCVNVPGSWRCELNGVGKIKPLFPGLVLGFPLLFLVLGIWGLIKFVKKRRKIIRKRMFFKRNGGLLLKQQLTTRGGNVQSSKIFSSKELEKATDNFNMNRVLGQGGQGTVYKGMLVDGRIVAVKRSKVLDEDKVEEFINEVGVLSQINHRNIVKLMGCCLETEVPILVYEHIPNGDLFKRLHHDSDDYTMTWDVRLRISVEIAGALAYLHSAASTPVYHRDVKTTNILLDEKYRAKVSDFGTSRSINVDQTHLTTLVAGTFGYLDPEYFQTSQFTDKSDVYSFGVVLVELITGEKPFSVMRPEENRGLVSHFNEAMKQNRVLDIVDSRIKEGCTLEQVLAVAKLARRCLSLKGKKRPNMREVSVELERIRSSPEDLELHIEEEDEEECAMEINMDDSWSVDMTAPASLFDLSPKLDVEPLVPQRTW

SEQ ID NO: 101468 - protein, 751 aa, Arabidopsis thaliana; identical to SEQ ID NO: 38317
  peptide (1)..(751): Ceres Seq. ID no. 13607950

SEQ ID NO: 101469 - DNA, 1015 bp, Arabidopsis thaliana
  misc_feature (1)..(1015): Ceres Seq. ID no. 13607959
  misc_feature (1)..(1015): Ortholog of  Ceres SEQ ID NO 12557432 as cited in SEQ ID NO 92
  misc_feature (1)..(1015): Ortholog of  Ceres SEQ ID NO 15224319 as cited in SEQ ID NO 66044
  misc_feature (1)..(1015): Ortholog of  Ceres SEQ ID NO 13598045 as cited in SEQ ID NO 66822
agagctcataaattttgtggagagcaaagttctcagcaaaatcaaagaagaaccgaacgagagagagaaacgaattcttctcaggtgttaaagaatgtctcggagatatgatagccgtaccacaatcttctcgccagaaggtcgtctttaccaggtagagtatgctatggaggccattggaaacgccggttctgcgattggaatcttatccaaagacggtgttgtgttgatcggtgagaagaaagtcacctcaaagcttcttcaaacctcaacctctgctgagaaaatgtacaagattgatgaccatgttgcctgtgctgttgctggtataatgtctgatgctaacatacttatcaacacggctcgagttcaagctcaacgttacaccttcatgtaccaagagcccatgccggttgagcagctggttcaatctctttgtgacacaaaacaaggatacacacagtttggtggtcttcgcccgtttggtgtctcctttctctttgcaggatgggacaagcaccatggtttccagctttatatgagtgacccgagtgggaactatggtggttggaaagctgcagctgttggagcaaacaatcaggcggctcagtctatcctgaaacaagactacaaggacgatgcaaccagggaagaagcagtcgagcttgccttgaaggttctgaccaagacaatggacagcactagcttaacatctgagaagctagagcttgctgaagtgtatctgactccatccaagactgttaagtaccatgttcactcacctgagtcgctcaccaaactgttggtcaagcacggtgtgactcaacccgctgctgaaacatcttaagcccaaaagtatctctagtcttattcgcctggtacggtgtctccgctttatgtttgtagttctctgttttacagctttccttttggtttgaactttgaagttacctttggcgatgaaactagatttgacaatgttatgaatttatcttcaatgcatcatctttttact

SEQ ID NO: 101470 - protein, 250 aa, Arabidopsis thaliana; identical to SEQ ID NO: 30939
  peptide (1)..(250): Ceres Seq. ID no. 13607960

SEQ ID NO: 101471 - protein, 226 aa, Arabidopsis thaliana; identical to SEQ ID NO: 30940
  peptide (1)..(226): Ceres Seq. ID no. 13607961

SEQ ID NO: 101472 - protein, 186 aa, Arabidopsis thaliana; identical to SEQ ID NO: 30941
  peptide (1)..(186): Ceres Seq. ID no. 13607962

SEQ ID NO: 101473 - DNA, 1816 bp, Arabidopsis thaliana
  misc_feature (1)..(1816): Ceres Seq. ID no. 13607971
  misc_feature (1)..(1816): Ortholog of  Ceres SEQ ID NO 15169220 as cited in SEQ ID NO 55481
atggtcgggagcaacaacaacgccaagtcatcgacgaacaagcctccagcaacttccatccccaccgctgcagcttcatcttcacagaaccataaacctcgtgtgaattcaactaacaacgatggtggaatcagtaacaacaacaacaacaacaagaaagaaagcaagccgatgatgataggtgtccagaaaaccgccgataagaaaccactgaagcctaatccatctcctaagctagctccgatcccgaaacaatctaatccgaatcatcaaaatcaaacgggtccatcatcttcacgaccaatggctccgtttcctttccctgattcatctcccgcgctaggtcctcctcctcaaccgacttatggattccatatgttagagcgtcgcacaattgttctcgctgatggtagtgtccgttcctacttcgctcttcctcctaattacatggattttcctcctcagagtcgattagctggaccggtatttgggagattccctcctttttacccggaagagtttcgagatcagcggatgaaacggaagtatccaggtgaagaagagattgataggagagatgagagagctgagatgatgagacagagacagcagtttatgcagtatgcgaatcctaatgatcactcatttatggctggtacgagtagggatgttggagaggatgttagagctgctaagcatatgagggtaggatcaagtaggcatgacaatggaggtttccaggttgaccaggttgctctaaagaaatcgtttttgggttttgttaagcgagttttcgaggatccgatggagaagaagaactacttggagaacgggagaaaagggcggcttcagtgtctcgtttgtggcaggtcttctaaagatgtccaggatacacatagtttggtaatgcacacatactgttctgatgattctagctcacgcgtgcatcatttaggcctacacaaagctctctgtgtattgatgggatggaatttctcaaaggctcctgataattcaaaggcataccagaatctacctgctgatgaggcagcaatcaaccaagcccagctaattatttggccacctcatgttattgttcagaataccagtacagggaagggaaaagaagggcgcatggaaggctttggaaacaaaacaatggataacagaattagagaactaggactcactggtgggaaatcgaagtcgttgtatggaagagagggtcatttgggaattaccctgttcaagtttgctggagacgattcagggctcagggatgctatgagaatggcagaatattttgagaagataaaccgtgggcgtaagagttgggggagggtacagccactcactccaagcaaagatgatgagaaaaaccctggtcttgtcgaggttgatgggaggacgggagagaaaaagaggatcttttatggttatctcgcgactgtaacggacttggacaaagtcgatgtggagacaaagaagaaaaccacaatcgagagccttagagaactcacaagaacaaagtaaattacagttttcttctcccacgaaaggtacacttaactttcgaggtatttgttgcctattgaatctggattcttagtcgcaacctaaaaaactcgaaaggaggaacgaaagtttttttttttttttttttaatttatagatgaagtcttggtctctttgatccttcgattcagtgttcatattgcatagtctaatatcggttgaacctgatatatacaagttctctttaccaacatccttagaagtatattgtgatagttgcttgatgcttttgatgtcaaac

SEQ ID NO: 101474 - protein, 510 aa, Arabidopsis thaliana
  peptide (1)..(510): Ceres Seq. ID no. 13607972
MVGSNNNAKSSTNKPPATSIPTAAASSSQNHKPRVNSTNNDGGISNNNNNNKKESKPMMIGVQKTADKKPLKPNPSPKLAPIPKQSNPNHQNQTGPSSSRPMAPFPFPDSSPALGPPPQPTYGFHMLERRTIVLADGSVRSYFALPPNYMDFPPQSRLAGPVFGRFPPFYPEEFRDQRMKRKYPGEEEIDRRDERAEMMRQRQQFMQYANPNDHSFMAGTSRDVGEDVRAAKHMRVGSSRHDNGGFQVDQVALKKSFLGFVKRVFEDPMEKKNYLENGRKGRLQCLVCGRSSKDVQDTHSLVMHTYCSDDSSSRVHHLGLHKALCVLMGWNFSKAPDNSKAYQNLPADEAAINQAQLIIWPPHVIVQNTSTGKGKEGRMEGFGNKTMDNRIRELGLTGGKSKSLYGREGHLGITLFKFAGDDSGLRDAMRMAEYFEKINRGRKSWGRVQPLTPSKDDEKNPGLVEVDGRTGEKKRIFYGYLATVTDLDKVDVETKKKTTIESLRELTRTK

SEQ ID NO: 101475 - protein, 453 aa, Arabidopsis thaliana
  peptide (1)..(453): Ceres Seq. ID no. 13607973
MMIGVQKTADKKPLKPNPSPKLAPIPKQSNPNHQNQTGPSSSRPMAPFPFPDSSPALGPPPQPTYGFHMLERRTIVLADGSVRSYFALPPNYMDFPPQSRLAGPVFGRFPPFYPEEFRDQRMKRKYPGEEEIDRRDERAEMMRQRQQFMQYANPNDHSFMAGTSRDVGEDVRAAKHMRVGSSRHDNGGFQVDQVALKKSFLGFVKRVFEDPMEKKNYLENGRKGRLQCLVCGRSSKDVQDTHSLVMHTYCSDDSSSRVHHLGLHKALCVLMGWNFSKAPDNSKAYQNLPADEAAINQAQLIIWPPHVIVQNTSTGKGKEGRMEGFGNKTMDNRIRELGLTGGKSKSLYGREGHLGITLFKFAGDDSGLRDAMRMAEYFEKINRGRKSWGRVQPLTPSKDDEKNPGLVEVDGRTGEKKRIFYGYLATVTDLDKVDVETKKKTTIESLRELTRTK

SEQ ID NO: 101476 - protein, 452 aa, Arabidopsis thaliana
  peptide (1)..(452): Ceres Seq. ID no. 13607974
MIGVQKTADKKPLKPNPSPKLAPIPKQSNPNHQNQTGPSSSRPMAPFPFPDSSPALGPPPQPTYGFHMLERRTIVLADGSVRSYFALPPNYMDFPPQSRLAGPVFGRFPPFYPEEFRDQRMKRKYPGEEEIDRRDERAEMMRQRQQFMQYANPNDHSFMAGTSRDVGEDVRAAKHMRVGSSRHDNGGFQVDQVALKKSFLGFVKRVFEDPMEKKNYLENGRKGRLQCLVCGRSSKDVQDTHSLVMHTYCSDDSSSRVHHLGLHKALCVLMGWNFSKAPDNSKAYQNLPADEAAINQAQLIIWPPHVIVQNTSTGKGKEGRMEGFGNKTMDNRIRELGLTGGKSKSLYGREGHLGITLFKFAGDDSGLRDAMRMAEYFEKINRGRKSWGRVQPLTPSKDDEKNPGLVEVDGRTGEKKRIFYGYLATVTDLDKVDVETKKKTTIESLRELTRTK

SEQ ID NO: 101477 - DNA, 964 bp, Arabidopsis thaliana
  misc_feature (1)..(964): Ceres Seq. ID no. 13607987
  misc_feature (1)..(964): Ortholog of  Ceres SEQ ID NO 15174311 as cited in SEQ ID NO 0
atcgtcttcgagaaaccacaaatctctctttctctcaaactctctcaacaacaacaatggcgtctcttcaacaaactctattctctcttcaatccaaactcccaccatcctccttccaaatcgccagatctctcccactccgaaaaaccttcccaatccgaatcaacaacggtggaaacgccgccggagcaagaatgtcagccaccgcagcatcaagctacgcgatggcattagcagacgtcgcgaaaagaaacgacacaatggaattaacagtcacagacatcgagaagctcgaacaagtcttctcagatccacaagtactaaacttcttcgcgaatccaacaatcaccgtcgagaagaaacgtcaagtcatcgacgacatagtgaaatcgtcgtctcttcaatctcacacatctaacttcctcaacgtcctcgtcgacgcgaatcggatcaatatcgtgacggagatcgttaaggagtttgagttggtttacaataagctaacggatacacaattggcggaggttaggtcggtggtgaaattggaagcgccgcaattagctcagattgcgaaacaggttcagaagttaaccggagctaagaatgttcgggttaagacggttattgatgcgagtcttgtggctggttttacgattcggtatggtgaatccggttcgaagcttattgatatgagtgtgaagaaacagcttgaagatattgcttctcagcttgaacttggtgagattcaattagctacttgagatttgggaaaaattgtataagagaaaaatttgagaatcttttttttttgtgcaagtttaattttttttctcctcatcttctttctctattaatcaatcatataatatacagtactgatgatataataatgattctgagtttattatctttgtaattgttaaatttagtgaattcgaaaacgaattcgaatagtatgtttgcg

SEQ ID NO: 101478 - protein, 252 aa, Arabidopsis thaliana
  peptide (1)..(252): Ceres Seq. ID no. 13607988
RLRETTNLSFSQTLSTTTMASLQQTLFSLQSKLPPSSFQIARSLPLRKTFPIRINNGGNAAGARMSATAASSYAMALADVAKRNDTMELTVTDIEKLEQVFSDPQVLNFFANPTITVEKKRQVIDDIVKSSSLQSHTSNFLNVLVDANRINIVTEIVKEFELVYNKLTDTQLAEVRSVVKLEAPQLAQIAKQVQKLTGAKNVRVKTVIDASLVAGFTIRYGESGSKLIDMSVKKQLEDIASQLELGEIQLAT

SEQ ID NO: 101479 - protein, 234 aa, Arabidopsis thaliana; identical to SEQ ID NO: 24960
  peptide (1)..(234): Ceres Seq. ID no. 13607989

SEQ ID NO: 101480 - protein, 188 aa, Arabidopsis thaliana; identical to SEQ ID NO: 24961
  peptide (1)..(188): Ceres Seq. ID no. 13607990

SEQ ID NO: 101481 - DNA, 1407 bp, Arabidopsis thaliana
  misc_feature (1)..(1407): Ceres Seq. ID no. 13607991
  misc_feature (1)..(1407): Ortholog of  Ceres SEQ ID NO 14313471 as cited in SEQ ID NO 64513
  misc_feature (1)..(1407): Ortholog of  Ceres SEQ ID NO 13591377 as cited in SEQ ID NO 66534
atttcattcgttctttatcaacaacactctctctcttctctatcaacactttctttcatctctcgccggaaaaacccataaccacaacaatggccaccgaaacccaaatccgaatcggagtaatgggttgcgccgatatcgctcgaaaagtctctcgagcaatccacctcgctcccaacgccacaatctccggcgtagcaagccggtctttagaaaaagccaaagcctttgccaccgccaataactacccagaatcaaccaaaatccacggctcttacgaatctcttctcgaagatccagagatcgatgcgctctatgttcctctccccactagtctccacgttgagtgggctattaaagcagctgagaaagggaaacatatccttttggagaagcctgttgctatgaacgtaactgagtttgataagattgttgatgcttgtgaagctaatggtgttcagattatggatggtactatgtgggttcataatcctagaactgctttgcttaaagagtttctttctgattctgaacgttttggtcagcttaaaactgtacagagttgtttctcatttgctggagatgaagattttcttaaaaacgatatccgtgtgaaacctggtcttgacgggcttggtgcgctaggagatgcggggtggtacgcgatcagagcaactcttttagctaataactttgagcttccgaaaactgtgactgctttccccggtgctgtgttgaatgaagcaggagtgatactttcctgtggagcatctttgagttgggaagatggacgaactgcaactatatattgttcattcttggctaacttaacaatggagataactgccattggaacgaaaggcacactccgtgtacacgacttcattatcccgtataaggagactgaggcgtcgtttaccacgagcactaaagcttggttcaatgaccttgtgactgcgtgggttagtcccccgagtgagcatacggttaagacagagcttccacaagaggcatgtatggtgagagagtttgctcgattggttggagaaatcaagaacaatggtgcaaagcctgatgggtactggcctagtattagccgaaagacgcagctagtggttgatgctgttaaagagtctgttgataaaaactatcaacagattagtctctctggtcgttgaaggaaaggactcagactataaatgttgtcgtgtgttctctcctctctcgctctctatgttcaaacttcgatcaaccgtttaagtgtttgttaccacttaccaatatgttctgtcttctgctgtgtccgcctgtatgtatgttaattgttttagactccaattactagccttcaattactaagtaagtcaatactaaaagttacagtttataaaaatcgtatgttttggt

SEQ ID NO: 101482 - protein, 391 aa, Arabidopsis thaliana
  peptide (1)..(391): Ceres Seq. ID no. 13607992
FIRSLSTTLSLFSINTFFHLSPEKPITTTMATETQIRIGVMGCADIARKVSRAIHLAPNATISGVASRSLEKAKAFATANNYPESTKIHGSYESLLEDPEIDALYVPLPTSLHVEWAIKAAEKGKHILLEKPVAMNVTEFDKIVDACEANGVQIMDGTMWVHNPRTALLKEFLSDSERFGQLKTVQSCFSFAGDEDFLKNDIRVKPGLDGLGALGDAGWYAIRATLLANNFELPKTVTAFPGAVLNEAGVILSCGASLSWEDGRTATIYCSFLANLTMEITAIGTKGTLRVHDFIIPYKETEASFTTSTKAWFNDLVTAWVSPPSEHTVKTELPQEACMVREFARLVGEIKNNGAKPDGYWPSISRKTQLVVDAVKESVDKNYQQISLSGR

SEQ ID NO: 101483 - protein, 362 aa, Arabidopsis thaliana; identical to SEQ ID NO: 30928
  peptide (1)..(362): Ceres Seq. ID no. 13607993

SEQ ID NO: 101484 - protein, 351 aa, Arabidopsis thaliana; identical to SEQ ID NO: 30929
  peptide (1)..(351): Ceres Seq. ID no. 13607994

SEQ ID NO: 101485 - DNA, 647 bp, Arabidopsis thaliana
  misc_feature (1)..(647): Ceres Seq. ID no. 13608003
  misc_feature (1)..(647): Ortholog of  Ceres SEQ ID NO 13599881 as cited in SEQ ID NO 1319
  misc_feature (1)..(647): Ortholog of  Ceres SEQ ID NO 13600163 as cited in SEQ ID NO 0
acttctcataaaaaaggtcatttcaaaaaaaaatcagaaaccgtcaaaaagccaccgttgatatttcttccttgttgcttcttcaatggcgtcgttcgacgaagcacctcccggaaaccccaaagccggtgaaaagatcttcagaaccaagtgcgctcagtgtcacaccgtcgagaaaggtgccggtcacaaacaaggaccgaatttgaatggattgtttggaagacaatctggaacaactccaggatattcttactctgctgctaacaaaagcatggctgtgaattgggaggagaagactctttacgattacttgttgaatcctaagaagtacatccctggaacaaaaatggtgtttcctggactgaaaaaaccgcaagatcgtgccgatctcatcgcttatttgaaggaaggtactgcttagacaggctcgtccagatatatgaagctggcatttttttttctcacagctaaataaaatcagaccaaaaatattatggtcatgaactgctttttgtatggtcttttattctttctttctttttacgttgttgaagaggctagttgcctcttataaagtggaatattcgttattgatgtgaagagctaagaaccaatttccaccacgatagtcatgagattttcct

SEQ ID NO: 101486 - protein, 112 aa, Arabidopsis thaliana; identical to SEQ ID NO: 21690
  peptide (1)..(112): Ceres Seq. ID no. 13608004

SEQ ID NO: 101487 - DNA, 1030 bp, Arabidopsis thaliana
  misc_feature (1)..(1030): Ceres Seq. ID no. 13608012
  misc_feature (1)..(1030): Ortholog of  Ceres SEQ ID NO 12557497 as cited in SEQ ID NO 43
gacccacgcgtccgccagagtaaagcttgaaactttggactaaaagaatggcgtctttgggtgtgtcggaaatgcttggtactccccttaacttcagggcagtttcaagatcgtctgctccgttggcatcaagcccatccacgttcaagactgttgctctcttctctaagaaaaagccagctcctgctaagtccaaggctgtctctgagactagcgatgagctcgccaagtggtatggtcctgacaggagaattttcttgcctgatggtcttttggatagatcagagatcccagagtacttaaacggtgaagttgctggagattatggttatgacccatttggtcttggaaagaagcctgagaactttgctaaataccaagcttttgaattgatccatgcgagatgggctatgttaggagcagctggtttcatcattcctgaagctttaaacaaatatggcgctaactgtggcccagaagctgtctggtttaagactggtgctttgcttcttgatggaaacacattgaactactttggcaagaacatccctatcaaccttgttctcgccgtagttgctgaggttgttctcctcggtggagccgagtactacagaatcaccaacggattggatttcgaggacaagctacacccaggaggtccatttgatcctctaggccttgctaaggaccctgagcaaggagctcttctcaaagtcaaagagatcaagaacgggagattagccatgtttgcgatgctcggtttctttatccaagcgtatgttaccggagaaggtcctgttgagaaccttgcaaagcatctcagtgatccttttggaaacaacttgcttaccgtcatcgctggaactgccgagagagctcccactctctaagccatttctactttttttaagagcttccaaaatgtacactttgttcgattggaactccttttgacaatgttaaaaaaacttccatctgaatcttcttgatatatttcaaattttcaatggtgctttatcatgcttctaag

SEQ ID NO: 101488 - protein, 280 aa, Arabidopsis thaliana; identical to SEQ ID NO: 25086
  peptide (1)..(280): Ceres Seq. ID no. 13608013

SEQ ID NO: 101489 - protein, 272 aa, Arabidopsis thaliana; identical to SEQ ID NO: 25087
  peptide (1)..(272): Ceres Seq. ID no. 13608014

SEQ ID NO: 101490 - protein, 159 aa, Arabidopsis thaliana; identical to SEQ ID NO: 25088
  peptide (1)..(159): Ceres Seq. ID no. 13608015

SEQ ID NO: 101491 - DNA, 1219 bp, Arabidopsis thaliana
  misc_feature (1)..(1219): Ceres Seq. ID no. 13608020
  misc_feature (1)..(1219): Ortholog of  Ceres SEQ ID NO 15168476 as cited in SEQ ID NO 60262
attctaatcatccccttgaattttccaagttttctccttttgtcttctctaactattttcccttaaaataaaaatccaatttttctttgtttcagtcctctcttctgctcattgatcttttaattaactttgattctctccgtttatggattaaccatttgatcgagataactctccaagaaatcgactgagttcgtaacttgttgttgtctgatcttttaaagattcaaccttttttggtccgatcatggctgttgctgagaatgctggtgtcaaagtggactcttctggtcagaatttagacaacaacaacactgctgcttcagctaccgagacgacaaagccgccatgtcctgatgatgatcaaagccctaaatctgactcatccactcctcttaccatcgattcgactcctgaaactgacgatcggatcaatgagactgctcaaaaggttcagactttaaatgggtttagtggaaatggtgagagagataacaatggagagatcaaagatttggctgatgcgttttctaagcttaatccgatggctcaggagtttgttcctccttctcttgctcgaagtcaatctggggttttgagaaatggattagggtttactaacaattttgcagccccacctaaacttgctgatgggaatgatcattttcctagaaggagaaggagttttggccaagggaagcgaagaatgaacaaaaggacaagcttggctcagaaggatgatgtaatcaggagaactgtatatgtctctgacatcgaccaacaggttacagaggagaacctcgcaggtgtctttattaactgtggacaggttgttgattgtcgtgtatgcggtgatccaaattctgtccttcgtttcgctttcattgaatttaccaatgaagagggagctagagctgctttgagcatgtcgggtactgtgctaggtttttaccctcttaaggttcttccttccaaaacagctattgctcctgttaacccgacttttcttccacgatctgaggatgagcgtgagatgtgcgttaggactgtttactgtaccaacattgacaagcggatcactcaaattgacttgaaaggcttctttgaaatgctttgcggggaggttcatcgtctgaggcttggagactatcaccaccaaacccgtattgcttttgttgagtttgcgatggcggaaagcgcaattgctgcgcttcactgc

SEQ ID NO: 101492 - protein, 324 aa, Arabidopsis thaliana
  peptide (1)..(324): Ceres Seq. ID no. 13608021
MAVAENAGVKVDSSGQNLDNNNTAASATETTKPPCPDDDQSPKSDSSTPLTIDSTPETDDRINETAQKVQTLNGFSGNGERDNNGEIKDLADAFSKLNPMAQEFVPPSLARSQSGVLRNGLGFTNNFAAPPKLADGNDHFPRRRRSFGQGKRRMNKRTSLAQKDDVIRRTVYVSDIDQQVTEENLAGVFINCGQVVDCRVCGDPNSVLRFAFIEFTNEEGARAALSMSGTVLGFYPLKVLPSKTAIAPVNPTFLPRSEDEREMCVRTVYCTNIDKRITQIDLKGFFEMLCGEVHRLRLGDYHHQTRIAFVEFAMAESAIAALHC

SEQ ID NO: 101493 - protein, 225 aa, Arabidopsis thaliana
  peptide (1)..(225): Ceres Seq. ID no. 13608022
MAQEFVPPSLARSQSGVLRNGLGFTNNFAAPPKLADGNDHFPRRRRSFGQGKRRMNKRTSLAQKDDVIRRTVYVSDIDQQVTEENLAGVFINCGQVVDCRVCGDPNSVLRFAFIEFTNEEGARAALSMSGTVLGFYPLKVLPSKTAIAPVNPTFLPRSEDEREMCVRTVYCTNIDKRITQIDLKGFFEMLCGEVHRLRLGDYHHQTRIAFVEFAMAESAIAALHC

SEQ ID NO: 101494 - protein, 171 aa, Arabidopsis thaliana
  peptide (1)..(171): Ceres Seq. ID no. 13608023
MNKRTSLAQKDDVIRRTVYVSDIDQQVTEENLAGVFINCGQVVDCRVCGDPNSVLRFAFIEFTNEEGARAALSMSGTVLGFYPLKVLPSKTAIAPVNPTFLPRSEDEREMCVRTVYCTNIDKRITQIDLKGFFEMLCGEVHRLRLGDYHHQTRIAFVEFAMAESAIAALHC

SEQ ID NO: 101495 - DNA, 1253 bp, Arabidopsis thaliana
  misc_feature (1)..(1253): Ceres Seq. ID no. 13608024
  misc_feature (1)..(1253): Ortholog of  Ceres SEQ ID NO 15177091 as cited in SEQ ID NO 52140
  misc_feature (1)..(1253): Ortholog of  Ceres SEQ ID NO 15172539 as cited in SEQ ID NO 57333
  misc_feature (1)..(1253): Ortholog of  Ceres SEQ ID NO 14315951 as cited in SEQ ID NO 57634
  misc_feature (1)..(1253): Ortholog of  Ceres SEQ ID NO 13597324 as cited in SEQ ID NO 64842
  misc_feature (1)..(1253): Ortholog of  Ceres SEQ ID NO 13658672 as cited in SEQ ID NO 66627
agaaaccctagtttgaattttcacggccgacctctctctctcatctactaagctctcctccgagtattgttggcttcagaccaaatcttctccggcgctgtagcgtttcccccgtttcccctttttaacctttgcaaacaatgagtgggcgattttctcggtcaatctatgttggtaacttgcccggtgacattagggaacatgagattgaagatatcttttacaagtatggccgcattgtcgatattgaattgaaggttccacctcggcctccatgttattgctttgttgagtttgagcattctcgggatgctgaagatgccatcaagggccgtgatggctataatttggatggctgtcgcttgagggttgagcttgcacatggtggtcgaggacagtcttcaagtgatcgtcgtggtggctacggtggtggtggcagcggctatggtggtggaggtggtggtggtggatcagctcggtttggcgtctcacgacactctgaattccgagttattgtacgtgggctcccatcatctgcttcatggcaagatttgaaggatcatatgcggaaagctggtgatgtgtgctttgctgaggtgactcgagacagtgatggaacttatggtgttgtcgactacaccaattatgatgacatgaagtatgcaataaggaaacttgatgacacagagttcagaaacccctgggctagaggttttatccgggttaagaaatatgaaagctcccgatcaagaagcagaagcccaagcagaagcagaagcagaagcagaagtcgaagtcgtagccgaggccgtggtcgcagccatagccgcagtcgcagccttagcaggagcaagagcccaaggaaggatctgagtaaatcaccaaggcgatccctttccagatcgatttcaaaatctagatcgccatcgcccgacaagaagaagagtccccccagggcaatgtcgagatcaaagtccaggtccaggtccagatcgaggtctccgtccaaatctcctcccaaggttcgcgaaggcagtgtgtgattttgttaagcggtgaaaatggccaaaagaaagagtgcgaaaaattctcaagtcaagatccattctctgtgtttttttttttgctgttttcggataattgacattttctgctgttctctgcttctttactcacaaatgatcatctttatactattatgacctgttatgttatggatgtttccgtgaccatcacaatacctctgagttttg

SEQ ID NO: 101496 - protein, 300 aa, Arabidopsis thaliana
  peptide (1)..(300): Ceres Seq. ID no. 13608025
MSGRFSRSIYVGNLPGDIREHEIEDIFYKYGRIVDIELKVPPRPPCYCFVEFEHSRDAEDAIKGRDGYNLDGCRLRVELAHGGRGQSSSDRRGGYGGGGSGYGGGGGGGGSARFGVSRHSEFRVIVRGLPSSASWQDLKDHMRKAGDVCFAEVTRDSDGTYGVVDYTNYDDMKYAIRKLDDTEFRNPWARGFIRVKKYESSRSRSRSPSRSRSRSRSRSRSRGRGRSHSRSRSLSRSKSPRKDLSKSPRRSLSRSISKSRSPSPDKKKSPPRAMSRSKSRSRSRSRSPSKSPPKVREGSV

SEQ ID NO: 101497 - protein, 159 aa, Arabidopsis thaliana
  peptide (1)..(159): Ceres Seq. ID no. 13608026
MRKAGDVCFAEVTRDSDGTYGVVDYTNYDDMKYAIRKLDDTEFRNPWARGFIRVKKYESSRSRSRSPSRSRSRSRSRSRSRGRGRSHSRSRSLSRSKSPRKDLSKSPRRSLSRSISKSRSPSPDKKKSPPRAMSRSKSRSRSRSRSPSKSPPKVREGSV

SEQ ID NO: 101498 - DNA, 1224 bp, Arabidopsis thaliana
  misc_feature (1)..(1224): Ceres Seq. ID no. 13608027
  misc_feature (1)..(1224): Ortholog of  Ceres SEQ ID NO 13598527 as cited in SEQ ID NO 64914
atggtaatatatcatcgcaaagtagtctttacgtacgtaagagcaaagcgtttctatcatttccttaatattgaaatggtgacagacttcaaatccctactaccagttatcgacatcagtcctttactggccaaatgtgatgatttcgacatggctgaggatgcgggggttgtggaagtagtcggaaaactggacagggcatgtcgggacgtcggattcttctacgtgattggtcatggaatatcggatgatcttataaataaggtgaaagagatgacgcatcagttcttcgagcttccttacgaggagaaacttaagatcaagattactccaactgctggatacagaggataccaaagaattggagtaaattttacgagtgggaaacaagatatgcacgaagccattgattgttacagagagttcaagcaagggaaacatggggacatcggaaaggtcttggaagggccaaaccagtggccaggaaatcctcaagagtacaaagatttaatggagaagtatattaagctgtgcacagatctttctagaaatatcttaaggggaatctcattagcccttggtggatcaccttatgagtttgagggaaagatgcttagagaccctttttgggtaatgcgtatcattggttatccaggtgtaaaccaagaaaatgttattggatgtggagctcacactgactatggcttgttgacgcttataaatcaagatgatgataaaactgctcttcaggtgaaaaacgtggacggtgattggataccagctattccgatccctggatcatttatctgcaacatcggtgacatgttaacgatactatcaaacggagtttaccaatccacactacataaagtaatcaataactctcctaaataccgtgtatgtgttgcatttttctacgagactaacttcgaggcggaggtagagccacttgatatctttaaagagaagcatccacgaaaagaaacatctcaagttgccaaaagagtcgtctatggacagcatctgattaacaaagtcctgacaacctttgcaaatttagtggaaaacagttaatatggttgatgggctttggatggtaattgttttacctaagcatggatttcgagttttagtaaaataaaagaagttctaggcgacaataaaaataaatgaagaagaaattgtaatttggtttctaatattaataaaactacaggtttgttt

SEQ ID NO: 101499 - protein, 357 aa, Arabidopsis thaliana
  peptide (1)..(357): Ceres Seq. ID no. 13608028
MVIYHRKVVFTYVRAKRFYHFLNIEMVTDFKSLLPVIDISPLLAKCDDFDMAEDAGVVEVVGKLDRACRDVGFFYVIGHGISDDLINKVKEMTHQFFELPYEEKLKIKITPTAGYRGYQRIGVNFTSGKQDMHEAIDCYREFKQGKHGDIGKVLEGPNQWPGNPQEYKDLMEKYIKLCTDLSRNILRGISLALGGSPYEFEGKMLRDPFWVMRIIGYPGVNQENVIGCGAHTDYGLLTLINQDDDKTALQVKNVDGDWIPAIPIPGSFICNIGDMLTILSNGVYQSTLHKVINNSPKYRVCVAFFYETNFEAEVEPLDIFKEKHPRKETSQVAKRVVYGQHLINKVLTTFANLVENS

SEQ ID NO: 101500 - protein, 332 aa, Arabidopsis thaliana; identical to SEQ ID NO: 86804
  peptide (1)..(332): Ceres Seq. ID no. 13608029

SEQ ID NO: 101501 - protein, 307 aa, Arabidopsis thaliana; identical to SEQ ID NO: 86805
  peptide (1)..(307): Ceres Seq. ID no. 13608030

SEQ ID NO: 101502 - DNA, 1385 bp, Arabidopsis thaliana
  misc_feature (1)..(1385): Ceres Seq. ID no. 13608035
  misc_feature (1)..(1385): Ortholog of  Ceres SEQ ID NO 14313147 as cited in SEQ ID NO 54166
  misc_feature (1)..(1385): Ortholog of  Ceres SEQ ID NO 13598882 as cited in SEQ ID NO 0
acttcttttatctctctttctatctcacacagagtgaagaatccagagagtctctaatggcagaatgaacaaaggaattagcaatcatcttcttctcggaagagaaaaatcatggctttagaagaggaggaagagagtcaaaacgcaccgttttgtgttcttgatggtcttttctgtgaggaagagagtgagtttcacgaacaagtagatttgtgcgacgagagtgttgaaaagtttccttttttaaatctgggtttgtctgatcatgatatgttgtgggatgatgatgagttatcaactttgatttcgaaacaagaaccgtgtctttatgacgaaatcttagatgatgagtttctggttttgtgtcgtgaaaaggctcttgattggatttttaaagtgaaatctcattatgggtttaattcattgacggctcttttagctgttaattacttcgataggtttattacaagcaggaagtttcagacagataagccatggatgtctcagcttactgctttggcttgtctgtctttagctgctaaggttgaagagatccgtgttccttttctcttagattttcaagtggaagaagcaagatatgtctttgaagctaagactatacagagaatggagcttcttgttctgtctactcttgactggaggatgcatcctgtgactccaatctcgtttttcgatcacattattcgacgatacagctttaaatctcatcatcaattggagttcttgagtagatgtgaatctttattactctccattattcctgattcgagatttctgagttttagtccttctgtgttagccactgcaataatggtctctgttattagagatttgaagatgtgtgacgaagctgtataccaatctcagctcatgactctactcaaagttgattcggagaaggtaaataaatgctatgagttagtgttagaccacagtccaagcaagaaaaggatgatgaattggatgcaacaacccgctagtccgatcggtgtgtttgatgcgtcattcagttctgatagctcgaatgagtcgtgggttgtgtctgcttctgcttcagtgtcgtcttcaccatcttcagagcctttgctcaagaggagaagagtgcaagagcagcagatgaggctatcttcaataaaccgaatgtttttcgatgtgcttagtagtagtcctcgctaataatgtcaacaacccatcaaaatgtgtcggtttagttacctaaaatctgtttccatgttttacatattatcggctatatggttctcggttcttgtgtttatggacggttgcaaatggtgtacgtttcgttatttgatattctaaaaacaaagttcttttacattaaaagtttccgctggatcttacct

SEQ ID NO: 101503 - protein, 361 aa, Arabidopsis thaliana; identical to SEQ ID NO: 23301
  peptide (1)..(361): Ceres Seq. ID no. 13608036

SEQ ID NO: 101504 - protein, 308 aa, Arabidopsis thaliana; identical to SEQ ID NO: 23302
  peptide (1)..(308): Ceres Seq. ID no. 13608037

SEQ ID NO: 101505 - protein, 232 aa, Arabidopsis thaliana; identical to SEQ ID NO: 23303
  peptide (1)..(232): Ceres Seq. ID no. 13608038

SEQ ID NO: 101506 - DNA, 1158 bp, Arabidopsis thaliana
  misc_feature (1)..(1158): Ceres Seq. ID no. 13608043
  misc_feature (1)..(1158): Ortholog of  Ceres SEQ ID NO 14311659 as cited in SEQ ID NO 51212
  misc_feature (1)..(1158): Ortholog of  Ceres SEQ ID NO 12635180 as cited in SEQ ID NO 0
actactcaacttcgcattatcactcaaacaaacatattgacatctgagtcttgtcatcatggcaacttctctccaagccgccgcaacttttcttcaaccggcgaagattgccgcttctccttctcgtaatgtccatctccgatcaaaccaaaccgtgggcaagtcctttgggttagactcttcacaagctaggctcacgtgctctctccactctgacctcaaagacttcgctggaaaatgctccgacgccgccaagatcgccggttttgctctagccacctctgctctcgttgtctcgggggccggtgcggagggagcaccaaagaggctaacgtacgacgagatacagagcaagacttacatggaggtaaagggtaccggtacggcaaaccagtgtccaactatcgatggtggctctgagacattctcgttcaaagctggtaagtacacaggcaagaagttctgcttcgagcccacttccttcaccgtcaaggcagatagcgtcagcaagaatgcaccgccggatttccaaaacaccaagctcatgacccgtctcacttacacactcgatgagatcgaaggacccttcgaggttggttcagacggaagcgtgaagttcaaggaagaagatggtatcgattacgcagcagtcacagtccagcttccgggaggagaacgcgtgccgttcctcttcacggttaagcagctcgaggcttcagggaaacccgaaagcttcagtggcaagttcttagttccatcgtaccgtggctcgtcctttttggacccaaagggtcgtggtggatccactgggtacgataatgcagtggctttgcctgccggaggcagaggagacgaggaagagctatccaaggaaaacgtcaagaacacggcggcttccgtcggagagatcactttgaagatcacaaagagcaaaccggagacaggtgaagtgatcggagtgttcgagagtcttcagccatcggatactgacttgggtgctaaggtaccaaaagatgtgaagatccaaggggtttggtacggtcagattgagtgattcatataatttgttacttttgtaaaattgtattgaaacaacttctttctatcaatatatatatatatatattaacgctcgataaataaatatttatatcagtg

SEQ ID NO: 101507 - protein, 331 aa, Arabidopsis thaliana; identical to SEQ ID NO: 38250
  peptide (1)..(331): Ceres Seq. ID no. 13608044

SEQ ID NO: 101508 - protein, 230 aa, Arabidopsis thaliana; identical to SEQ ID NO: 38251
  peptide (1)..(230): Ceres Seq. ID no. 13608045

SEQ ID NO: 101509 - protein, 169 aa, Arabidopsis thaliana; identical to SEQ ID NO: 38252
  peptide (1)..(169): Ceres Seq. ID no. 13608046

SEQ ID NO: 101510 - DNA, 1189 bp, Arabidopsis thaliana
  misc_feature (1)..(1189): Ceres Seq. ID no. 13608047
  misc_feature (1)..(1189): Ortholog of  Ceres SEQ ID NO 15173696 as cited in SEQ ID NO 59972
ctttcgtgtatggttccgggaaggaaaaggggaagtggattgttttcatcggcgataagtctcttctcctctgggattgaggttggtggtgtgaggtaaagcttcggtagttagagatgaatgcgtccggcttaactgttactccgcccagatttcactttcgatggcgttctgatcgttttggtacatctcagagaagctctcaagcttttactgttcttagcaaattgaataatcgaaattccgcttggcctgttcttaaaagttctcgtttggcgcttcctacacaaagaagaaatgctatgatcactcgtgccatgagtgcttcctttggtgatatggcagacgattcagctgctatcttccctcggatcaatgtcaaagacccatataaacggcttgggataagccggatggcctcagaggatgagattcaaggagcgaggaactttctcattcagcaatacgcagggcacaaacccagtgttgatgcaatcgaatcagctcatgacaagattatcatgcagaagtttcatgagaggaaaaaccccaagattgacatatcgaaaaaggttcgccaagtgaggcagtccaaagttgtcaactttgttttcgagagattccaaactcctcccaatgcagtccttgtcaaaacagcagtcacgtttgcagttcttggcgttctaaccgttctgttcccgacagaagaaggaccgaccttgcaggttttgttatcactaatagctaccttttacttcatccaccaaaggctccagaagaagctctggactttcctttacggagcgggagctttcatcttctcgtggctggttgggactttcttgatggtatctgtgatcccaccgttcatcaaaggaccaagaggttttgaagtcatgtcttcgctcctaagctatgttttgctttgggtcgcttcgagttacctccggtagcgtgctagcttttttcttttccccgtcttttgggccagaaattcaagtgttatctcggatatatgaaaacacacgaacagagaaaaaatgcatcattttcatgtgacagagagagagagagagagagagatatgatttgtggtcttggagttgttatttcacggagacctcattaactttcaaagctcagtttccaagttgtggctacaaacaaagaatagtaagagttgattacg

SEQ ID NO: 101511 - protein, 278 aa, Arabidopsis thaliana; identical to SEQ ID NO: 37129
  peptide (1)..(278): Ceres Seq. ID no. 13608048

SEQ ID NO: 101512 - protein, 216 aa, Arabidopsis thaliana; identical to SEQ ID NO: 37130
  peptide (1)..(216): Ceres Seq. ID no. 13608049

SEQ ID NO: 101513 - protein, 211 aa, Arabidopsis thaliana; identical to SEQ ID NO: 37131
  peptide (1)..(211): Ceres Seq. ID no. 13608050

SEQ ID NO: 101514 - DNA, 563 bp, Arabidopsis thaliana
  misc_feature (1)..(563): Ceres Seq. ID no. 13608051
  misc_feature (1)..(563): Ortholog of  Ceres SEQ ID NO 14309553 as cited in SEQ ID NO 52735
  misc_feature (1)..(563): Ortholog of  Ceres SEQ ID NO 15172828 as cited in SEQ ID NO 60174
  misc_feature (1)..(563): Ortholog of  Ceres SEQ ID NO 12483999 as cited in SEQ ID NO 0
aaaattgggattggtaggtgacgcgcatgctaagtaattgaaaaaaaaaaaacacaagaggagaagaaacagaacagagaagaaaaagagagaagatggcttcggaagaaggacaagtgatcgcctgccacaccgttgagacatggaacgagcagcttcagaaggctaatgaatccaaaactcttgtggtggttgatttcacggcttcttggtgtggaccatgtcgtttcatcgctccattctttgctgatttggctaagaaacttcctaacgtgcttttcctcaaggttgatactgatgaattgaagtcggtggcaagtgattgggcgatacaggcgatgccaaccttcatgtttttgaaggaagggaagattttggacaaagttgttggagccaagaaagatgagcttcagtctaccattgccaaacacttggcttaagctttccactcttatatatctcttaagatgttggattaattgttctattactcttgacatgttataacttgttcccctttgttatggttccggtctataatctcatctgactatttgaagctg

SEQ ID NO: 101515 - protein, 114 aa, Arabidopsis thaliana; identical to SEQ ID NO: 21573
  peptide (1)..(114): Ceres Seq. ID no. 13608052

SEQ ID NO: 101516 - DNA, 1271 bp, Arabidopsis thaliana
  misc_feature (1)..(1271): Ceres Seq. ID no. 13608053
  misc_feature (1)..(1271): Ortholog of  Ceres SEQ ID NO 14311961 as cited in SEQ ID NO 51512
aaattggcatgttcaccatttttccacaaactcaaatttgctccaatgcctgtacttttctcctctcgttctctcatactctccattattgtccccttacttatatctatcgctctctacaaactcgacacattcgaccccgctattgttccttccgatgcattcacatcctctgctacttcactcccgccgcttataaacgacgaatttctcaccggagctgagtttatcggtgtcggtcttctcaatatacccgaagatatcgcctaccataaggaatctaatctcatctacactggttgtgttgatggatgggtgaaacgagtcaaggtcgccgactcggttaatgactcagtcgttgaggattgggtcaatactggtggtagaccgctcggaatcgcgttcggaatccacggcgaagtcattgtcgcagacgtacacaagggactgttgaatataagcggtgacggaaagaagacggaattgttgacggacgaagcggacggtgtgaagtttaagctgacggatgcagttaccgttgcagataacggcgttttgtatttcacagatgcttcttacaagtacactctcaatcaattgagtttagacatgttagaagggaaaccttttggacgactcttgagctttgatcccaccacacgtgttacaaaagtacttctcaaagacctctacttcgctaatggcatcaccatctctcctgatcaaactcatctcatcttctgtgaaactccaatgaaaaggtgcagcaagtattacatcagtgaggagcgtgtggaggtattcactcaaagcttaccaggttatccagataacattcgttacgatggagatggacattactggattgcattgccttcgggagtcacgacattgtggaatatctcgttgaaataccctttcttgaggaaactcacagcaatggtggctaagtacggcgtggatcttatgtttatggagaatgcaggcgttttacaggtggatttggatggaaatcccatcgcgtactaccatgatccaaaactctctcacatagccacatgtgacaagattgggaaatatctctattgtggaagtctctcgcaatcacatatcctccgacttgatctcctgaaatatcctgcacagaacaagaaactttgaaatattatgttttcacaaataaggaaagtttccattttaggaaggagcattcactgtcacaaaaaatgtaaactcatttcctgagaatgaatgatgattgtatctctttt

SEQ ID NO: 101517 - protein, 386 aa, Arabidopsis thaliana; identical to SEQ ID NO: 24767
  peptide (1)..(386): Ceres Seq. ID no. 13608054

SEQ ID NO: 101518 - protein, 371 aa, Arabidopsis thaliana; identical to SEQ ID NO: 24768
  peptide (1)..(371): Ceres Seq. ID no. 13608055

SEQ ID NO: 101519 - DNA, 987 bp, Arabidopsis thaliana
  misc_feature (1)..(987): Ceres Seq. ID no. 13608068
  misc_feature (1)..(987): Ortholog of  Ceres SEQ ID NO 15172070 as cited in SEQ ID NO 59663
aaagaagacttttgtaagaaaataaacacacaactaaagagatgtcgtcaaccttgagcaacgaagagtcaggactcggtgattcaaatcgttcgacggaagtagatggcggcgacggaggaaacttcacggcttacgagtctcggattccagtcgcagcggtttgactcttccttctctaattttgactcccaaccggagaaagagtcagacttaccatgcggcgattcatctcctcgacccgaaactcaatctccgccgtcgataaatagtttcgatgatacaaacgattcgatcttgccgccaccatcggccatggagaaagaggaaggtttcgctcttagagagtggcgaaggctaaatgctctgagattggaagagaaagaaaaggaagagaaagaaatggttcaacaaattctagaagcagcagagcaatataaggctgagttctatagcaagcgtaacgttactattgaaaacaacaagaaactaaaccgcgagaaagagaagttttttttggagaatcaagaaaagttttacgctgaagctgacaaaaacaattggaaggcgattgcagaactcattcctcgtgaagtgccagttatagagaatagagggaacaagaagaaaacagcaaccataactgtaatccagggaccaaagccagggaagcccactgatctgtctcgtatgcgtcaagtgctcacgaaactcaagcacaatccgccaactcatatgaagccaaaactgccctcaccatctggagctgacccgaatgtgagtgtgagtgaacaggtcacagttacagagaagttgtagttgtgtatgtgacaagttaacttcttcttgattgatgttaaaccgtctttactttgttagcttccctcatgttcagtctcgactattgtttgttttgatttcgtctttggtcttaccattgttggtttcccacacagttttctactttgatgtatatataatatattc

SEQ ID NO: 101520 - protein, 237 aa, Arabidopsis thaliana
  peptide (1)..(237): Ceres Seq. ID no. 13608069
MAATEETSRLTSLGFQSQRFDSSFSNFDSQPEKESDLPCGDSSPRPETQSPPSINSFDDTNDSILPPPSAMEKEEGFALREWRRLNALRLEEKEKEEKEMVQQILEAAEQYKAEFYSKRNVTIENNKKLNREKEKFFLENQEKFYAEADKNNWKAIAELIPREVPVIENRGNKKKTATITVIQGPKPGKPTDLSRMRQVLTKLKHNPPTHMKPKLPSPSGADPNVSVSEQVTVTEKL

SEQ ID NO: 101521 - protein, 167 aa, Arabidopsis thaliana; identical to SEQ ID NO: 38029
  peptide (1)..(167): Ceres Seq. ID no. 13608070

SEQ ID NO: 101522 - protein, 138 aa, Arabidopsis thaliana; identical to SEQ ID NO: 38030
  peptide (1)..(138): Ceres Seq. ID no. 13608071

SEQ ID NO: 101523 - DNA, 1679 bp, Arabidopsis thaliana
  misc_feature (1)..(1679): Ceres Seq. ID no. 13608072
  misc_feature (1)..(1679): Ortholog of  Ceres SEQ ID NO 14314643 as cited in SEQ ID NO 56903
atggcagttcgtgtcgaagctactacaaacacacttgtcgtctcttctctctctcgcagctcttctctattttcagcaatcgcctataatattagttttgacatttatatgaacgttcctgccttttgcttttggtcttctttgcttgctcttatgcaagtaaagctaaaagggtctgattcgtttgttttttcactgaagaatttggaaggaagtgattccgttgtgaaacagaaaagaagtatgggtactcacattgatatcaacaacttaggcggcgatacttctagagggaatgagtcaaagccattggcgaggcagtcttcgttatattccttaacgtttgatgagcttcagagcacattaggtgagccggggaaagattttgggtctatgaatatggatgagttactcaagaacatatggactgctgaggatactcaagcctttatgactactacatcttcggttgcagccccgggacctagtggttttgttccgggaggaaatggtttacagaggcaaggctccttgaccttgcctagaacgcttagtcagaagactgtcgatgaagtctggaaatacctgaattcgaaagaaggtagtaatgggaatactggaacggatgcgcttgagaggcaacagactttaggggaaatgactctggaagatttcttactccgtgctggcgttgttaaagaagataatactcagcagaacgaaaacagtagtagcgggttttatgctaacaacggtgctgctggtttggagtttggatttggtcagccgaatcaaaacagcatatcgttcaacgggaacaatagttctatgatcatgaatcaagcacctggtttaggcctcaaagttggtggaaccatgcagcagcagcagcagccacatcagcagcagttgcagcagccacatcagagactgcctccaactatctttccaaaacaagcgaatgtaacatttgcggcgcctgtaaatatggtcaacaggggtttatttgagactagcgcagatggtccagccaacagtaatatgggaggagcagggggtactgttacagctacttctcctgggacgagcagtgcagaaaacaatacttggtcatcaccagttccttacgtgtttggtcggggaagaagaagcaatacgggcctggagaaggttgttgagagaaggcaaaagagaatgatcaagaatcgggaatccgctgctagatcaagggctcgaaaacaggcttataccttggaactggaagctgagattgaaagtctcaagctagtgaatcaagatttgcagaagaaacaggctgaaataatgaaaacccataatagtgagctaaaggaattttcgaagcagcctccattgctggccaaaagacaatgcttgagaagaacccttaccggtccgtggtaagaaggtgaagtcaaagcaagaagaacctgctaatgtaatacaggaccactcaaaaggaagacactgggagagtaatatgtaatagaagatagtgctactgtacaggagaaattacagagacgcttacaatgtagaaatcttttgagctgaatttaactaagagtgcagtctgtgtagagtatgagagctttcaatatgaattcataattttcataaacatatgtaaaactttcagatttagctatagagaagatgtg

SEQ ID NO: 101524 - protein, 473 aa, Arabidopsis thaliana
  peptide (1)..(473): Ceres Seq. ID no. 13608073
MAVRVEATTNTLVVSSLSRSSSLFSAIAYNISFDIYMNVPAFCFWSSLLALMQVKLKGSDSFVFSLKNLEGSDSVVKQKRSMGTHIDINNLGGDTSRGNESKPLARQSSLYSLTFDELQSTLGEPGKDFGSMNMDELLKNIWTAEDTQAFMTTTSSVAAPGPSGFVPGGNGLQRQGSLTLPRTLSQKTVDEVWKYLNSKEGSNGNTGTDALERQQTLGEMTLEDFLLRAGVVKEDNTQQNENSSSGFYANNGAAGLEFGFGQPNQNSISFNGNNSSMIMNQAPGLGLKVGGTMQQQQQPHQQQLQQPHQRLPPTIFPKQANVTFAAPVNMVNRGLFETSADGPANSNMGGAGGTVTATSPGTSSAENNTWSSPVPYVFGRGRRSNTGLEKVVERRQKRMIKNRESAARSRARKQAYTLELEAEIESLKLVNQDLQKKQAEIMKTHNSELKEFSKQPPLLAKRQCLRRTLTGPW

SEQ ID NO: 101525 - protein, 437 aa, Arabidopsis thaliana
  peptide (1)..(437): Ceres Seq. ID no. 13608074
MNVPAFCFWSSLLALMQVKLKGSDSFVFSLKNLEGSDSVVKQKRSMGTHIDINNLGGDTSRGNESKPLARQSSLYSLTFDELQSTLGEPGKDFGSMNMDELLKNIWTAEDTQAFMTTTSSVAAPGPSGFVPGGNGLQRQGSLTLPRTLSQKTVDEVWKYLNSKEGSNGNTGTDALERQQTLGEMTLEDFLLRAGVVKEDNTQQNENSSSGFYANNGAAGLEFGFGQPNQNSISFNGNNSSMIMNQAPGLGLKVGGTMQQQQQPHQQQLQQPHQRLPPTIFPKQANVTFAAPVNMVNRGLFETSADGPANSNMGGAGGTVTATSPGTSSAENNTWSSPVPYVFGRGRRSNTGLEKVVERRQKRMIKNRESAARSRARKQAYTLELEAEIESLKLVNQDLQKKQAEIMKTHNSELKEFSKQPPLLAKRQCLRRTLTGPW

SEQ ID NO: 101526 - protein, 422 aa, Arabidopsis thaliana
  peptide (1)..(422): Ceres Seq. ID no. 13608075
MQVKLKGSDSFVFSLKNLEGSDSVVKQKRSMGTHIDINNLGGDTSRGNESKPLARQSSLYSLTFDELQSTLGEPGKDFGSMNMDELLKNIWTAEDTQAFMTTTSSVAAPGPSGFVPGGNGLQRQGSLTLPRTLSQKTVDEVWKYLNSKEGSNGNTGTDALERQQTLGEMTLEDFLLRAGVVKEDNTQQNENSSSGFYANNGAAGLEFGFGQPNQNSISFNGNNSSMIMNQAPGLGLKVGGTMQQQQQPHQQQLQQPHQRLPPTIFPKQANVTFAAPVNMVNRGLFETSADGPANSNMGGAGGTVTATSPGTSSAENNTWSSPVPYVFGRGRRSNTGLEKVVERRQKRMIKNRESAARSRARKQAYTLELEAEIESLKLVNQDLQKKQAEIMKTHNSELKEFSKQPPLLAKRQCLRRTLTGPW

SEQ ID NO: 101527 - DNA, 1410 bp, Arabidopsis thaliana
  misc_feature (1)..(1410): Ceres Seq. ID no. 13608076
  misc_feature (1)..(1410): Ortholog of  Ceres SEQ ID NO 15171442 as cited in SEQ ID NO 51520
aaaaatatttatgttgggtcaggcttaaaccagagagagagtgtgtgtggtcgagccatttgaccaaaagcaaaaacttaaaactggtttcagatctgaagtaaaagggttttgcttcggattctccggcgtcgtttaaatgatctctgacccatcttccttggcttaataattctggtccctccttttatctctttttactgttgatttatctgaatatgccacgctctttcttccacatgtttattctctcttcctttcttcaacacaagcgtctggactaaggaaagccaacaacaaaatctggtttcaagacggttggcaggagtttgtcaaccgtttctccattcggattggtttcagatacaaagttacagtctacattttcaatttatcctccacactctgagatcaaccaccattctagtagtgaagctcttatgcaaatggattccgcacagaatcagttcaacaaacgtgctcgattgtttgaagatcctgaactcaaagatgctaaggtcatttatccatcgaaccctgaatctactgaaccagtgaataaaggttatggcggttctacagccatccaaagctttttcaaagaatctaaagctgaagaaacgcccaaggtacttaagaagagaggaaggaagaagaagaatcctaatcccgaggaagtaaactcttcaactcccggtggagatgactcagagaaccgctcaaagttctacgagagtgcttctgctagaaagagaactgtaactgcagaggaaagagagagagccgtcaatgcagccaaaacattcgaaccaacaaatccttactttagagttgttctgcgaccatcatatctatacagaggttgcatcatgtacttgccatctgggtttgctgagaaatacctaagtgggatatctggtttcatcaagctccagctcggtgagaaacaatggccagtgaggtgcctctacaaagcagggagagctaagtttagccaaggatggtatgagttcacactcgagaacaatataggcgaaggagatgtatgtgtgtttgagctactcagaactcgggatttcgttctcgaagtcaccgcctttcgtgtcaatgagtatgtgtgaccaaaaaagatttccctttcatcagcgatcttgcaggtagctttccaaagttaaaattttatgtaggggtctcttaaccattctctctcttgcattggttgtctctgttctagtagtgttttgagtgaaatttcaggttcctatgtttggatgtggataagtatttgacgattataataacctctgagtgggaaactctttgtttgagtggtagctaggttcaaaagtagagttgtatatacttttatcttcatcaggataattatgtttatttgaattgttgattatt

SEQ ID NO: 101528 - protein, 226 aa, Arabidopsis thaliana; identical to SEQ ID NO: 39670
  peptide (1)..(226): Ceres Seq. ID no. 13608077

SEQ ID NO: 101529 - protein, 224 aa, Arabidopsis thaliana; identical to SEQ ID NO: 39671
  peptide (1)..(224): Ceres Seq. ID no. 13608078

SEQ ID NO: 101530 - DNA, 844 bp, Arabidopsis thaliana
  misc_feature (1)..(844): Ceres Seq. ID no. 13608079
  misc_feature (1)..(844): Ortholog of  Ceres SEQ ID NO 13585222 as cited in SEQ ID NO 68696
aaatggcgatcatgcgataatcgtgtagccgaagaagaagaagaagaagaagaaagaagatggtgttttgggagataactctaggaacagcttacttcttgggactgagacggacttataggctcgctctgaagatccagcgtcggcttgttactccgaaacatcccaaaatccgtcaatttcttcatcggaggactcgtaaaatcttcgatgtggcgatttcggttcacaagaacatacaagaaagagacatagaagttggtaggaatctcggaaattggattcttcgttggctcgataagatgaaaccagcagctcagatccgtactcggccagaactaccacacaacagcaattccaacatggacaaggcaaagagactaacggaattgtcccgtcccaaatcgcacacgaacacgacgcagactccacaaaaccgtgaatccgataggcatttgtttacctcgttgaaacacttccggcacaagccattcccgtctgtctctatgatgatccaaccgccgagacccaatggaactacgactcagtacagacattactacagtggcggtctagcagcaagtctgattcaaccgagctatgttacaggtggcgggttcaatggtgtagtcaggaaagacattttgcagtggatggcacaaagatgaaagatgatgcagctaagtcccatctttctctgacataattgagcctctctcttttctttttttaacttttaattgcagaaattaatgtgattgttgatagatcctgaagcaactatgtagtaaacatgacaatgtctttttctttctaacgcttgaataaagtttcatatactttg

SEQ ID NO: 101531 - protein, 202 aa, Arabidopsis thaliana
  peptide (1)..(202): Ceres Seq. ID no. 13608080
MVFWEITLGTAYFLGLRRTYRLALKIQRRLVTPKHPKIRQFLHRRTRKIFDVAISVHKNIQERDIEVGRNLGNWILRWLDKMKPAAQIRTRPELPHNSNSNMDKAKRLTELSRPKSHTNTTQTPQNRESDRHLFTSLKHFRHKPFPSVSMMIQPPRPNGTTTQYRHYYSGGLAASLIQPSYVTGGGFNGVVRKDILQWMAQR

SEQ ID NO: 101532 - protein, 121 aa, Arabidopsis thaliana
  peptide (1)..(121): Ceres Seq. ID no. 13608081
MKPAAQIRTRPELPHNSNSNMDKAKRLTELSRPKSHTNTTQTPQNRESDRHLFTSLKHFRHKPFPSVSMMIQPPRPNGTTTQYRHYYSGGLAASLIQPSYVTGGGFNGVVRKDILQWMAQR

SEQ ID NO: 101533 - protein, 101 aa, Arabidopsis thaliana
  peptide (1)..(101): Ceres Seq. ID no. 13608082
MDKAKRLTELSRPKSHTNTTQTPQNRESDRHLFTSLKHFRHKPFPSVSMMIQPPRPNGTTTQYRHYYSGGLAASLIQPSYVTGGGFNGVVRKDILQWMAQR

SEQ ID NO: 101534 - DNA, 2019 bp, Arabidopsis thaliana
  misc_feature (1)..(2019): Ceres Seq. ID no. 13608087
  misc_feature (1)..(2019): Ortholog of  Ceres SEQ ID NO 13582619 as cited in SEQ ID NO 56520
  misc_feature (1)..(2019): Ortholog of  Ceres SEQ ID NO 12611392 as cited in SEQ ID NO 56826
  misc_feature (1)..(2019): Ortholog of  Ceres SEQ ID NO 13660872 as cited in SEQ ID NO 60830
atccaaaatctatctaccgccgatcaaaaaaccctagaatttcttccactgttatgtaagtttgatcttgttgtctccactaagaggcgaagagagaaagagggttttaggttgtgtgttctgtttcaaagggtttacttctcgttgaccccgatcgagatggttgattcttctcgtgattcgtgtttcaaagctggtaagtttagtgctccaggttttcgatttcaccctactgatgaagagcttgtggtttattatcttaagaggaagatctgttgtaaaaaacttcgagtcaatgccattggtgtcgttgatgtttacaaagtcgatccttctgaattgcctggtctatcgatgttgaagacgggagatagacagtggttctttttcactccaaggaataggaagtatcctaacgcagctaggtcaagtagaggtactgcaactggttattggaaggcgacaggaaaggatcgagtcattgagtacaattcaagatctgttggactcaagaagactcttgttttctatagaggtcgtgctcctaatggtgagagaactgactgggtgatgcatgagtacactatggatgaagaagagctagggagatgtaagaacgctaaggagtattatgctctttataagctttataagaagagtggggctggtcctaagaatggtgaacagtatggtgctccgttccaagaagaagaatgggttgatagtgatagtgaagatgcagatagtgtcgctgtaccggattatcccgtggtccgttatgagaatggtccttgtgtggatgatactaaattttgcaatcctgtcaaacttcagttagaggatattgagaagcttctcaatgaaatcccagatgcacccggggttaaccaaagacagtttgatgagtttgttggtgttccacagggtaatagtgcagaagtgatacagagcacattgctgaataattcttctggagagtatattgaccctcggacgaatggaatgttcttgccaaatggccagctatacaacagggactcgagttttcagtcccatttgaattcatttgaggctacctctggtatggcacctcttctagataatgagaaggaggagtacattgaaatgaatgatcttctgatccctgagctcggtgcttcttcaacagagaaatccacagagttcttgaaccatggtgaatttggtgatgttaatgaatacgaccaattgttcaatgacatatctgtttttcagggaacttctacagatctgtcttgtctgagtaattttactaataacacatcaggccaaagacagcaattactttatgaacagttccagtaccagacacctgagaaccagcttaataactacatgcatcctagtaccactcttaatcagttcactgacaatatgtggtttaaagatgatcaggctgctctctatgttcaaccaccacaatcttcttctggagcattcacttcacagtcaacaggtgtgatgcctgagtctatgaatcccactatgagtgtaaatccccaatacaaggaaggacaaaatggtggtggaacaaggagccagttctcatcagctctgtgggaattattggaatcaataccatcaacaccagcctctgcctgtgagggtcctcttaaccagacctttgtgcgtatgtctagcttcagccgcatcaggttcaatggaacgtcagtgactagtagaaaagtcactgtagcaaagaagcgtatcagtaacagaggttttcttctgttatcaattatgggtgctttgtgtgctatcttctgggtgttcaaagccaccgttggagttatgggaagacctctcttgtcgtgacctagactcttgaatcttgattcagcataagttagcctgatccacatctttgattatgtatagagtttgaaagagtttaattcttaacaaaagatttcttttttcctggattctctgatggctttgaaattttgcttgcacttatcatattaagcagaatttttg

SEQ ID NO: 101535 - protein, 617 aa, Arabidopsis thaliana
  peptide (1)..(617): Ceres Seq. ID no. 13608088
IQNLSTADQKTLEFLPLLCKFDLVVSTKRRREKEGFRLCVLFQRVYFSLTPIEMVDSSRDSCFKAGKFSAPGFRFHPTDEELVVYYLKRKICCKKLRVNAIGVVDVYKVDPSELPGLSMLKTGDRQWFFFTPRNRKYPNAARSSRGTATGYWKATGKDRVIEYNSRSVGLKKTLVFYRGRAPNGERTDWVMHEYTMDEEELGRCKNAKEYYALYKLYKKSGAGPKNGEQYGAPFQEEEWVDSDSEDADSVAVPDYPVVRYENGPCVDDTKFCNPVKLQLEDIEKLLNEIPDAPGVNQRQFDEFVGVPQGNSAEVIQSTLLNNSSGEYIDPRTNGMFLPNGQLYNRDSSFQSHLNSFEATSGMAPLLDNEKEEYIEMNDLLIPELGASSTEKSTEFLNHGEFGDVNEYDQLFNDISVFQGTSTDLSCLSNFTNNTSGQRQQLLYEQFQYQTPENQLNNYMHPSTTLNQFTDNMWFKDDQAALYVQPPQSSSGAFTSQSTGVMPESMNPTMSVNPQYKEGQNGGGTRSQFSSALWELLESIPSTPASACEGPLNQTFVRMSSFSRIRFNGTSVTSRKVTVAKKRISNRGFLLLSIMGALCAIFWVFKATVGVMGRPLLS

SEQ ID NO: 101536 - protein, 564 aa, Arabidopsis thaliana
  peptide (1)..(564): Ceres Seq. ID no. 13608089
MVDSSRDSCFKAGKFSAPGFRFHPTDEELVVYYLKRKICCKKLRVNAIGVVDVYKVDPSELPGLSMLKTGDRQWFFFTPRNRKYPNAARSSRGTATGYWKATGKDRVIEYNSRSVGLKKTLVFYRGRAPNGERTDWVMHEYTMDEEELGRCKNAKEYYALYKLYKKSGAGPKNGEQYGAPFQEEEWVDSDSEDADSVAVPDYPVVRYENGPCVDDTKFCNPVKLQLEDIEKLLNEIPDAPGVNQRQFDEFVGVPQGNSAEVIQSTLLNNSSGEYIDPRTNGMFLPNGQLYNRDSSFQSHLNSFEATSGMAPLLDNEKEEYIEMNDLLIPELGASSTEKSTEFLNHGEFGDVNEYDQLFNDISVFQGTSTDLSCLSNFTNNTSGQRQQLLYEQFQYQTPENQLNNYMHPSTTLNQFTDNMWFKDDQAALYVQPPQSSSGAFTSQSTGVMPESMNPTMSVNPQYKEGQNGGGTRSQFSSALWELLESIPSTPASACEGPLNQTFVRMSSFSRIRFNGTSVTSRKVTVAKKRISNRGFLLLSIMGALCAIFWVFKATVGVMGRPLLS

SEQ ID NO: 101537 - protein, 499 aa, Arabidopsis thaliana
  peptide (1)..(499): Ceres Seq. ID no. 13608090
MLKTGDRQWFFFTPRNRKYPNAARSSRGTATGYWKATGKDRVIEYNSRSVGLKKTLVFYRGRAPNGERTDWVMHEYTMDEEELGRCKNAKEYYALYKLYKKSGAGPKNGEQYGAPFQEEEWVDSDSEDADSVAVPDYPVVRYENGPCVDDTKFCNPVKLQLEDIEKLLNEIPDAPGVNQRQFDEFVGVPQGNSAEVIQSTLLNNSSGEYIDPRTNGMFLPNGQLYNRDSSFQSHLNSFEATSGMAPLLDNEKEEYIEMNDLLIPELGASSTEKSTEFLNHGEFGDVNEYDQLFNDISVFQGTSTDLSCLSNFTNNTSGQRQQLLYEQFQYQTPENQLNNYMHPSTTLNQFTDNMWFKDDQAALYVQPPQSSSGAFTSQSTGVMPESMNPTMSVNPQYKEGQNGGGTRSQFSSALWELLESIPSTPASACEGPLNQTFVRMSSFSRIRFNGTSVTSRKVTVAKKRISNRGFLLLSIMGALCAIFWVFKATVGVMGRPLLS

SEQ ID NO: 101538 - DNA, 1220 bp, Arabidopsis thaliana
  misc_feature (1)..(1220): Ceres Seq. ID no. 13608091
  misc_feature (1)..(1220): Ortholog of  Ceres SEQ ID NO 13596030 as cited in SEQ ID NO 62043
aagattgtcgctttagcttctccggtttttaagcaaataagggtatatgagtttgttggacatgggtggagatatgatggaagatgattgggaatttgcgtcatcatcaaaccctaaaagaaccctagttcttgtgggccgtactggaaacggaaagagtgcgacaggtaacagtatccttgggaggaaagcttttaggtcaagagctagaactgtaggagtgacaagcacgtgcgagtcacagagagttgttcaagaagatggtgatatcattaatgttgttgatactcctggtttgtttgatttgtctactgcagctgattttattggtaaagagattgtgaggtgtataagtttggcagaagatgggattcatgcgatcttgttggtattctctgtgaggcggcttgctgaagaggagcaaactgtgcttagtttcttgcaagcgctattcggcagtaagatcgctgactatatgatcgttgtttttaccggtggcgatgagttggaagagaatgaggagacattggaggagtatttggctgactattgccctgagtttcttaaagaaattcttgggatatgtgacaatcggttggtgttgtttaataacaagactactgataaggtgaagaaagctgagcaagttcagaagcttctctcacttgttgaatctgttgttaaacagaacaatggaaaaccgtattcagatgagttgttccatgagctacaggaagaggctatcaagctaagggaccagaaaaaggaggttgagttacttcagggttactctaataatgagatagatgagttcaagaagcaaatcgatatgtcctatgataggcagcttagccgcatcaccgagatggtggagactaagctgagagacactgctaagagactagagcagcaactaggtgaagagcaagctgcaagacttgaagcggagaagagggcaaacgaagttcagaagcggtcgagcgatgagattaagaagctcagagagaatctggagagggcggaaaaagagacgaaggaacttcagaaaaaactgggaaagtgcatcaatctatgatatgttgagatgttgtagctccagtgaaatctgataagatcattcatgtcaagtttttttatgtagtcttttgttttcttttggttttttaacaatatggttttatcattaatggcagtgtgttataagtttgcttaaatcatac

SEQ ID NO: 101539 - protein, 342 aa, Arabidopsis thaliana; identical to SEQ ID NO: 23839
  peptide (1)..(342): Ceres Seq. ID no. 13608092

SEQ ID NO: 101540 - protein, 337 aa, Arabidopsis thaliana; identical to SEQ ID NO: 23840
  peptide (1)..(337): Ceres Seq. ID no. 13608093

SEQ ID NO: 101541 - protein, 333 aa, Arabidopsis thaliana; identical to SEQ ID NO: 23841
  peptide (1)..(333): Ceres Seq. ID no. 13608094

SEQ ID NO: 101542 - DNA, 1287 bp, Arabidopsis thaliana
  misc_feature (1)..(1287): Ceres Seq. ID no. 13608099
  misc_feature (1)..(1287): Ortholog of  Ceres SEQ ID NO 13597041 as cited in SEQ ID NO 63502
ctcgttgctgatgtgtcgctctgcttgagagagtcagagagtcaagagagaaaaggggtcgagaatggcggtcgcaatatctgggagtagtttgatatcgtcgactcttcagcattataataatcggatttatatccgagattatccgattccgtgtcactcttctaatccaatttgcaattcttttaatttcaaaagacgttcgttctctccttcttcccccaaatttaacgaccatgtcgttaacccttcctcttcttatttatcctccaagctttctccaattcgaacccattcctctttcgctgcgtgtggctgctcctggattcaagacaattcaatggttcatgattatgctacaacaactaatgggacgtccaagcgttgctcggcgttaccaacaacaaacacagtggatgtctcttcggtgtcagatctttttgaattcatatgctcgggtcctctcgtaaacaagattggtatcactcctcaaagagttggccagtctattgacaaatggttactctacggctcacaactttgtagactgtttcagcttaatgagcttaagcttacaattcctcagaaagctaggctataccactactacatacccgtttttatttggtgcgaagatcagattgctttgcataattccaagtttaaagatggagatgatgtacctaggtacaataagtctgcctatagtgggagaggtgacagagccgattcatcaacatggcctgaagttgaaggacctctatcggttattctctttgagggatggatgcttggttttaagcctcttccagctgacgttgttaaagcagttgacccacagctggaggttgtgaataagaaccttgaagcgtattacgacgcatgggacaagtacatcgatgcttgggtcgtcatcaaaatccaggacccaagttatgtataccggtggcgtcttcaggcggaaatcgccatgaggcaggatggccaagctgggatgtcggatgaggaggtgaatgactttgtgtcgcggtatttgccggcgtataaggcctatcttccaactctttacgcggaagggccaagcggctcagacccagaccgtgtccttgcgatagatatcgatgaagaaaggaacccgatactcgcaaactaatgcgatgctgtctccattgcctttatagtatatcatcattgtatgtaaaagagagtaacattacgttcttcttccttctatttgacattctttttcctacactatactttcacataaatacatattcttttctt

SEQ ID NO: 101543 - protein, 362 aa, Arabidopsis thaliana
  peptide (1)..(362): Ceres Seq. ID no. 13608100
MAVAISGSSLISSTLQHYNNRIYIRDYPIPCHSSNPICNSFNFKRRSFSPSSPKFNDHVVNPSSSYLSSKLSPIRTHSSFAACGCSWIQDNSMVHDYATTTNGTSKRCSALPTTNTVDVSSVSDLFEFICSGPLVNKIGITPQRVGQSIDKWLLYGSQLCRLFQLNELKLTIPQKARLYHYYIPVFIWCEDQIALHNSKFKDGDDVPRYNKSAYSGRGDRADSSTWPEVEGPLSVILFEGWMLGFKPLPADVVKAVDPQLEVVNKNLEAYYDAWDKYIDAWVVIKIQDPSYVYRWRLQAEIAMRQDGQAGMSDEEVNDFVSRYLPAYKAYLPTLYAEGPSGSDPDRVLAIDIDEERNPILAN

SEQ ID NO: 101544 - protein, 270 aa, Arabidopsis thaliana
  peptide (1)..(270): Ceres Seq. ID no. 13608101
MVHDYATTTNGTSKRCSALPTTNTVDVSSVSDLFEFICSGPLVNKIGITPQRVGQSIDKWLLYGSQLCRLFQLNELKLTIPQKARLYHYYIPVFIWCEDQIALHNSKFKDGDDVPRYNKSAYSGRGDRADSSTWPEVEGPLSVILFEGWMLGFKPLPADVVKAVDPQLEVVNKNLEAYYDAWDKYIDAWVVIKIQDPSYVYRWRLQAEIAMRQDGQAGMSDEEVNDFVSRYLPAYKAYLPTLYAEGPSGSDPDRVLAIDIDEERNPILAN

SEQ ID NO: 101545 - DNA, 981 bp, Arabidopsis thaliana
  misc_feature (1)..(981): Ceres Seq. ID no. 13608111
  misc_feature (1)..(981): Ortholog of  Ceres SEQ ID NO 13574788 as cited in SEQ ID NO 68
  misc_feature (1)..(981): Ortholog of  Ceres SEQ ID NO 12609388 as cited in SEQ ID NO 52081
  misc_feature (1)..(981): Ortholog of  Ceres SEQ ID NO 14309072 as cited in SEQ ID NO 0
aagctttgaacgttagcaaaattatgttacctaccaccagtccctggcttattatatagagagagatattcacatttacaatttcgatattgtttctctaagatcgtaaaatagtacaccaagccatttataaatttcttcactctcagattcaaaataatataaattagaaatgggaacagagatggtcatggttcacgaggttccttttcctccacagatcatcacttccaagccactctctcttctgggccaagggatcacagacattgagatccactttcttcaagtgaagttcactgcgatcggagtttacttagatccttcagatgttaaaacacatcttgataactggaaaggcaaaaccggaaaagaactcgccggcgatgatgacttcttcgacgcccttgcctccgcggagatggagaaggttataagagtggtggtgataaaggagataaaaggagctcagtacggagtgcagctagagaatacggtgagagatcgtttggctgaggaggataagtacgaggaagaagaagaaactgagctcgagaaggtcgttggctttttccagtccaagtacttcaaagctaactccgttatcacttaccatttctcagccaaagatggcatttgcgagatcgggtttgagacggaaggtaaagaagaggagaaactgaaggtggagaatgcgaatgtggtgggaatgatgcagagatggtatttgtccggaagtcgtggagtctcaccgtcgactattgtctccatcgctgattcaatctccgcagttttaacctaagaaccatggccccttacataaaaatttgtatgtgtgtgtgttttatgtagtatttttttttttcctcttgtcaagttcctgcttttgtatcatcaaacttttactttggagtttgatatggccgaacaatatggtaattccttaatctcaatttaaatcagctttgctcgtttggattc

SEQ ID NO: 101546 - protein, 209 aa, Arabidopsis thaliana; identical to SEQ ID NO: 25348
  peptide (1)..(209): Ceres Seq. ID no. 13608112

SEQ ID NO: 101547 - protein, 205 aa, Arabidopsis thaliana; identical to SEQ ID NO: 25349
  peptide (1)..(205): Ceres Seq. ID no. 13608113

SEQ ID NO: 101548 - protein, 203 aa, Arabidopsis thaliana; identical to SEQ ID NO: 25350
  peptide (1)..(203): Ceres Seq. ID no. 13608114

SEQ ID NO: 101549 - DNA, 1953 bp, Arabidopsis thaliana
  misc_feature (1)..(1953): Ceres Seq. ID no. 13608127
  misc_feature (1)..(1953): Ortholog of  Ceres SEQ ID NO 13639469 as cited in SEQ ID NO 54825
  misc_feature (1)..(1953): Ortholog of  Ceres SEQ ID NO 15179301 as cited in SEQ ID NO 0
aaaagagtaaacaaaaagcaaaagaagtgtagcaatgttagtgacaagagaatgtttgcagtttcgatagtacctcgaaccacatcgtgccgtttgagctctgcctttctctgtcaactctcgattcctctcactcttcggctccaccatcactaccaacaccaccagcctcacctaccatctcctctctcttttcagattcattcgttaagaaagcagatcgacatggcagctcaaggaggtgattcatatgaggaagcgttggctgctttgtcgtctttgatcacgaaacgaagtcgtgctgataagagcaataaaggggatcgctttgagttagtctttgattatctcaagctacttgacctggaagaagacattttaaagatgaatgttattcatgtcgctggtaccaaaggcaagggatccacatgtacctttacagagtctattattcgaaactatggctttcgaactggactcttcacttcacctcacctcattgatgtccgggaaagatttcgtttggatggtgtggacataagtgaagagaaatttttgggatatttctggtggtgctataacaggctcaaggagagaactaacgaggagataccaatgcctacatatttccgcttccttgcattgctagcttttaaaatatttgctgcagaagaggtagatgctgctatattggaggttggattaggtggaaagtttgatgccaccaatgcggttcagaaacctgtggtatgtggtatttcttcactcggatatgaccacatggaaattctaggtgatacacttggaaaaattgctggtgagaaggctggaattttcaagcttggagttccagctttcacagtgccccaacctgatgaagccatgcgtgtccttgaagagaaagcttccgaaacagaagtgaatctcgaagtggtgcagccactaaccgcaaggctgttaagtggtcagaaacttgggcttgatggggaacaccaatatgtcaatgctggtctagcagtttcgcttgcctctatctggcttcagcaaattggtaaactagaagttccgagtcggactcagatgagtattctgcctgagaaattcatcaaagggttagctacagcgagtttgcaaggacgagcacaggtcgtccctgatcaatatactgaatctcggacttcaggagatctagtattttatctggatggagctcacagtccagaaagcatggaagcatgcgccaaatggttttcggttgcggttaagggagacaaccagtcagggagttcaggacatttggttaatggctctgcaggatcctctcatgataaatggtcaaatgaaacctgtgaacagatattgttgttcaattgtatgtcagttcgggacccaaatctactgcttccacatctaaagaatatgtgcgcaaaatacggtgtcaatttcaagaaggcattgtttgtaccaaacatgtcggtgtatcataaggttggtacagcagctgatttgccagagaatgatccacaggttgacttgtcatggcagttcacacttcagaaagtgtgggaaagccttgtgcagagtgaaagagatggagaaaaagatggtgaaagtgatggaaacagtgaggtgtttacttcactacccatggcaataaaatgtctaagggacactgtacatgagagtagctcagccacacgtttccaggtccttgtaactggttcgttacatcttgtgggcgatgtactgagattaatcagaaaatgaagagaaacaaacacacttcacttttcaaatttcaatacacgagtcgtcatccaccaatcaccgtacccactgtggaagaggatggcatttcttattaaaagctattttgtattatttcggttttagtttccagcttaagtactaacaaagttgtggtgatctttttcaaattcaagagcaatagtt

SEQ ID NO: 101550 - protein, 588 aa, Arabidopsis thaliana
  peptide (1)..(588): Ceres Seq. ID no. 13608128
KRVNKKQKKCSNVSDKRMFAVSIVPRTTSCRLSSAFLCQLSIPLTLRLHHHYQHHQPHLPSPLSFQIHSLRKQIDMAAQGGDSYEEALAALSSLITKRSRADKSNKGDRFELVFDYLKLLDLEEDILKMNVIHVAGTKGKGSTCTFTESIIRNYGFRTGLFTSPHLIDVRERFRLDGVDISEEKFLGYFWWCYNRLKERTNEEIPMPTYFRFLALLAFKIFAAEEVDAAILEVGLGGKFDATNAVQKPVVCGISSLGYDHMEILGDTLGKIAGEKAGIFKLGVPAFTVPQPDEAMRVLEEKASETEVNLEVVQPLTARLLSGQKLGLDGEHQYVNAGLAVSLASIWLQQIGKLEVPSRTQMSILPEKFIKGLATASLQGRAQVVPDQYTESRTSGDLVFYLDGAHSPESMEACAKWFSVAVKGDNQSGSSGHLVNGSAGSSHDKWSNETCEQILLFNCMSVRDPNLLLPHLKNMCAKYGVNFKKALFVPNMSVYHKVGTAADLPENDPQVDLSWQFTLQKVWESLVQSERDGEKDGESDGNSEVFTSLPMAIKCLRDTVHESSSATRFQVLVTGSLHLVGDVLRLIRK

SEQ ID NO: 101551 - protein, 571 aa, Arabidopsis thaliana
  peptide (1)..(571): Ceres Seq. ID no. 13608129
MFAVSIVPRTTSCRLSSAFLCQLSIPLTLRLHHHYQHHQPHLPSPLSFQIHSLRKQIDMAAQGGDSYEEALAALSSLITKRSRADKSNKGDRFELVFDYLKLLDLEEDILKMNVIHVAGTKGKGSTCTFTESIIRNYGFRTGLFTSPHLIDVRERFRLDGVDISEEKFLGYFWWCYNRLKERTNEEIPMPTYFRFLALLAFKIFAAEEVDAAILEVGLGGKFDATNAVQKPVVCGISSLGYDHMEILGDTLGKIAGEKAGIFKLGVPAFTVPQPDEAMRVLEEKASETEVNLEVVQPLTARLLSGQKLGLDGEHQYVNAGLAVSLASIWLQQIGKLEVPSRTQMSILPEKFIKGLATASLQGRAQVVPDQYTESRTSGDLVFYLDGAHSPESMEACAKWFSVAVKGDNQSGSSGHLVNGSAGSSHDKWSNETCEQILLFNCMSVRDPNLLLPHLKNMCAKYGVNFKKALFVPNMSVYHKVGTAADLPENDPQVDLSWQFTLQKVWESLVQSERDGEKDGESDGNSEVFTSLPMAIKCLRDTVHESSSATRFQVLVTGSLHLVGDVLRLIRK

SEQ ID NO: 101552 - protein, 513 aa, Arabidopsis thaliana
  peptide (1)..(513): Ceres Seq. ID no. 13608130
MAAQGGDSYEEALAALSSLITKRSRADKSNKGDRFELVFDYLKLLDLEEDILKMNVIHVAGTKGKGSTCTFTESIIRNYGFRTGLFTSPHLIDVRERFRLDGVDISEEKFLGYFWWCYNRLKERTNEEIPMPTYFRFLALLAFKIFAAEEVDAAILEVGLGGKFDATNAVQKPVVCGISSLGYDHMEILGDTLGKIAGEKAGIFKLGVPAFTVPQPDEAMRVLEEKASETEVNLEVVQPLTARLLSGQKLGLDGEHQYVNAGLAVSLASIWLQQIGKLEVPSRTQMSILPEKFIKGLATASLQGRAQVVPDQYTESRTSGDLVFYLDGAHSPESMEACAKWFSVAVKGDNQSGSSGHLVNGSAGSSHDKWSNETCEQILLFNCMSVRDPNLLLPHLKNMCAKYGVNFKKALFVPNMSVYHKVGTAADLPENDPQVDLSWQFTLQKVWESLVQSERDGEKDGESDGNSEVFTSLPMAIKCLRDTVHESSSATRFQVLVTGSLHLVGDVLRLIRK

SEQ ID NO: 101553 - DNA, 1443 bp, Arabidopsis thaliana
  misc_feature (1)..(1443): Ceres Seq. ID no. 13608143
  misc_feature (1)..(1443): Ortholog of  Ceres SEQ ID NO 14311207 as cited in SEQ ID NO 60304
acatgttttgctctgcttctctctttatcttcttcttcatcttttgtcactcttttcttctgctctaaactttttcttttcgctgcaaaaaaaaattcccaggaatatttcttaaaagaaatttcatccctaaataagaaaaaagcatctccttctttagtgtcctccttcaccaaactcttgattccataagcatatattaaaaaagctctctgctttcttcaactttcccgggaaaatcttcttgttacaaagcatcaatctcttgttttaccaattttctctctttattccttttttgccctttacttttcctaactttggtctttatatataaacacacgacacaaagaagaacacacataagttaaaactattacaacagttttaaagagagagatttaaaaaatggagacagagaagaaagtttctctcccaagaatcttacgaatctctgttactgatccttacgcaacagattcgtcaagcgacgaagaagaagaagttgattttgatgcattatctacaaaacgacgtcgtgttaagaagtacgtgaaggaagtggtgcttgattcggtggtttctgataaagagaagccgatgaagaagaagagaaagaagcgcgttgttactgttccagtggttgttacgacggcgacgaggaagtttcgtggagtgaggcaaagaccgtggggaaaatgggcggcggagattagagatccgagtagacgtgttagggtttggttaggtacttttgacacggcggaggaagctgccattgtttacgataacgcagctattcagctacgtggtcctaacgcagagcttaacttccctcctcctccggtgacggagaatgttgaagaagcttcgacggaggtgaaaggagtttcggattttatcattggcggtggagaatgtcttcgttcgccggtttctgttctcgaatctccgttctccggcgagtctactgcggttaaagaggagtttgtcggtgtatcgacggcggagattgtggttaaaaaggagccgtcttttaacggttcagatttctcggcgccgttgttctcggacgacgacgtttttggtttctcgacgtcgatgagtgaaagtttcggcggcgatttatttggagataatctttttgcggatatgagttttggatccgggtttggattcgggtctgggtctggattctccagctggcacgttgaggaccattttcaagatattggggatttattcgggtcggatcctgtcttaactgtttaagaaataactggccgtttaacggcgtttagtgaagttttgttaccggcgacggcgaggattaaaaaaaaacggcgatttattttttgaatgaagatttgttaaatatattaaacttttttgtaacttaattaatggtgattttatttttaaataaaactaatggtaaatggt

SEQ ID NO: 101554 - protein, 287 aa, Arabidopsis thaliana
  peptide (1)..(287): Ceres Seq. ID no. 13608144
METEKKVSLPRILRISVTDPYATDSSSDEEEEVDFDALSTKRRRVKKYVKEVVLDSVVSDKEKPMKKKRKKRVVTVPVVVTTATRKFRGVRQRPWGKWAAEIRDPSRRVRVWLGTFDTAEEAAIVYDNAAIQLRGPNAELNFPPPPVTENVEEASTEVKGVSDFIIGGGECLRSPVSVLESPFSGESTAVKEEFVGVSTAEIVVKKEPSFNGSDFSAPLFSDDDVFGFSTSMSESFGGDLFGDNLFADMSFGSGFGFGSGSGFSSWHVEDHFQDIGDLFGSDPVLTV

SEQ ID NO: 101555 - protein, 223 aa, Arabidopsis thaliana
  peptide (1)..(223): Ceres Seq. ID no. 13608145
MKKKRKKRVVTVPVVVTTATRKFRGVRQRPWGKWAAEIRDPSRRVRVWLGTFDTAEEAAIVYDNAAIQLRGPNAELNFPPPPVTENVEEASTEVKGVSDFIIGGGECLRSPVSVLESPFSGESTAVKEEFVGVSTAEIVVKKEPSFNGSDFSAPLFSDDDVFGFSTSMSESFGGDLFGDNLFADMSFGSGFGFGSGSGFSSWHVEDHFQDIGDLFGSDPVLTV

SEQ ID NO: 101556 - DNA, 1722 bp, Arabidopsis thaliana
  misc_feature (1)..(1722): Ceres Seq. ID no. 13608172
  misc_feature (1)..(1722): Ortholog of  Ceres SEQ ID NO 14302251 as cited in SEQ ID NO 62093
gaaaaaaacattatcttacaaaaatccaaatactccgacttaaccgggtcggatcctggtgagtactagtatctatctcattacaattcatatccttccttcaacattcgatcatcacgaagccaaagaacaatttctccgtcactatcataaccatggcggtgctttcatctgcagatcgagctagtaatgagaagaaggtgaagagttcatactttgatttgccacctatggaaatgtctgtagcatttcctcaagcaactccagcctctacatttccaccttgtacttcagactattatcatttcaatgatctactgactccggaagaacaagctatccggaagaaagtgagggaatgcatggagaaagaagttgctccaataatgacagagtactgggagaaagcagaatttccattccatatcactccaaagcttggggctatgggtgttgctggtggctcgatcaagggttatggatgtcctggtctctccatcaccgccaatgcaattgccacagcagaaatagctagagttgatgcaagttgttcgactttcattttggtgcattcttctttgggcatgctcactattgcactctgtggatcagaagcacagaaggagaagtatttgccttctttggctcaattgaatactgtggcttgttgggctttgacagagcccgacaatggaagcgatgcaagtggtctaggaacgactgcaacaaaggttgaaggaggttggaaaattaatggacaaaagcgttggattggaaacagcacctttgcagatctgttgatcatctttgcgaggaatacaacaactaaccaaatcaacggattcatagtcaagaaagatgcgcctggcctaaaggctactaagatcccaaataaaataggtttacgtatggttcaaaatggagatattctactacagaatgtctttgttccagatgaggatcggttacctggggtaaattcttttcaggacaccagcaaggttctggctgtctcacgtgtaatggtggcctggcaaccaatcggcatatcaatgggaatctacgatatgtgccacaggtatctgaaggagaggaaacagtttggagcaccgttggctgctttccagttaaaccaacagaagcttgtgcagatgctgggtaacgttcaagcgatgtttctaatgggttggcgtctctgcaagctgtatgagacgggtcagatgactccaggtcaagccagtttaggaaaggcatggatttcatcaaaagcgagagaaactgcttcgctaggtcgggaattacttggtgggaatggaattctagcagattttctggtagcaaaggctttctgtgaccttgaacccatttatacatacgaagggacttatgatataaacaccttagtaacagggagggaagtaacgggtattgcgagtttcaaaccggctacacgtagccgtctctaagttaaaaggttgtccattgtttgttgttgtctgttggttagtattgatattgtgatgtggggtttacatctacaaatgtgccaaataatctgacccaaaaagatttagggtccaatgggggaataatatcgttgttgcaaaacttaatccagttattgcttcttgcaatatggattcgtcttgtggcttgtactgggggaaataccatttgttaaccttttattaattcaaattgccaatgtcaataacttttggt

SEQ ID NO: 101557 - protein, 436 aa, Arabidopsis thaliana; identical to SEQ ID NO: 26763
  peptide (1)..(436): Ceres Seq. ID no. 13608173

SEQ ID NO: 101558 - protein, 411 aa, Arabidopsis thaliana; identical to SEQ ID NO: 26764
  peptide (1)..(411): Ceres Seq. ID no. 13608174

SEQ ID NO: 101559 - protein, 409 aa, Arabidopsis thaliana; identical to SEQ ID NO: 26765
  peptide (1)..(409): Ceres Seq. ID no. 13608175

SEQ ID NO: 101560 - DNA, 1448 bp, Arabidopsis thaliana
  misc_feature (1)..(1448): Ceres Seq. ID no. 13608180
  misc_feature (1)..(1448): Ortholog of  Ceres SEQ ID NO 14312769 as cited in SEQ ID NO 55493
  misc_feature (1)..(1448): Ortholog of  Ceres SEQ ID NO 13639300 as cited in SEQ ID NO 56701
acaaacatttttggacatgaattgaaaattattataattaccagattttttatctatcgtcgaacttgggactgagaaagtagcagcttcgtttgcttcctctgatatttttctacactctctgtctctctctaaagatgaattgtcttcagaatcttcccagatgttcagtctcacctctgctgggattcgggtgcattcaaagagatcattcttcttcttcttcttctttgaagatgctaatatcgcctccgatcaaagccaatgatccaaaatctcgacttgttttacatgcagtatcagagtcaaaatccagctcagagatgagtggtgttgcaaaggatgaagagaaatctgatgaatatagccaagacatgactcaagctatgggtgctgttctaacttacaggcacgagttaggaatgaactacaactttattcgtccagatctaattgttggatcctgcttacagacccctgaagatgttgacaagcttcgtaaaattggagttaaaaccatattttgcttgcaacaagatccagacctggaatattttggagtagacataagcagcatccaagcctatgctaagaaatatagtgatattcagcatattcgctgtgaaattagagactttgatgcatttgatttgagaatgcgtcttccagccgtggttggtactctttacaaagctgttaagcgaaatggaggagttacatatgtgcactgcactgctggaatgggaagggctcctgctgttgcgttgacatacatgttctgggtgcaaggctataagcttatggaagctcataaattacttatgagcaaaaggtcgtgctttccgaagctggatgctatcagaaatgcaacaattgatattcttacaggactcaagaggaagactgttactctgacactgaaagataaggggttctccagagtagaaatttctggccttgacattggatggggacagaggatacctctaacactggacaagggaacaggattctggatcctaaagagagaactgcctgaaggacagtttgaatataaatacatcatagatggtgaatggacacacaatgaggccgaaccgtttataggacctaacaaagacggccataccaacaattacgctaaagtagtggacgatccaacaagtgtggatggtacaactcgggagagactatcgagcgaagaccctgagctgttggaggaagaacgctcgaaactaatccagttcttggagacttgttctgaggcagaagtttgagagttgagagcatccgactagactatgtgaatgtacaacttactagtaacaataaaatgcttcatgttagtaatacatacagttacgcttatagcagcaaaagaaaaaaacatgaagttagtagtactatgttcaagtataatatatagtttaaaatctttgttttttctt

SEQ ID NO: 101561 - protein, 379 aa, Arabidopsis thaliana; identical to SEQ ID NO: 40524
  peptide (1)..(379): Ceres Seq. ID no. 13608181

SEQ ID NO: 101562 - protein, 346 aa, Arabidopsis thaliana; identical to SEQ ID NO: 40525
  peptide (1)..(346): Ceres Seq. ID no. 13608182

SEQ ID NO: 101563 - protein, 317 aa, Arabidopsis thaliana; identical to SEQ ID NO: 40526
  peptide (1)..(317): Ceres Seq. ID no. 13608183

SEQ ID NO: 101564 - DNA, 3682 bp, Arabidopsis thaliana
  misc_feature (1)..(3682): Ceres Seq. ID no. 13608184
  misc_feature (1)..(3682): Ortholog of  Ceres SEQ ID NO 14303959 as cited in SEQ ID NO 53709
attggctctctatgatttgacatttaagattattgctgcatttaattgtgctaaatcgattctgcactcatgcttcagctactgttctttgtgtccctgtaaatttaagtttttgagatctgaaactataagaaattttccgattttggttctcattagttgttagatctcttatctcactcgaagcttctttttttacgcggtttgatttattaatttcgttacttctctgtaaattctcgatctttagggttcttctcatcccctggtttaataatgggtccaatctcagttcttgttcactctaattttactttcacaatatctccaattacgcagatgctttttgacaaattttctccattaaaagtgtcttcttttttagctgtattaaatttataggtctctctatctgtactggtatagggttcatgattgagtctacaaaaacataatgaatgacctaaaagctattaactttcgtttctagatctgcttgcttctctttaatatcttcacctcattgctctaatagacattaatctccatttgaagttagtattcttttaccagttttactgatttttctttttcattcaggtaactgtgattgttgcaggatcttgtgtagaaacagatcacaagaagatgaatgataactcggtggtgcggctttgattatcttcagagattttagattctgtatccactctgttgcgatggggtcgtttgcaggcgcttgtgagattgtggaagagaaggatgatgaagtaagattgccaaaacattccgggagatatggtaaatcggttatgggatcatcaagtaaggatttggtggagcgtaagcaacgagagtatcatggttctcttgagtatgacattgatatgctttttcagtctatttctgttaaaccatctactacgaggttgatgagttcttctttccatcatcatgagacgagcgcgagtgccggtccaagcaggaccacaagcccttcgaagagaattgcgtccatgaaaaaaccagggacacctcagtctcctagatttgttggtctctctgattcagtttctttgaagcaggctcttagggatcgttgcatttctaaggcgtcggaaatggctgctcagaaacggttgtcgaaatctgctgctgcatctccgagggtctcagaagctgacaggataaagagtttgtataaccaagtttcgaatgaatctactagcagcaggtctgggcttgttcctgtggacaagggtaaaggaagtttggttgagatacctttgatgcctgtaaacgataaaccaagctcttcaaagagcgtacctcaacggtttgaagatccttctaaccccatttctgagccatctcaagctggaaccagttttggattacaaggagtggggaatcaaacgcgggagattaagctgttgcatagatccaacaaacctgggtcttgtcttagttctggcagtggagattatgagatagagttagatgaaaatgttgcgtctccttccactcatgcatttgttgaagatgatgtgatagaaatagacaaacacgttacttcactgccatctcactctagcaagaaagtcaatgcgacggagcttgacaagaatatttcctcatctgctgtagactcagagcagaaagggaagttggatgatgcacctaattcagggacagagaatggcaaaacagtacggaaggtaacaagaatgattccacgtcccaaacaaccgaaaaagaaaattttgcttaagaagaagttaaaaatcggggttgtgtcagcaacttacccaacaaaagacgatgaagaaattgttccttccttggactctagtgccaatcaacttctctgccagagatgtcactgttcgttgaagagcaccagcatcgatgacaacccaccttcatatacttctagtcataatcctaagatttgcacagatagtttgagctctgtttcaaataaagaagctcatcaaggatctgacgaaaactcctctggctcgtgtaatgtcagtcaaagctctgaagctgacattgtcataatgaaacaagatgtttcctctagcaataatagtggaatcggtgcaatggtagaaaaagaaaccgagaatccgacttccagtgagaaattcgagttctctctgagttcaaaagatagtcttggggattatagcaggagcacaagcattagtgaggagagtaatctgagccgatttagctgtgggaataagcctcacatgtcgatggatgtgagatgggaagcgattaagcatatcaaggttcaatacggctctttgggtttacgacacttcaaccttctgaagaaacttggttgtggagatataggaacagtctatctcgccgagctgattggtacaaactgtttgtttgccataaaggttatggacaacgagttcttggcgagaaggaaaaagtctccccgggcacaagcagaaagagaaatacttaaaatgttggaccatccttttcttcctacattatacgcgcaatttacttcggataatttatcttgtctagtcatggaatattgtcctggaggagatcttcatgtcctcagacagaagcagctaggccggtgtttccctgaacctgcagcaagattctatgtggccgaaattctccttgcactggagtacttacacatgcttggtatcatataccgagatctgaaaccggaaaacattcttgtccgtgaagatggacacattatgcttacggattttgacctctcactccgttgtgcagtgaacccgactcttgtcaggtcaaactctccacctggtaaagatcccgcaaggatttcaggtccatacaacacatccaactgcatacaaccattctgtatcaccgaaccatcttgccaggtttcgtgtttcagccctaggctctcctcaaaccaacaacaaggtagaaaaccaaaaaggggtgatcatctttcgaaaacccaacaacacttgagtagatcattgcctcagctcgtggctgaaccaaccgaagcaagatccaattcctttgtgggaacacacgagtacctagccccagagatcatcaaaggagaaggacatggcgctgcagttgactggtggactttcggggttctcctttacgagcttttatacgggaaaacaccattcaaaggttacaacaacgacgagactttggccaatgttgtgttacagaacctcaagtttcctgatagcccgcttgtaagcttccaggcaaaagacttgatcaggggacttcttgttaaggaaccagagaacaggctcgggtcagagaaaggttctgtagagatcaaaagacatcctttttttgaaggattgaattgggctctgatccggtgtgcaatcccgcctgagctaccggatttctatgagtatggtggtggaccagaggcagcggcggattcgcctggaggcagtaataataggtatcttgaatgtaaagccataggcgatcatcttgagttcgagttgttttaagcaagacatagatattctctggtataagcattcagagtaatcgttgttgtaagttattatatctaagttaaatctaaatgtcttatatgtaaatttagcgttctctgagacataatctgatatagtattctcaaaaaaggtaaatctcagagagatct

SEQ ID NO: 101565 - protein, 934 aa, Arabidopsis thaliana; identical to SEQ ID NO: 44315
  peptide (1)..(934): Ceres Seq. ID no. 13608185

SEQ ID NO: 101566 - protein, 903 aa, Arabidopsis thaliana; identical to SEQ ID NO: 44316
  peptide (1)..(903): Ceres Seq. ID no. 13608186

SEQ ID NO: 101567 - protein, 878 aa, Arabidopsis thaliana; identical to SEQ ID NO: 44317
  peptide (1)..(878): Ceres Seq. ID no. 13608187

SEQ ID NO: 101568 - DNA, 1883 bp, Arabidopsis thaliana
  misc_feature (1)..(1883): Ceres Seq. ID no. 13608188
  misc_feature (1)..(1883): Ortholog of  Ceres SEQ ID NO 14301836 as cited in SEQ ID NO 67386
gaattttcccttgtttctgaaatggaagacacaacatttaccaaagtgttcgttggaggattagcttgggaaacacacaaagtctctctcaggaattactttgaacagtttggtgacattgttgaagctgtcgttatcactgataaatctagtggtagatctaaaggctatggctttgttactttttgtgatccggaagcagctcagaaagcttgtgtagatccagctcctgttattgatggaagaagagctaattgtaatcttgctgcttttggtgttcagagatccaaaccttcttctcctattcatggacatgtaggaggaagaggcatgaaggtgactagccctttcaagacacactttgggaccgcggctactgctattccttccccacttccattctcccactacacacttccttacactaatccttttgggttctcttcatactcaatggattacaattaccccacgcagagctattacaatgtttatggaggggcaactgctcagcatccaatgtatggaagcggaccaatgactggtgtagcagcagcaccagcagcagggttctacccatatctccagtttgctgaaggaaatggacctgtcactggttatgctcccctccactaccccaaccacatgtttcactattctgctcccgggggaaactacccgcatcacaatggttcaccagtgtctcttgcaccttcaccagtcataccatcagtttgctttgcagttccacaggcttgaccatgaaggctcgtggttcatagttccatgatgctatgtaggggaccaattcatttaaatccttaaggcaaagctttgtttactactttcatccacatgcctctgaagtttcacaagacctgtggcctaaccatggttgcccttttccctttatgcttctaacccattagacaaagaagcccataatttggagtttgggcgtctttgcaagttctagttaagtctcacataggggtttaactaggaccatcttcatacacattactcatcttttcattttattcattgcattacctgctttctgaacgaaggtttcgttcaagatagcttgttcgagctgtagaagtaaacagttaccgtcttttgcacagtgcctcgcaaaggcaagcaattttgtagaaaaacttaaaaacttaggattggctgatcaacaagaaaggaaataaggatttcccgggaaaggcacaagaagtgaattgccaccacctggaagtgttgaagtagtgtgtgcaaaggtgtgcacactacttcacgctatatccattttaatgtgcagtcttaggattattagatctaggaccatgttgttacacattgtcttgtagtagaacgctagaacataaacttcctttgaggataaaggaattgctaacacatgtatattctcggtggctaagctttggagttatagccacacttgagctaacttagattaagatcatttttaagattcaaaatttagattgctcatcatatcttgaaccaaccccactaatggattgtggggttcttgcatttgcatgtatttttgcctcttgggagatattttggttccctttaggttcttctcataacaatcaaccaaaccagttgaccaaccatggttaggaatttcaggtgagaggtattcatcacctctttatctctcttttgtacttctttcctctatttcttcaagactaaaaactctctttttatgtaatttgttgttatatcttgtaagctgtgtgtttctgattctatgtaagaaaactaaaagctttcagtttccatcctcggtggttggaaaatgaaactgtgattgcaatattttactttgatctgatatataatcctcttgtatg

SEQ ID NO: 101569 - protein, 252 aa, Arabidopsis thaliana
  peptide (1)..(252): Ceres Seq. ID no. 13608189
EFSLVSEMEDTTFTKVFVGGLAWETHKVSLRNYFEQFGDIVEAVVITDKSSGRSKGYGFVTFCDPEAAQKACVDPAPVIDGRRANCNLAAFGVQRSKPSSPIHGHVGGRGMKVTSPFKTHFGTAATAIPSPLPFSHYTLPYTNPFGFSSYSMDYNYPTQSYYNVYGGATAQHPMYGSGPMTGVAAAPAAGFYPYLQFAEGNGPVTGYAPLHYPNHMFHYSAPGGNYPHHNGSPVSLAPSPVIPSVCFAVPQA

SEQ ID NO: 101570 - protein, 245 aa, Arabidopsis thaliana; identical to SEQ ID NO: 39186
  peptide (1)..(245): Ceres Seq. ID no. 13608190

SEQ ID NO: 101571 - protein, 142 aa, Arabidopsis thaliana; identical to SEQ ID NO: 39187
  peptide (1)..(142): Ceres Seq. ID no. 13608191

SEQ ID NO: 101572 - DNA, 2530 bp, Arabidopsis thaliana
  misc_feature (1)..(2530): Ceres Seq. ID no. 13608200
  misc_feature (1)..(2530): Ortholog of  Ceres SEQ ID NO 14302891 as cited in SEQ ID NO 66282
aaccatctcactttcttttttctgtcttacactccaagatcggtctcgatggcttcgttcatagatcttttcgccggcgacatcacgacgcaactcttaaagctgctcgctctagtagctaacacagtctacagttgcaaaggaatcgccgaacgactgatcacgatgatcagagacgttcaaccaacgatcagggagatccaatacagtggcgcggagctgagtaaccatcaccaaactcaactgggagtattctatgagatcttggagaaagcaagaaagctatgtgaaaaggttttaagatgcaataggtggaaccttaaacatgtgtaccacgcgaataagatgaaggatctcgagaaacaaatatctcgtttcctcaacagccagattttgctctttgttcttgctgaggtatgtcatctacgggtcaatggtgacaggattgagaggaatatggatagactgttgactgagcggaatgattctttgtcgtttccggagactatgatggagattgagacggtaagcgatccggagattcagacggtattggaattggggaagaaaaaggtgaaggagatgatgtttaagtttacggatacacatttgtttgggatctctggaatgagcggttcagggaaaaccactcttgcaatagagctttcaaaggacgatgatgttcgaggactctttaagaataaggttttgtttttgactgtgtcacggtctccgaattttgagaatttggagtcttgtatacgagaatttctttatgatggagttcatcaacggaagctagtgattcttgatgatgtttggacaagggagtccttggacaggctgatgtctaaaattcgtggaagcactactttagtagtgtcacggtccaagcttgcagatcctagaaccacctacaatgtggaattattaaagaaagatgaagcaatgtctcttttgtgtctctgtgctttcgaacaaaagtccccgccttctccattcaacaaatatttggtgaagcaggttgttgatgagtgtaaaggtttacctttatctttgaaagttcttggtgcttcgttaaaaaacaaacctgaaagatattgggaaggcgtagtgaagaggttattaagaggagaagctgctgatgaaactcatgagagcagagtgtttgctcatatggaagaaagtctagaaaacctcgacccgaaaatccgagactgtttcttggatatgggtgctttccctgaagacaagaagatccctcttgatcttctcacgagcgtgtgggttgagaggcatgatattgacgaggaaactgcgttttcctttgttcttcgtttagctgacaagaatctccttactatagtgaacaatccgaggtttggcgatgtgcacattggctactatgatgtatttgtgacgcaacacgatgttttgagagacctagcccttcatatgtccaatcgtgtggacgtaaataggagagagcggttattaatgccaaaaacagagccagtgcttccaagagaatgggaaaagaataaagatgagccatttgatgccaagatagtttcccttcatacaggggaaatggatgaaatgaattggtttgacatggacctccctaaggcagaagttttaatactgaacttctcttcggacaactacgtcttgccaccatttattggtaagatgagtagactcagggtgctcgtgattatcaacaatggcatgtctcctgcgcgtctacatggcttctccatctttgccaatttggccaaactgaggagtctctggctcaagagggtacatgtccctgaactcaccagctgcaccattccactgaaaaacctgcacaagatacatctaatcttttgtaaggtcaagaacagctttgttcagacgtcattcgacatctcgaaaatattcccaagcttgtctgatctcactattgatcactgtgatgatcttttggaactaaaatccatatttggaataacctctctcaactctctcagcataaccaactgtccacggattcttgaattgcccaagaatttgagtaacgtacagtcccttgaacgtctaaggttatatgcctgccccgagctgatatccctcccggtcgaagtttgtgagctgccatgtctaaagtacgttgacatttcacagtgtgtcagcctggtttctcttcctgaaaagtttggaaagctagggagtcttgagaaaattgacatgagagaatgcagtttattgggtttaccaagttctgtagctgcacttgtgtctctacgccatgtcatttgcgatgaggagacttcgtctatgtgggaaatggtcaagaaggtggttcctgaactttgcattgaagtcgccaaaaaatgcttcaccgtggattggcttgacgattaggcttcttgttccttcaaactcttgataaccccttgtattaatcattgatcagcagtaattagagcgagttatttgaagtttggaatgtttctctctatatataagatcatttttagct

SEQ ID NO: 101573 - protein, 803 aa, Arabidopsis thaliana
  peptide (1)..(803): Ceres Seq. ID no. 13608201
NHLTFFFLSYTPRSVSMASFIDLFAGDITTQLLKLLALVANTVYSCKGIAERLITMIRDVQPTIREIQYSGAELSNHHQTQLGVFYEILEKARKLCEKVLRCNRWNLKHVYHANKMKDLEKQISRFLNSQILLFVLAEVCHLRVNGDRIERNMDRLLTERNDSLSFPETMMEIETVSDPEIQTVLELGKKKVKEMMFKFTDTHLFGISGMSGSGKTTLAIELSKDDDVRGLFKNKVLFLTVSRSPNFENLESCIREFLYDGVHQRKLVILDDVWTRESLDRLMSKIRGSTTLVVSRSKLADPRTTYNVELLKKDEAMSLLCLCAFEQKSPPSPFNKYLVKQVVDECKGLPLSLKVLGASLKNKPERYWEGVVKRLLRGEAADETHESRVFAHMEESLENLDPKIRDCFLDMGAFPEDKKIPLDLLTSVWVERHDIDEETAFSFVLRLADKNLLTIVNNPRFGDVHIGYYDVFVTQHDVLRDLALHMSNRVDVNRRERLLMPKTEPVLPREWEKNKDEPFDAKIVSLHTGEMDEMNWFDMDLPKAEVLILNFSSDNYVLPPFIGKMSRLRVLVIINNGMSPARLHGFSIFANLAKLRSLWLKRVHVPELTSCTIPLKNLHKIHLIFCKVKNSFVQTSFDISKIFPSLSDLTIDHCDDLLELKSIFGITSLNSLSITNCPRILELPKNLSNVQSLERLRLYACPELISLPVEVCELPCLKYVDISQCVSLVSLPEKFGKLGSLEKIDMRECSLLGLPSSVAALVSLRHVICDEETSSMWEMVKKVVPELCIEVAKKCFTVDWLDD

SEQ ID NO: 101574 - protein, 787 aa, Arabidopsis thaliana
  peptide (1)..(787): Ceres Seq. ID no. 13608202
MASFIDLFAGDITTQLLKLLALVANTVYSCKGIAERLITMIRDVQPTIREIQYSGAELSNHHQTQLGVFYEILEKARKLCEKVLRCNRWNLKHVYHANKMKDLEKQISRFLNSQILLFVLAEVCHLRVNGDRIERNMDRLLTERNDSLSFPETMMEIETVSDPEIQTVLELGKKKVKEMMFKFTDTHLFGISGMSGSGKTTLAIELSKDDDVRGLFKNKVLFLTVSRSPNFENLESCIREFLYDGVHQRKLVILDDVWTRESLDRLMSKIRGSTTLVVSRSKLADPRTTYNVELLKKDEAMSLLCLCAFEQKSPPSPFNKYLVKQVVDECKGLPLSLKVLGASLKNKPERYWEGVVKRLLRGEAADETHESRVFAHMEESLENLDPKIRDCFLDMGAFPEDKKIPLDLLTSVWVERHDIDEETAFSFVLRLADKNLLTIVNNPRFGDVHIGYYDVFVTQHDVLRDLALHMSNRVDVNRRERLLMPKTEPVLPREWEKNKDEPFDAKIVSLHTGEMDEMNWFDMDLPKAEVLILNFSSDNYVLPPFIGKMSRLRVLVIINNGMSPARLHGFSIFANLAKLRSLWLKRVHVPELTSCTIPLKNLHKIHLIFCKVKNSFVQTSFDISKIFPSLSDLTIDHCDDLLELKSIFGITSLNSLSITNCPRILELPKNLSNVQSLERLRLYACPELISLPVEVCELPCLKYVDISQCVSLVSLPEKFGKLGSLEKIDMRECSLLGLPSSVAALVSLRHVICDEETSSMWEMVKKVVPELCIEVAKKCFTVDWLDD

SEQ ID NO: 101575 - protein, 748 aa, Arabidopsis thaliana
  peptide (1)..(748): Ceres Seq. ID no. 13608203
MIRDVQPTIREIQYSGAELSNHHQTQLGVFYEILEKARKLCEKVLRCNRWNLKHVYHANKMKDLEKQISRFLNSQILLFVLAEVCHLRVNGDRIERNMDRLLTERNDSLSFPETMMEIETVSDPEIQTVLELGKKKVKEMMFKFTDTHLFGISGMSGSGKTTLAIELSKDDDVRGLFKNKVLFLTVSRSPNFENLESCIREFLYDGVHQRKLVILDDVWTRESLDRLMSKIRGSTTLVVSRSKLADPRTTYNVELLKKDEAMSLLCLCAFEQKSPPSPFNKYLVKQVVDECKGLPLSLKVLGASLKNKPERYWEGVVKRLLRGEAADETHESRVFAHMEESLENLDPKIRDCFLDMGAFPEDKKIPLDLLTSVWVERHDIDEETAFSFVLRLADKNLLTIVNNPRFGDVHIGYYDVFVTQHDVLRDLALHMSNRVDVNRRERLLMPKTEPVLPREWEKNKDEPFDAKIVSLHTGEMDEMNWFDMDLPKAEVLILNFSSDNYVLPPFIGKMSRLRVLVIINNGMSPARLHGFSIFANLAKLRSLWLKRVHVPELTSCTIPLKNLHKIHLIFCKVKNSFVQTSFDISKIFPSLSDLTIDHCDDLLELKSIFGITSLNSLSITNCPRILELPKNLSNVQSLERLRLYACPELISLPVEVCELPCLKYVDISQCVSLVSLPEKFGKLGSLEKIDMRECSLLGLPSSVAALVSLRHVICDEETSSMWEMVKKVVPELCIEVAKKCFTVDWLDD

SEQ ID NO: 101576 - DNA, 1400 bp, Arabidopsis thaliana
  misc_feature (1)..(1400): Ceres Seq. ID no. 13608212
  misc_feature (1)..(1400): Ortholog of  Ceres SEQ ID NO 13655375 as cited in SEQ ID NO 63347
  misc_feature (1)..(1400): Ortholog of  Ceres SEQ ID NO 12626166 as cited in SEQ ID NO 64505
  misc_feature (1)..(1400): Ortholog of  Ceres SEQ ID NO 13654415 as cited in SEQ ID NO 68820
acgcttcccaaccgcctgcctttttcagattacctccggtttctaccactctcgccgtcgccgtcaccggtactccgatcacctccgcacgattcatttcctatttgcatttttcacctctctagcggaaagtgagtcttctcgagaatgggagattgaagaagtaagagattcactgattgaggaagagagaaagttagttcagaaaaatggctccagtgagtaaagctgataagaaggcagccgtagatgctgctgcgtggatgttcaatgtcgtcacttctgttggtatcatcattgttaataaagctttaatggcgacttatggttatagctttgctacaacgttaactggtttacatttcgctacaacgactctgatgacgcttgttttaagatgtcttggttacattcagccttctcatcttccgtttacggagcttttgagatttattctgtttgctaatttctccattgttggaatgaatgtcagtcttatgtggaactctgttggtttttatcagattgctaagctcagcatgattcctgtatcttgtttgttggaaatggttttcgataagattcgttattccagagatacaaagcttagcataggactggttcttgtgggtgttggtgtttgcactgttactgatgttagtgtaaacactaaaggatttgtagccgctttcgttgctgtgtggagtactgctctgcaacaatactatgtacattaccttcagcgcaagtactcgcttaactcattcaacctattgggacataccgctccagcccaagccgcaacattactggtagttggcccgtttcttgattattggctgacagaaaaaagagtagacatgtacgattacaacttggtttcagtgctgtttataaccctgtcgtgcacaatagcgattggaaccaacctaagccagttcatctgcatcggaagattcacagctgtatcgttccaagtgctgggacacatgaagacgatcctggtgctgataatgggcttcttcttctttggtagagaaggtcttaacttgcacgtggttgttggaatgataattgcagtactgggtatgatctggtacggtaatgcctcttcgaagccaggaggcaaagagcgacgaaactattctcttccaactacccgtcaacagaaactcggagctgcttcggattctgacgacaacgaagacaaagcctagtagtaagtagtatattatcaggaacatcacatagttacgtctctgttttgagttgtttttttattagcttaatttatgattctcgtgctaaattttggtttggtacgaaagaaagcgaattttttcatacagacgtttgagatttttgtaatgcatttttgcgaaatcaagttacatcaacgc

SEQ ID NO: 101577 - protein, 335 aa, Arabidopsis thaliana
  peptide (1)..(335): Ceres Seq. ID no. 13608213
MAPVSKADKKAAVDAAAWMFNVVTSVGIIIVNKALMATYGYSFATTLTGLHFATTTLMTLVLRCLGYIQPSHLPFTELLRFILFANFSIVGMNVSLMWNSVGFYQIAKLSMIPVSCLLEMVFDKIRYSRDTKLSIGLVLVGVGVCTVTDVSVNTKGFVAAFVAVWSTALQQYYVHYLQRKYSLNSFNLLGHTAPAQAATLLVVGPFLDYWLTEKRVDMYDYNLVSVLFITLSCTIAIGTNLSQFICIGRFTAVSFQVLGHMKTILVLIMGFFFFGREGLNLHVVVGMIIAVLGMIWYGNASSKPGGKERRNYSLPTTRQQKLGAASDSDDNEDKA

SEQ ID NO: 101578 - protein, 317 aa, Arabidopsis thaliana
  peptide (1)..(317): Ceres Seq. ID no. 13608214
MFNVVTSVGIIIVNKALMATYGYSFATTLTGLHFATTTLMTLVLRCLGYIQPSHLPFTELLRFILFANFSIVGMNVSLMWNSVGFYQIAKLSMIPVSCLLEMVFDKIRYSRDTKLSIGLVLVGVGVCTVTDVSVNTKGFVAAFVAVWSTALQQYYVHYLQRKYSLNSFNLLGHTAPAQAATLLVVGPFLDYWLTEKRVDMYDYNLVSVLFITLSCTIAIGTNLSQFICIGRFTAVSFQVLGHMKTILVLIMGFFFFGREGLNLHVVVGMIIAVLGMIWYGNASSKPGGKERRNYSLPTTRQQKLGAASDSDDNEDKA

SEQ ID NO: 101579 - protein, 300 aa, Arabidopsis thaliana
  peptide (1)..(300): Ceres Seq. ID no. 13608215
MATYGYSFATTLTGLHFATTTLMTLVLRCLGYIQPSHLPFTELLRFILFANFSIVGMNVSLMWNSVGFYQIAKLSMIPVSCLLEMVFDKIRYSRDTKLSIGLVLVGVGVCTVTDVSVNTKGFVAAFVAVWSTALQQYYVHYLQRKYSLNSFNLLGHTAPAQAATLLVVGPFLDYWLTEKRVDMYDYNLVSVLFITLSCTIAIGTNLSQFICIGRFTAVSFQVLGHMKTILVLIMGFFFFGREGLNLHVVVGMIIAVLGMIWYGNASSKPGGKERRNYSLPTTRQQKLGAASDSDDNEDKA

SEQ ID NO: 101580 - DNA, 782 bp, Arabidopsis thaliana
  misc_feature (1)..(782): Ceres Seq. ID no. 13608216
  misc_feature (1)..(782): Ortholog of  Ceres SEQ ID NO 15177027 as cited in SEQ ID NO 58171
ttggcgagaaaagttgagaactggaatcgaagaagcgatagggttttggttacttggagtgtgagtattttagttaccaccgcttgcaatttcaaattggtttcttttttccggtgacatttagtaagacaatggaagaaataagatcggcgatggagaagcaagtggatctcgtagcggatctggttgagaaactctccggagagctccgaacggggtttcaacctgcttacgataatttcttggggtttttccacgccattgattggaaggaaccttggattatgggtttaatggcgtttcatgctttgttgttactagtgactcttctttctagaaggcatctcaacttccatatgttcctcttcttattggctttggctggggtatactttgcagagaatctcaaccgggagttgaggaaaaactggaagagcttctcaactcaaaactactttgactcgaacggagtcttcctatcgactctctggtctggaccacttttggtcattgcaatgataatcctgataaacacactcttttcgctttgctacttaatcgtaaagtggaaaagagctgagctcaggcatcgcgcaaggcttgctcataccaaggaggaatgatcccactttttttaatctcacatttatgtatactctcacacaatgcatcaaaactgttttgagttttttagtagaagctgctcttttatgtatttcgttttcaattgaatcgaattgtatcaaaccgaaccaaaccaaattattctacttcggtctgtt

SEQ ID NO: 101581 - protein, 163 aa, Arabidopsis thaliana
  peptide (1)..(163): Ceres Seq. ID no. 13608217
MEEIRSAMEKQVDLVADLVEKLSGELRTGFQPAYDNFLGFFHAIDWKEPWIMGLMAFHALLLLVTLLSRRHLNFHMFLFLLALAGVYFAENLNRELRKNWKSFSTQNYFDSNGVFLSTLWSGPLLVIAMIILINTLFSLCYLIVKWKRAELRHRARLAHTKEE

SEQ ID NO: 101582 - protein, 156 aa, Arabidopsis thaliana
  peptide (1)..(156): Ceres Seq. ID no. 13608218
MEKQVDLVADLVEKLSGELRTGFQPAYDNFLGFFHAIDWKEPWIMGLMAFHALLLLVTLLSRRHLNFHMFLFLLALAGVYFAENLNRELRKNWKSFSTQNYFDSNGVFLSTLWSGPLLVIAMIILINTLFSLCYLIVKWKRAELRHRARLAHTKEE

SEQ ID NO: 101583 - protein, 112 aa, Arabidopsis thaliana
  peptide (1)..(112): Ceres Seq. ID no. 13608219
MGLMAFHALLLLVTLLSRRHLNFHMFLFLLALAGVYFAENLNRELRKNWKSFSTQNYFDSNGVFLSTLWSGPLLVIAMIILINTLFSLCYLIVKWKRAELRHRARLAHTKEE

SEQ ID NO: 101584 - DNA, 1755 bp, Arabidopsis thaliana
  misc_feature (1)..(1755): Ceres Seq. ID no. 13608220
  misc_feature (1)..(1755): Ortholog of  Ceres SEQ ID NO 15168509 as cited in SEQ ID NO 57909
  misc_feature (1)..(1755): Ortholog of  Ceres SEQ ID NO 13594429 as cited in SEQ ID NO 58006
  misc_feature (1)..(1755): Ortholog of  Ceres SEQ ID NO 13661403 as cited in SEQ ID NO 61549
ctctctctctatcatcatcatcatcactttctctatctatctctcttcttaaagcggccattggtgctctccaagttccatctcaagcttttcttcttgttttgttgttctcttaattgaaaaacaagatcttgaactaaaaaatggaaactgaagacgatttgtgcaacaccaattggggaagctcttcttcgaaatcgcgagagccgggttcatcagactgtgggaattcgacattcgcaggttttacgtcccagcagaagtgggaagatgcttcaatcttggattatgagatgggtgtggagcctggattgcaagagagcattcaagcaaatgttgatttcttacaaggtgttagggctcaagcgtgggatccaaggacgatgttgagtaacctttcttttatggagcagaagattcaccagctgcaggatcttgttcatcttcttgttggtcgtggtgggcagcttcaaggtcgtcaagacgagctcgcggctcagcagcagcagcttataacgacggatcttacttccattatcatacagcttatttcaactgcaggtagtcttcttccatctgttaagcataatatgtcaacagctccgggtccattcactgggcagcccggttcagccgtgttcccttatgtaagggaggctaataacgttgcttcacagagtcagaacaataacaactgtggtgctcgagagttcgatttgcctaagccggttcttgttgatgagagggaaggtcatgttgtggaggaacatgagatgaaagatgaagatgatgtggaagaaggagagaaccttcctcccggttcgtatgagatattgcagcttgagaaagaagagattctcgcaccgcatactcacttctgcacgatatgtggcaagggtttcaagagagacgcgaatttgaggatgcatatgagagggcatggagatgagtacaaaacagcagctgctctggcgaaaccgaacaaagaatccgtacccgggtctgagccgatgctgatcaagaggtactcgtgcccattccttggttgcaaacgtaacaaggagcacaaaaagttccagcctttgaaaacgattctatgcgtgaagaatcactataaacgcacccactgcgataaaagcttcacttgcagccggtgccataccaagaaattctctgtcattgcagatcttaaaacccacgagaagcactgcgggaaaaacaagtggctttgttcctgtggtacaacattttcaaggaaagacaagttgtttggtcacatagctctgttccagggacacacgcctgcaatccctcttgaagagacaaaaccatcagccagtacatctactcagagagggagctctgaaggcgggaacaacaaccaaggaatggttggcttcaatcttggttctgcatcaaatgctaaccaagaaaccacacagcctggaatgactgatgggaggatatgttttgaggagtcgttctcaccaatgaactttgatacatgtaattttggagggttccacgagtttccgcgactgatgtttgatgattcagagagttcttttcaaatgcttattgcgaatgcctgtggtttctcgcccaggaatgttggtgagtctgtttcagatactagtctctaaggcattgccatatatatgataagttatgtaagatgttctagtttttagccttttaagcagttcttttgtgtctgtaattttgttttcgccataataataatatcagaatagc

SEQ ID NO: 101585 - protein, 499 aa, Arabidopsis thaliana
  peptide (1)..(499): Ceres Seq. ID no. 13608221
METEDDLCNTNWGSSSSKSREPGSSDCGNSTFAGFTSQQKWEDASILDYEMGVEPGLQESIQANVDFLQGVRAQAWDPRTMLSNLSFMEQKIHQLQDLVHLLVGRGGQLQGRQDELAAQQQQLITTDLTSIIIQLISTAGSLLPSVKHNMSTAPGPFTGQPGSAVFPYVREANNVASQSQNNNNCGAREFDLPKPVLVDEREGHVVEEHEMKDEDDVEEGENLPPGSYEILQLEKEEILAPHTHFCTICGKGFKRDANLRMHMRGHGDEYKTAAALAKPNKESVPGSEPMLIKRYSCPFLGCKRNKEHKKFQPLKTILCVKNHYKRTHCDKSFTCSRCHTKKFSVIADLKTHEKHCGKNKWLCSCGTTFSRKDKLFGHIALFQGHTPAIPLEETKPSASTSTQRGSSEGGNNNQGMVGFNLGSASNANQETTQPGMTDGRICFEESFSPMNFDTCNFGGFHEFPRLMFDDSESSFQMLIANACGFSPRNVGESVSDTSL

SEQ ID NO: 101586 - protein, 449 aa, Arabidopsis thaliana
  peptide (1)..(449): Ceres Seq. ID no. 13608222
MGVEPGLQESIQANVDFLQGVRAQAWDPRTMLSNLSFMEQKIHQLQDLVHLLVGRGGQLQGRQDELAAQQQQLITTDLTSIIIQLISTAGSLLPSVKHNMSTAPGPFTGQPGSAVFPYVREANNVASQSQNNNNCGAREFDLPKPVLVDEREGHVVEEHEMKDEDDVEEGENLPPGSYEILQLEKEEILAPHTHFCTICGKGFKRDANLRMHMRGHGDEYKTAAALAKPNKESVPGSEPMLIKRYSCPFLGCKRNKEHKKFQPLKTILCVKNHYKRTHCDKSFTCSRCHTKKFSVIADLKTHEKHCGKNKWLCSCGTTFSRKDKLFGHIALFQGHTPAIPLEETKPSASTSTQRGSSEGGNNNQGMVGFNLGSASNANQETTQPGMTDGRICFEESFSPMNFDTCNFGGFHEFPRLMFDDSESSFQMLIANACGFSPRNVGESVSDTSL

SEQ ID NO: 101587 - protein, 419 aa, Arabidopsis thaliana
  peptide (1)..(419): Ceres Seq. ID no. 13608223
MLSNLSFMEQKIHQLQDLVHLLVGRGGQLQGRQDELAAQQQQLITTDLTSIIIQLISTAGSLLPSVKHNMSTAPGPFTGQPGSAVFPYVREANNVASQSQNNNNCGAREFDLPKPVLVDEREGHVVEEHEMKDEDDVEEGENLPPGSYEILQLEKEEILAPHTHFCTICGKGFKRDANLRMHMRGHGDEYKTAAALAKPNKESVPGSEPMLIKRYSCPFLGCKRNKEHKKFQPLKTILCVKNHYKRTHCDKSFTCSRCHTKKFSVIADLKTHEKHCGKNKWLCSCGTTFSRKDKLFGHIALFQGHTPAIPLEETKPSASTSTQRGSSEGGNNNQGMVGFNLGSASNANQETTQPGMTDGRICFEESFSPMNFDTCNFGGFHEFPRLMFDDSESSFQMLIANACGFSPRNVGESVSDTSL

SEQ ID NO: 101588 - DNA, 1527 bp, Arabidopsis thaliana
  misc_feature (1)..(1527): Ceres Seq. ID no. 13608224
  misc_feature (1)..(1527): Ortholog of  Ceres SEQ ID NO 14315430 as cited in SEQ ID NO 57618
  misc_feature (1)..(1527): Ortholog of  Ceres SEQ ID NO 13623344 as cited in SEQ ID NO 0
aggtcgcaacaccgcaatagatcttttccccaagtttcagacaaacataaagcagcagagaaaattttcaagtttcaaagagcttttccctcaccaagcaaaatttggatatttgtcagcaaaatctgcagctaaattgggacttgtcttgttagttcaaagattgaaacttttttggttaattgtttggcggaagaagatttacaatgggagaggagcatccgagaaagcggtctagacaacattttgaagcggaggcgagaaacgtatcgttgtttgaatcccctcaatgcgaaacctccaagtggtatttcagcagggaagagattgagcgtttctctccatccagaaaagatgggattgatcttgtgaaggagtcgtttttacggtcttcgtattgcaccttcctgcaaagacttggcatgaagcttcatgtgtcccaggttacaatatcatgtgcaatggtgatgtgccacaggttttacatgcgccaatctcatgcaaaaaatgactggcagacaatagcgacttccagtctgttcctcgcttgcaaagctgaagatgagccatgtcaactgtccagtgtcgttgtagcgtcttatgaaataatttatgagtgggatccttctgcctcaattagaatccatcaaactgagtgttatcatgaatttaaagaaattattttgtccggggaaagtcttctgctgagcacaagtgctttccatttagacattgaacttccctacaaacctctggctgcggctttgaatagactgaacgcttggcctgaccttgcaacagctgcatggaattttgtgcatgactggattcgaaccacactatgcttgcagtacaaaccccatgttattgcaacagccactgtgcacctagctgctacgtttcagaatgcgaaagtaggcagcaggagagattggtggttggagtttggagttacaactaagctattaaaagaggtaatccaggagatgtgcacactgatagaagtggacagaaggaggaatatgccacctccacctccacctccaagaagagagttaagttgggcaatacctgcagccgtaaagccggtccatatggctagagcttatccgtttcacagctaccctttgcagtcctatagacaggctggcatctggtgagccattgttgagcagcatgaagatgtaatctctcttagagtcttgagttggtttagcaataaaagatttccgtagagactcatgagagaggcagtgtagcattatatagagatccgagtgaggtgcttctgtctaagttaagcgtctcatgtatgaccaaagtggattctctcgagattcttggtctctgttctcgatagagagagattatgtatagaagtgtcccattcacatgttataatactagctgactttatatcgtttgtatatctggaatctatgtttttggtttctttaaaaagtttaaagttgttttgattttgactaattctctcattgttaagtaatttggtttttgatgaagtgc

SEQ ID NO: 101589 - protein, 317 aa, Arabidopsis thaliana; identical to SEQ ID NO: 22591
  peptide (1)..(317): Ceres Seq. ID no. 13608225

SEQ ID NO: 101590 - protein, 245 aa, Arabidopsis thaliana; identical to SEQ ID NO: 22592
  peptide (1)..(245): Ceres Seq. ID no. 13608226

SEQ ID NO: 101591 - protein, 232 aa, Arabidopsis thaliana; identical to SEQ ID NO: 22593
  peptide (1)..(232): Ceres Seq. ID no. 13608227

SEQ ID NO: 101592 - DNA, 717 bp, Arabidopsis thaliana
  misc_feature (1)..(717): Ceres Seq. ID no. 13608228
  misc_feature (1)..(717): Ortholog of  Ceres SEQ ID NO 15225657 as cited in SEQ ID NO 329
aaacaacaggtcagagaataaatagaaaaaccaaaaccctttagcgtctcccaaatcctctcaatcctctgctgctcaatctctcatcatcggcatcgctctctctaaaaatgtctcagatggatcccgacgctgtatctaaggccttcgtcgaacattactattccaccttcgacaccaaccgtgtcggtctcgctggtctctatcaggaagcttctatgctcaccttcgaaggtcaaaagatccaaggagtccagagcatcgtcgctaagctcacctctcttcctttccagcagtgcaagcatcacatctccaccgttgattgtcagccttctggtcctgcttccggtatgctcgttttcgtctccggtaatctccagctcgccggagaagaacacgctctcaagttcagccagatgtttcatttgatgccgacgccacaaggaagcttttacgtgttcaacgatatattcaggttgaactatgcctgaacagaaatcagattgttgttagcatacatcattgttgcatttctatactatttgagcaaatccttctatcaatttttctcgtctttttcttgttattcccagatgatttaccttgggaacagaggaatattgtctctcatcatgtatttggtttggattgtttgttcatttgtcattacaatctattgactttataagacaatttgaatggtcatttggctcttgt

SEQ ID NO: 101593 - protein, 126 aa, Arabidopsis thaliana; identical to SEQ ID NO: 36334
  peptide (1)..(126): Ceres Seq. ID no. 13608229

SEQ ID NO: 101594 - protein, 123 aa, Arabidopsis thaliana; identical to SEQ ID NO: 36335
  peptide (1)..(123): Ceres Seq. ID no. 13608230

SEQ ID NO: 101595 - protein, 90 aa, Arabidopsis thaliana; identical to SEQ ID NO: 36336
  peptide (1)..(90): Ceres Seq. ID no. 13608231

SEQ ID NO: 101596 - DNA, 1819 bp, Arabidopsis thaliana
  misc_feature (1)..(1819): Ceres Seq. ID no. 13608236
  misc_feature (1)..(1819): Ortholog of  Ceres SEQ ID NO 14307916 as cited in SEQ ID NO 66395
gtcccaaacgattcacttttctcaccatctcaatctccagaccaaaagaaacaaaaaatggattctttttcatattcttcgatgaaatccatgttgattcaagctcgtggctcgttgaactcgcgtttgtcggagtttgagccactggttctgctattggttccgcttgtctctctgtttctcgctcagattatcggatctgtgtttggcgttgttcacgagaaaggcctcaaagcttgtcttattgggtttatcatgggactcctcaaaatgattcctggagttcagaattacattgatgctgagaaacaaaaggttgttgaccaattacaatctggtagcagctctaagaaaaagaataagactgaagtattgccagtaaaaggtctaggagttgaagttttagagaaaatggagaatgagaagaggaatgatgctatttggcaaggaaaatgctctggcactgtatacataggtggagccgagtctgaaggacatttttcattgataaatcaagcatgttcaatgtttgcgcataccaatccgttgcatatagacgtattccagagtgtggtgcggtttgagtcagaagtagtcgcaatgactgctgcgttacttgggagtaaagaaacggcgtcaggaggtcaaatatgcggaaacatgacgtctggaggaacagaaagtatagtgttggctgtgaagtcatctcgtgactatatgaagtacaagaagggaatcacacggccagaaatgattatacctgagtcgggtcattcggcttatgataaggcggcccagtattttaaaatcaagttgtggcgagttccagttgacaaagacttccgagctgatgtgaaggcaacaaggcggcatattaacagaaacaccatcatgattgttggatcagcaccaggattccctcatggcatcattgatcctatcgaggagcttggtcaactggctcttagctatggaatatgctttcatgttgacctttgccttggtggttttgtgttacctttcgctcgtaaacttgggtaccagatcccaccttttgatttttctgtacaaggagttacttcaatttctgtggacgtgcataaatatggtttggctcctaaaggaactagtacagttctatatagaaatcatgagatcagaaagcaccaatttgttgctgtaactgaatggtcaggaggtctatacgtgtctccaactatcgctgggagtaggcctgggtctttggtagccggtgcttgggctgcaatgatgtcgctcggcgaagaaggttacctacaaaacacaagtaagataatggaagcatcaaagagactagaagaaggagtaagagaaatccatgaactattcgtcattggaaagccagatatgacaatcgtggcttttggttctaaagcattggatatatttgaagttaatgacatcatgtcttctaaaggttggcatttgaatgcactacagagacccaacagcattcatatatgtattactcttcaacacgtccctgtagtcgatgacttccttcgggatctgcgtgaagctgtggaaactgtaaaagcaaacccaggaccgatcacgggaggcttggctccaatatatggagcagcagggaagatgccagaccgaggcatggtgaatgagcttctggttagtttcatggacagtcaatattaagtttcttgaaggttaaagcatctagtgggtaaattgatatcacatttcagttggagaagcaaaactttgtatattcacaaccacattgtttcgtttgccctactaataaaatttcattacaatcttc

SEQ ID NO: 101597 - protein, 563 aa, Arabidopsis thaliana; identical to SEQ ID NO: 26047
  peptide (1)..(563): Ceres Seq. ID no. 13608237

SEQ ID NO: 101598 - protein, 544 aa, Arabidopsis thaliana; identical to SEQ ID NO: 26048
  peptide (1)..(544): Ceres Seq. ID no. 13608238

SEQ ID NO: 101599 - protein, 536 aa, Arabidopsis thaliana; identical to SEQ ID NO: 26049
  peptide (1)..(536): Ceres Seq. ID no. 13608239

SEQ ID NO: 101600 - DNA, 1019 bp, Arabidopsis thaliana
  misc_feature (1)..(1019): Ceres Seq. ID no. 13608248
  misc_feature (1)..(1019): Ortholog of  Ceres SEQ ID NO 13595782 as cited in SEQ ID NO 57677
  misc_feature (1)..(1019): Ortholog of  Ceres SEQ ID NO 13596009 as cited in SEQ ID NO 68258
cctcttcaccaatcggatccacgaaaaattcgataaacctcgattgatcccaaattcccaatggaggtttctgttctcacctaatttagctccatatccctcgcagtccgattcaagtgagattcttctaagttttttggaagaataatggtgttgccgttgatgaaactgggcacactcgccgtcaaaaccataagtaaaccattggctagtcagctcaagcaccaagctaaggttcatcccaagtttcgtcaatctatcatcaacttcgctcagaggaatcatcgaatcactacgcaaatgcaaagaaggatatatggtcatgccactgatgtagagattcgtcccttagatgaggaaaaggctgttcaagctgctgttgacctcattggagagatctttctctttggggtcggtggagctgttgttgtttttgaggtgcagagaagttcgcggtcagaagcaagaaaagaggaagcacgtaagcaagaactagaggagttgagaataaaagatgaagaactagaaaagcaagtggcagatctcaagagcaagctagaggagcttgaacaacttgctaaggcacgaggactgagcggtattttccagttaaaaccacagcctggtactaccgctagtgggaaaccagacaaatccagttgaatcatcatcatcatcatcttattcaatctagaagattcaaaccaaagttaacaatacggtaatgattctttttcacaagagttgaggagtttctgattctctcctctatatacatgtaccatccatcatcaaaaacaatctgcttttaaattatcaaattaggtgacaaataaaaaaagttttgatgttgaggttttgtcttttcaacatttgttgcttagatttggtcttttgagaccaatggctcgattttaggtaatgttggataatgacgaattcattatgaaagagacattgagatgtaccaaattacttctttctccagattacaaaatgtacatcatatttatccatga

SEQ ID NO: 101601 - protein, 171 aa, Arabidopsis thaliana; identical to SEQ ID NO: 30222
  peptide (1)..(171): Ceres Seq. ID no. 13608249

SEQ ID NO: 101602 - protein, 166 aa, Arabidopsis thaliana; identical to SEQ ID NO: 30223
  peptide (1)..(166): Ceres Seq. ID no. 13608250

SEQ ID NO: 101603 - protein, 120 aa, Arabidopsis thaliana; identical to SEQ ID NO: 30224
  peptide (1)..(120): Ceres Seq. ID no. 13608251

SEQ ID NO: 101604 - DNA, 1879 bp, Arabidopsis thaliana
  misc_feature (1)..(1879): Ceres Seq. ID no. 13608252
  misc_feature (1)..(1879): Ortholog of  Ceres SEQ ID NO 14314363 as cited in SEQ ID NO 52272
gaaaaatctctatttttctctccaatatccttcttaagtttttgaaccctctccacttcaatataaccgacctctcttctctcttctgaaaaaaacaccaaaggagctttaaatgctccgttacataatctctatctctttccaagaatatagagaaaggaaaataatatacaagaattaaaagaaggtatatcatcatctctctagctagtgatcaaagcaccgtcatcatcatcatatatcatcagcttgcctcagaggagaagaccaacataagagagatcgaagatcaaaatctatctctcttcatcatcttctgctgttactatcatatcacacgctctctcaaacatcatcctatatatagacttctcttcatcatcatcaaatgcaaggtcatcaccagaatcatcatcaacacttatcatcatcctccgccacgtcttcccatggaaacttcatgaacaaagatgggtatgatattggagagatagacccatcactcttcctctatcttgatggacaaggacatcatgatcctccatcaactgctccttctcctttacatcatcatcacacaactcagaatttggcgatgagacctccaacatcgacgctcaacatctttccatctcagcctatgcacatagagccacctccttcttctacacacaataaggaagggaaccgcaagggtcttgcctcatcggaccatgacatacctaaatcgtcagaccctaaaacattgagaagactagcacaaaacagagaagcagcaagaaaaagcagattacgtaaaaaggcttatgttcagcaactcgagtcatgtaggatcaaactgacccaactagaacaagagattcaacgggccagatcccaaggcgtattctttggagggtctcttataggaggagatcaacagcaaggtggactacccattggccctggcaacatcagctctgaagcagcggtgttcgatatggaatatgcgaggtggctggaggagcagcagaggctattaaacgaactaagggtggcaacacaagaacacttgtccgagaacgagcttaggatgtttgtggacacatgtttagctcattatgaccatttgattaacctcaaggctatggtcgctaagaccgatgtcttccacctcatttctggagcatggaaaactccagctgaacgttgcttcttgtggatgggtggtttccgtccatcggagatcattaaggtgattgtgaaccagatagaaccattgacggagcaacagatagttgggatatgtgggctgcaacagtccacacaagaggccgaggaggctctctcgcaaggcctcgaggcgttgaatcaatcactttccgatagcattgtctctgactccctcccgcctgcctccgcaccacttcctcctcatctatccaatttcatgtcacacatgtccttagctctcaacaagctctctgctctcgagggcttcgttctccaggcggataatttgaggcaccaaacgatccataggctgaaccaattgttgacgacccgtcaagaagcacggtgtcttctagccgttgcggagtacttccaccgtcttcaagctctaagttctctctggctagcccgtcctcggcaagatggataatactaaaacaactgatgaaggaaaccaaaaacaaaaacaagagaataggttgattagttagccgccagcttgacctctttatcatatatatcgtctctctactcaaatacagtgcaattagggaaaattgtttggcttctttttgttatatgattcttactattatgtttttaatcaagatgcagattatatatatagacaagtattccataccttttaatgaattcttccttatgc

SEQ ID NO: 101605 - protein, 417 aa, Arabidopsis thaliana
  peptide (1)..(417): Ceres Seq. ID no. 13608253
MQGHHQNHHQHLSSSSATSSHGNFMNKDGYDIGEIDPSLFLYLDGQGHHDPPSTAPSPLHHHHTTQNLAMRPPTSTLNIFPSQPMHIEPPPSSTHNKEGNRKGLASSDHDIPKSSDPKTLRRLAQNREAARKSRLRKKAYVQQLESCRIKLTQLEQEIQRARSQGVFFGGSLIGGDQQQGGLPIGPGNISSEAAVFDMEYARWLEEQQRLLNELRVATQEHLSENELRMFVDTCLAHYDHLINLKAMVAKTDVFHLISGAWKTPAERCFLWMGGFRPSEIIKVIVNQIEPLTEQQIVGICGLQQSTQEAEEALSQGLEALNQSLSDSIVSDSLPPASAPLPPHLSNFMSHMSLALNKLSALEGFVLQADNLRHQTIHRLNQLLTTRQEARCLLAVAEYFHRLQALSSLWLARPRQDG

SEQ ID NO: 101606 - protein, 393 aa, Arabidopsis thaliana
  peptide (1)..(393): Ceres Seq. ID no. 13608254
MNKDGYDIGEIDPSLFLYLDGQGHHDPPSTAPSPLHHHHTTQNLAMRPPTSTLNIFPSQPMHIEPPPSSTHNKEGNRKGLASSDHDIPKSSDPKTLRRLAQNREAARKSRLRKKAYVQQLESCRIKLTQLEQEIQRARSQGVFFGGSLIGGDQQQGGLPIGPGNISSEAAVFDMEYARWLEEQQRLLNELRVATQEHLSENELRMFVDTCLAHYDHLINLKAMVAKTDVFHLISGAWKTPAERCFLWMGGFRPSEIIKVIVNQIEPLTEQQIVGICGLQQSTQEAEEALSQGLEALNQSLSDSIVSDSLPPASAPLPPHLSNFMSHMSLALNKLSALEGFVLQADNLRHQTIHRLNQLLTTRQEARCLLAVAEYFHRLQALSSLWLARPRQDG

SEQ ID NO: 101607 - protein, 348 aa, Arabidopsis thaliana
  peptide (1)..(348): Ceres Seq. ID no. 13608255
MRPPTSTLNIFPSQPMHIEPPPSSTHNKEGNRKGLASSDHDIPKSSDPKTLRRLAQNREAARKSRLRKKAYVQQLESCRIKLTQLEQEIQRARSQGVFFGGSLIGGDQQQGGLPIGPGNISSEAAVFDMEYARWLEEQQRLLNELRVATQEHLSENELRMFVDTCLAHYDHLINLKAMVAKTDVFHLISGAWKTPAERCFLWMGGFRPSEIIKVIVNQIEPLTEQQIVGICGLQQSTQEAEEALSQGLEALNQSLSDSIVSDSLPPASAPLPPHLSNFMSHMSLALNKLSALEGFVLQADNLRHQTIHRLNQLLTTRQEARCLLAVAEYFHRLQALSSLWLARPRQDG

SEQ ID NO: 101608 - DNA, 3716 bp, Arabidopsis thaliana
  misc_feature (1)..(3716): Ceres Seq. ID no. 13608262
  misc_feature (1)..(3716): Ortholog of  Ceres SEQ ID NO 13595870 as cited in SEQ ID NO 62101
  misc_feature (1)..(3716): Ortholog of  Ceres SEQ ID NO 13590241 as cited in SEQ ID NO 63878
  misc_feature (1)..(3716): Ortholog of  Ceres SEQ ID NO 13657939 as cited in SEQ ID NO 66349
atgtctcgcaatcggcaaatcatcatccccgacgacgtgatggaaacagaagcggtggttaataccgtcgccggcgtcgactgtttcgtctcactccctcgtcaattactacacgcgcttcaatccaccagctcctctcctctccctccgcttctccctgtcgagctacgctccggtgaccgccgttggtcagttgcttggtccggctctagctcctcctcttctgcgatcgagatcgctcgagtgtttgcggaaagcatttcgttgccggatggtacagttgttaaagttcgtgttcttcctaatgtgcccaaggctactttagtaacagtcgaaccagagactgaagatgactgggaagttcttgagctcaatgctgaacttgccgaggcagctatacttagtcaggtgaggatactacatgagaccatgaaattccctttgtggttgcatgaccgaactgtgataagattttctgtggtttcaacatttccatcaaaaggggtggtacaacttgtgccaggaactgaagtggctgtggctccaaagagacgtgacagaaatctcaaagcaaaaaagagtcaggaaaaagaatgtaacaatgtgaaggctctactacgtgtacaagagactgatagatcagcctttcatgaagctgatgtcaaaggatttgagctaagggtagccctcacgtctattgcctatattcatccagaaactgccaagaaacactctctagaatctcttcagttgatttctgtatcccctagaatacctttgaaaggtagtgcaaagaaggatgaagccttaaatatgaaaaacagtgaagcttcaaaggtggccgagaatggtacttcaagcgccaagaaagagcctcgtcaagcaattcttcgtcttgtcttttcagatttagctgctaaaggacatctaatgatggtcgagtctcttcgtctctatctaggagcaggcctacactcatgggtttacttaaggggatgcaatgtgaatgaagacaaagaaattcctgctctttcactttctccttgtgtcttcaagatttctgaaaatgaaaaggtgctggataagggtacggataggcttggtaataacaattctgttagaaaaagcagtcatccaccgtctggcttgagcacctatgtggatgttgtcgactggtctgtgcacgataaggttgttacagctctttcatctgagggtttgcatgacgaaggaaatcatgataagaataagaaaggattggaataccttactcgcctgtggtcattggcacagcttgatgctatggcgtcagtcacaggagttgatgttagttcgttaattgtgggaagagaaacgtttttccatttcgaagtaagagggctcgaatcttataaatccatagacgggcagccttctgttaatgatcgttgggaaagtgggaagaaggataaacacactcctttagaaattttgtacgtcatgacggtctctgatgagtctttgcttggtgataaattcgctgggtatgatcttagcctggatagaagtgagaagagcgacaatgtggtgcatattgagccagtgcttgagaagatgaatcttggcgagcctatatatttaaagtcggctaaagagacacactgcaataaaggtgtttccccagatatatcctccttgacgtggatgggcccaatcgtgtcggatgttatcaagagaatgaccgtgttgttgtctcctgcagctggaatgtggtttagcaagttcaagattccatcacctggacatattctcatatatgggcctcctggttcaggaaagacaatattggcaagagctgctgcaaagtatttcgaagaacagaaagacttgttggcacatgtgattttagtatcctgttctacacttgccttggagaaggttcaacacatccatcatgtcctttctagtgtaatagctgaggggttggaacatgcaccatctgtcatcattttggatgatcttgatagcattatctcatcgtcttctgatactgaaggaacacaagcttcggttggggttacaatgcttacaaaattcctaacagatgttatagatgattatggggaatacaggaattcctcttgtggaattggcccacttgcattcgttgcttctgtccagtctctagagcaaattccacagacattgagctcatcaggaaggtttgacttccatgtgcaactggctgctcctgctacctcggaacgtggggccatactgaagcatgagatacagaaacgccttttagactgttcagaagacattttacttaacttagctgctaaatgtgaaggatatgatgcatatgacctggaaatattggttgatagagctgttcatgctgccattggccggcatctacctttagaatcaaatatatccaaatataatttggtcaaagaagactttactcgagctatgcatgattttgtgcctgttgccatgcgtgacatcacaaaatctgcctctgaaggtggtcgtttggggtgggaagatgtgggaggtgtgactgatattaaaaatgctatcaaagagatgattgagctgccatcaaaatttccaaaaatctttgcaaaatctcctctgcgtttgagatcgaatgttctcttgtatggcccacccggttgtgggaagactcacattgttggtgcagctgctgcagcgtgttccctacggtttatatcggtgaaggggcctgagctgttaaacaaatacattggtgcatctgaacaagcggtccgtgatatattttcgaaagcagcagctgcagctccatgcatactctttttcgatgaattcgattcaattgctcccaaaagaggacatgataatactggtgtaactgatcgagttgttaatcaatttttgacagaactggatggagttgaagttctaacaggggtctttgtatttgctgcaaccagtagaccagatttacttgatcctgccctcctaaggcctggccggcttgatcgtcttcttttgtgcgactttccttccccaccagaacgattagagattcttacagttctttctagaaagcttctgatggctgatgatattgacctagagcctatagctttgatgactgaaggcttcagtggagctgatcttcaagctcttctctcagatgcgcaacttgcagctgtacacgagtatctgaacagagaagataaacccgagaccggaactacaccaataataactgatcctcttctgaagtcgattgcttctaaaactaaaccatcggtttccgaaaccgagaaacaaaagctctatgacatatatagccagtttctggattcaagaaaatcgtcaagagaagcaaagggcaaaagagcaaccttagcataatcaaaggtattacaaagacacaaaaaggaatggttacattgtagaaatcacatcatgttgtaaaatttgctttatgatagatatgcccagttgttagcattagagtaaaagtggttgaagtttggaataaagatagttagatactagagagacacatggtaagttctacaagattcaaacgactatagacatctctacagtaataagattaatacatttcttttggcaattttagaattttaaaagctgtaatatttttggtcaaaacaagataaaaatggtattcaagttccgtaattttgtgtatgaaatgaaataaaaac

SEQ ID NO: 101609 - protein, 1130 aa, Arabidopsis thaliana
  peptide (1)..(1130): Ceres Seq. ID no. 13608263
MSRNRQIIIPDDVMETEAVVNTVAGVDCFVSLPRQLLHALQSTSSSPLPPLLPVELRSGDRRWSVAWSGSSSSSSAIEIARVFAESISLPDGTVVKVRVLPNVPKATLVTVEPETEDDWEVLELNAELAEAAILSQVRILHETMKFPLWLHDRTVIRFSVVSTFPSKGVVQLVPGTEVAVAPKRRDRNLKAKKSQEKECNNVKALLRVQETDRSAFHEADVKGFELRVALTSIAYIHPETAKKHSLESLQLISVSPRIPLKGSAKKDEALNMKNSEASKVAENGTSSAKKEPRQAILRLVFSDLAAKGHLMMVESLRLYLGAGLHSWVYLRGCNVNEDKEIPALSLSPCVFKISENEKVLDKGTDRLGNNNSVRKSSHPPSGLSTYVDVVDWSVHDKVVTALSSEGLHDEGNHDKNKKGLEYLTRLWSLAQLDAMASVTGVDVSSLIVGRETFFHFEVRGLESYKSIDGQPSVNDRWESGKKDKHTPLEILYVMTVSDESLLGDKFAGYDLSLDRSEKSDNVVHIEPVLEKMNLGEPIYLKSAKETHCNKGVSPDISSLTWMGPIVSDVIKRMTVLLSPAAGMWFSKFKIPSPGHILIYGPPGSGKTILARAAAKYFEEQKDLLAHVILVSCSTLALEKVQHIHHVLSSVIAEGLEHAPSVIILDDLDSIISSSSDTEGTQASVGVTMLTKFLTDVIDDYGEYRNSSCGIGPLAFVASVQSLEQIPQTLSSSGRFDFHVQLAAPATSERGAILKHEIQKRLLDCSEDILLNLAAKCEGYDAYDLEILVDRAVHAAIGRHLPLESNISKYNLVKEDFTRAMHDFVPVAMRDITKSASEGGRLGWEDVGGVTDIKNAIKEMIELPSKFPKIFAKSPLRLRSNVLLYGPPGCGKTHIVGAAAAACSLRFISVKGPELLNKYIGASEQAVRDIFSKAAAAAPCILFFDEFDSIAPKRGHDNTGVTDRVVNQFLTELDGVEVLTGVFVFAATSRPDLLDPALLRPGRLDRLLLCDFPSPPERLEILTVLSRKLLMADDIDLEPIALMTEGFSGADLQALLSDAQLAAVHEYLNREDKPETGTTPIITDPLLKSIASKTKPSVSETEKQKLYDIYSQFLDSRKSSREAKGKRATLA

SEQ ID NO: 101610 - protein, 1117 aa, Arabidopsis thaliana
  peptide (1)..(1117): Ceres Seq. ID no. 13608264
METEAVVNTVAGVDCFVSLPRQLLHALQSTSSSPLPPLLPVELRSGDRRWSVAWSGSSSSSSAIEIARVFAESISLPDGTVVKVRVLPNVPKATLVTVEPETEDDWEVLELNAELAEAAILSQVRILHETMKFPLWLHDRTVIRFSVVSTFPSKGVVQLVPGTEVAVAPKRRDRNLKAKKSQEKECNNVKALLRVQETDRSAFHEADVKGFELRVALTSIAYIHPETAKKHSLESLQLISVSPRIPLKGSAKKDEALNMKNSEASKVAENGTSSAKKEPRQAILRLVFSDLAAKGHLMMVESLRLYLGAGLHSWVYLRGCNVNEDKEIPALSLSPCVFKISENEKVLDKGTDRLGNNNSVRKSSHPPSGLSTYVDVVDWSVHDKVVTALSSEGLHDEGNHDKNKKGLEYLTRLWSLAQLDAMASVTGVDVSSLIVGRETFFHFEVRGLESYKSIDGQPSVNDRWESGKKDKHTPLEILYVMTVSDESLLGDKFAGYDLSLDRSEKSDNVVHIEPVLEKMNLGEPIYLKSAKETHCNKGVSPDISSLTWMGPIVSDVIKRMTVLLSPAAGMWFSKFKIPSPGHILIYGPPGSGKTILARAAAKYFEEQKDLLAHVILVSCSTLALEKVQHIHHVLSSVIAEGLEHAPSVIILDDLDSIISSSSDTEGTQASVGVTMLTKFLTDVIDDYGEYRNSSCGIGPLAFVASVQSLEQIPQTLSSSGRFDFHVQLAAPATSERGAILKHEIQKRLLDCSEDILLNLAAKCEGYDAYDLEILVDRAVHAAIGRHLPLESNISKYNLVKEDFTRAMHDFVPVAMRDITKSASEGGRLGWEDVGGVTDIKNAIKEMIELPSKFPKIFAKSPLRLRSNVLLYGPPGCGKTHIVGAAAAACSLRFISVKGPELLNKYIGASEQAVRDIFSKAAAAAPCILFFDEFDSIAPKRGHDNTGVTDRVVNQFLTELDGVEVLTGVFVFAATSRPDLLDPALLRPGRLDRLLLCDFPSPPERLEILTVLSRKLLMADDIDLEPIALMTEGFSGADLQALLSDAQLAAVHEYLNREDKPETGTTPIITDPLLKSIASKTKPSVSETEKQKLYDIYSQFLDSRKSSREAKGKRATLA

SEQ ID NO: 101611 - protein, 987 aa, Arabidopsis thaliana
  peptide (1)..(987): Ceres Seq. ID no. 13608265
MKFPLWLHDRTVIRFSVVSTFPSKGVVQLVPGTEVAVAPKRRDRNLKAKKSQEKECNNVKALLRVQETDRSAFHEADVKGFELRVALTSIAYIHPETAKKHSLESLQLISVSPRIPLKGSAKKDEALNMKNSEASKVAENGTSSAKKEPRQAILRLVFSDLAAKGHLMMVESLRLYLGAGLHSWVYLRGCNVNEDKEIPALSLSPCVFKISENEKVLDKGTDRLGNNNSVRKSSHPPSGLSTYVDVVDWSVHDKVVTALSSEGLHDEGNHDKNKKGLEYLTRLWSLAQLDAMASVTGVDVSSLIVGRETFFHFEVRGLESYKSIDGQPSVNDRWESGKKDKHTPLEILYVMTVSDESLLGDKFAGYDLSLDRSEKSDNVVHIEPVLEKMNLGEPIYLKSAKETHCNKGVSPDISSLTWMGPIVSDVIKRMTVLLSPAAGMWFSKFKIPSPGHILIYGPPGSGKTILARAAAKYFEEQKDLLAHVILVSCSTLALEKVQHIHHVLSSVIAEGLEHAPSVIILDDLDSIISSSSDTEGTQASVGVTMLTKFLTDVIDDYGEYRNSSCGIGPLAFVASVQSLEQIPQTLSSSGRFDFHVQLAAPATSERGAILKHEIQKRLLDCSEDILLNLAAKCEGYDAYDLEILVDRAVHAAIGRHLPLESNISKYNLVKEDFTRAMHDFVPVAMRDITKSASEGGRLGWEDVGGVTDIKNAIKEMIELPSKFPKIFAKSPLRLRSNVLLYGPPGCGKTHIVGAAAAACSLRFISVKGPELLNKYIGASEQAVRDIFSKAAAAAPCILFFDEFDSIAPKRGHDNTGVTDRVVNQFLTELDGVEVLTGVFVFAATSRPDLLDPALLRPGRLDRLLLCDFPSPPERLEILTVLSRKLLMADDIDLEPIALMTEGFSGADLQALLSDAQLAAVHEYLNREDKPETGTTPIITDPLLKSIASKTKPSVSETEKQKLYDIYSQFLDSRKSSREAKGKRATLA

SEQ ID NO: 101612 - DNA, 1709 bp, Arabidopsis thaliana
  misc_feature (1)..(1709): Ceres Seq. ID no. 13608276
  misc_feature (1)..(1709): Ortholog of  Ceres SEQ ID NO 14315241 as cited in SEQ ID NO 52516
  misc_feature (1)..(1709): Ortholog of  Ceres SEQ ID NO 13594349 as cited in SEQ ID NO 58161
  misc_feature (1)..(1709): Ortholog of  Ceres SEQ ID NO 13663419 as cited in SEQ ID NO 66561
atttaactgtctcttcttcaaaaccaaaaccaaaaccaaaaccttctattgtttccctcccacgctataattcatagacataagagaatgaggaaaggacagggctactcctactctgtaatcgcatcggtgttggtgttactgtgtgtggtggtgtctcgaatcgaatgcagcagccaagtgcacgccctgagccgtctttacctgtctaagcgaggggttggtggttcgtccaccatggacacaagccatttcaaggcggttaaggatttgaaaccgtcttcgctgcggagtgctgctaatcaggaggggctaagaaagagagatctgatacggagattgcccggacagcctcccgttagtttcgatcagtacggcggctatgttaccgtcaacgaatccgccgggcgttcctttttctactatttcgtggaagcctctaagtctaaagattcttctcctctgcttctctggctcaacggcggaccgggatgctcgtcactggcgtatggagcattacaagagcttgggccgttcagagtacacagcgacggcaaaacgctttttagaaaccgatatgcatggaacaatgctgcgaatgtcttgttcttagaatcgccggcgggagtggggttctcgtacaccaacacgacgtcggacctggagaagcacggggacaggaataccgcagctgataactacatcttcctggttaactggctggagaggttcccggagtacaaaggcagggacttgtacatcgccggtgagagctatgccggccactatgttccgcaacttgcccatactatccttctccatcaccggagcttcttcaatctcaagggcattctgataggaaatgcggtgatcaacgacgagaccgacttgatgggtatgtacgactttttcgagagtcatgctttgatctccgaagattctttggctagactcaagagcaactgcgatctcaagacggagtctgcgagtgtaatgactgaggagtgcgcggtggtgtccgaccaaatagacatggatacatattacctcgacatctacaacatatacgctcccttgtgcctcaactccacgctcactcgcaggcccaagcgaggaaccacaataagggagtttgacccctgcagtgaccattacgtgcaggcctacctgaacagacctgaagtccaagcggccctgcacgcaaacgctacgaagctgccttacgagtggcagccgtgcagcagtgtgataaagaagtggaacgacagtcctaccacagtgattcctctcatcaaggagctgatgggtcagggcgtccgcgtctgggtgttcagcggagacacagacgggagaattccagtgacgtccaccaaatactccctcaagaagatgaatctaacggccaaaacggcctggcatccatggtacctagggggtgaggtgggtggatacacagaggagtacaaagggaaattgacatttgccacagtgagaggggctggtcatcaagttcccagcttccagccaaagcgctctctttcactcttcattcacttcctcaatgacactcctctccctgacacctctcgttactaaatattctatctgagattgtaatttctctcttaattagcttttattcatcctcccatccattttttatctactatttcattacatacctttgaatgttaatatctgttttgctc

SEQ ID NO: 101613 - protein, 502 aa, Arabidopsis thaliana
  peptide (1)..(502): Ceres Seq. ID no. 13608277
MRKGQGYSYSVIASVLVLLCVVVSRIECSSQVHALSRLYLSKRGVGGSSTMDTSHFKAVKDLKPSSLRSAANQEGLRKRDLIRRLPGQPPVSFDQYGGYVTVNESAGRSFFYYFVEASKSKDSSPLLLWLNGGPGCSSLAYGALQELGPFRVHSDGKTLFRNRYAWNNAANVLFLESPAGVGFSYTNTTSDLEKHGDRNTAADNYIFLVNWLERFPEYKGRDLYIAGESYAGHYVPQLAHTILLHHRSFFNLKGILIGNAVINDETDLMGMYDFFESHALISEDSLARLKSNCDLKTESASVMTEECAVVSDQIDMDTYYLDIYNIYAPLCLNSTLTRRPKRGTTIREFDPCSDHYVQAYLNRPEVQAALHANATKLPYEWQPCSSVIKKWNDSPTTVIPLIKELMGQGVRVWVFSGDTDGRIPVTSTKYSLKKMNLTAKTAWHPWYLGGEVGGYTEEYKGKLTFATVRGAGHQVPSFQPKRSLSLFIHFLNDTPLPDTSRY

SEQ ID NO: 101614 - protein, 452 aa, Arabidopsis thaliana
  peptide (1)..(452): Ceres Seq. ID no. 13608278
MDTSHFKAVKDLKPSSLRSAANQEGLRKRDLIRRLPGQPPVSFDQYGGYVTVNESAGRSFFYYFVEASKSKDSSPLLLWLNGGPGCSSLAYGALQELGPFRVHSDGKTLFRNRYAWNNAANVLFLESPAGVGFSYTNTTSDLEKHGDRNTAADNYIFLVNWLERFPEYKGRDLYIAGESYAGHYVPQLAHTILLHHRSFFNLKGILIGNAVINDETDLMGMYDFFESHALISEDSLARLKSNCDLKTESASVMTEECAVVSDQIDMDTYYLDIYNIYAPLCLNSTLTRRPKRGTTIREFDPCSDHYVQAYLNRPEVQAALHANATKLPYEWQPCSSVIKKWNDSPTTVIPLIKELMGQGVRVWVFSGDTDGRIPVTSTKYSLKKMNLTAKTAWHPWYLGGEVGGYTEEYKGKLTFATVRGAGHQVPSFQPKRSLSLFIHFLNDTPLPDTSRY

SEQ ID NO: 101615 - DNA, 1359 bp, Arabidopsis thaliana
  misc_feature (1)..(1359): Ceres Seq. ID no. 13608287
  misc_feature (1)..(1359): Ortholog of  Ceres SEQ ID NO 14308787 as cited in SEQ ID NO 55614
  misc_feature (1)..(1359): Ortholog of  Ceres SEQ ID NO 13656547 as cited in SEQ ID NO 65935
tttcattgtgaactcacaaagatgttggtgtccgcaagggtagagaaacaaaagcgtgttgcttatcaggggaaggcgacagtgcttgctctcggtaaggccttgccgagcaatgttgtttcccaggagaatctcgtggaggagtatctccgtgaaatcaaatgcgataacctttctatcaaagacaagctgcaacacttgtgcaaaagcacaactgtcaagacacgctacacagtcatgtcacgggagacgctgcacaaataccctgaactagcaaccgagggttccccaaccatcaaacagaggcttgagattgcaaacgatgcggttgtgcagatggcatatgaagcgagcttggtttgcatcaaggaatggggaagggcagtggaagatatcactcatcttgtctacgtttcctccagtgagttccgtttgcccggaggtgatctttacctctcggcacagctgggccttagcaacgaggttcagagagtgatgctgtattttcttggatgctatggaggtttgagtgggctgcgcgtggccaaagacattgctgagaacaacccagggagccgtgtgttgctcaccacctctgagactaccgttctggggttccgcccacccaacaaagctcgtccttacaacttagtcggggctgcactctttggagatggagcagctgccctgatcatcggagcagaccctacagagtcggaatctcctttcatggagcttcactgtgctatgcagcagttcctgccccaaacacagggggtgatcgacgggcggctgtcagaagagggcataaccttcaagctaggaagagacctccctcagaagatcgaagacaacgtggaggagttctgcaagaagctagtggcaaaggctggctctggtgcgttggagttgaatgaccttttctgggcagttcatcctggtggaccagccatcctgagcgggctggagacaaagctgaagctgaagccggaaaagctggaatgcagcagaagggcgttgatggattatgggaacgtaagcagcaacaccatcttctacataatggacaaagtcagagatgagcttgagaagaaaggcacagagggagaagagtggggtctgggcttagctttcggaccgggaatcactttcgaaggctttctcatgaggaacctctaaatgtatatgaactggacatttctcaacaaataaaatatacaggaaccgatgctaacacacatacatcatgtaatggttgcattagttttgttctttaatggtaaatcacagaaatacatcaatacagtaagtttatatacataattgaagtattcttcaatggcatcttacttcatgcat

SEQ ID NO: 101616 - protein, 392 aa, Arabidopsis thaliana
  peptide (1)..(392): Ceres Seq. ID no. 13608288
FHCELTKMLVSARVEKQKRVAYQGKATVLALGKALPSNVVSQENLVEEYLREIKCDNLSIKDKLQHLCKSTTVKTRYTVMSRETLHKYPELATEGSPTIKQRLEIANDAVVQMAYEASLVCIKEWGRAVEDITHLVYVSSSEFRLPGGDLYLSAQLGLSNEVQRVMLYFLGCYGGLSGLRVAKDIAENNPGSRVLLTTSETTVLGFRPPNKARPYNLVGAALFGDGAAALIIGADPTESESPFMELHCAMQQFLPQTQGVIDGRLSEEGITFKLGRDLPQKIEDNVEEFCKKLVAKAGSGALELNDLFWAVHPGGPAILSGLETKLKLKPEKLECSRRALMDYGNVSSNTIFYIMDKVRDELEKKGTEGEEWGLGLAFGPGITFEGFLMRNL

SEQ ID NO: 101617 - protein, 385 aa, Arabidopsis thaliana; identical to SEQ ID NO: 35194
  peptide (1)..(385): Ceres Seq. ID no. 13608289

SEQ ID NO: 101618 - protein, 313 aa, Arabidopsis thaliana; identical to SEQ ID NO: 35195
  peptide (1)..(313): Ceres Seq. ID no. 13608290

SEQ ID NO: 101619 - DNA, 712 bp, Arabidopsis thaliana
  misc_feature (1)..(712): Ceres Seq. ID no. 13608302
  misc_feature (1)..(712): Ortholog of  Ceres SEQ ID NO 13594979 as cited in SEQ ID NO 56172
  misc_feature (1)..(712): Ortholog of  Ceres SEQ ID NO 14316530 as cited in SEQ ID NO 60270
aaacaacgtttcgtcttctcagattctttacctttcttaaggaaaaatcccaaaagagagaagataaaaatctcgcattcagattttagggtttctgacaaattctccgatgaaattcaagatccgaatctcggcaatgtcgacaatctcgccgtcattagccgtaattgcgtttctttttctgattcttctgaatctatcttcggttttcgctgatccttcgacggaaggaggagagattattaggttaccttcggagaagatcaacggtgaaaaaaacagaggcgaattctgtgaaggaattgctaaaccggcttcgtgtccggttcagtgtttcaggcctgatccggtttgcggtgaagacagcgttacttactggtgcggttgtgcagatgctttgtgccatggtgttcgtgttgtgaaacaaggagcttgtgatgttggtaatggtgttggtttgtctgttcctggacaagctctgcttttgatacacattgtctggatgatgcttcttgggttttctattctctttgggctcttttgattttggttctaatttctctgaatcaaaacaacatatagaagattgtttaggttttcagattgcaaatgacgaatcttttttgtttatactcttctttttttctttatattgctctgtattcatattacattaaaactatgaggaaatattattattatttggtttgtt

SEQ ID NO: 101620 - protein, 144 aa, Arabidopsis thaliana
  peptide (1)..(144): Ceres Seq. ID no. 13608303
MKFKIRISAMSTISPSLAVIAFLFLILLNLSSVFADPSTEGGEIIRLPSEKINGEKNRGEFCEGIAKPASCPVQCFRPDPVCGEDSVTYWCGCADALCHGVRVVKQGACDVGNGVGLSVPGQALLLIHIVWMMLLGFSILFGLF

SEQ ID NO: 101621 - protein, 135 aa, Arabidopsis thaliana; identical to SEQ ID NO: 21178
  peptide (1)..(135): Ceres Seq. ID no. 13608304

SEQ ID NO: 101622 - DNA, 1302 bp, Arabidopsis thaliana
  misc_feature (1)..(1302): Ceres Seq. ID no. 13608305
  misc_feature (1)..(1302): Ortholog of  Ceres SEQ ID NO 14308168 as cited in SEQ ID NO 59069
attctcagctttgccgttttcatcgattaaagagagagaggcttcgttcgccgtccgtcgtaaaaatggggttcaagaggaagaaagatgatggtgatggtgaggaaatggaatctgatgttcgtggaaagtctactttcagtgggggtgagaagaggaatgtgatacttccttcgatgattaagaacaaagataagagatcaaaagtgtatgcgaagcagaagcatgagaagaaattggagaagcagaagaagattagagctcgtgatgctgctgagaaacgagctttagagcttggagaagagcctccacaaaagatgattccgaagacgattgagaatacaagagaatctgatgaaactgtttgcagacctgacgatgaagaattgtttgcggatattgatgctgatgagtttaatccagttctgagacgtgagattgcacctaaggtcttgctcacaacatgtcgtttcaattccactagaggacctgctttaatatctgagttgctttcggtgataccaaactctcattatcaaaagagaggaacctatgatttgaagaagattgtagaatacgcaacgaagaaagattttacatctcttattgttgttcatacaaatcgtagagaacctgatgcgcttcttatcatcggtttgccaaatggtcctactgctcatttcaaattgtcaaatcttgttctaaggaaggatattaagaatcacggaaatcctacaagccatcaaccagaactggttttgaataactttacaacgcgtttagggaatcgtgttgggagattttttcaatcactcttccctccggatcctaatttccgtggtaggagagttgtaacattccacaaccagcgtgactttatatttttcagacatcaccgttacatatttgagacaaaggaaagcaagagtgataaaggaaaagaagagacaataaaacctcgtcttcaggaatgcggtcctcgattcacgcttaagctagttactctacagcatggaacttttgacaccaaaggtggagaatttgaatgggttcataagcctgaaatggacacgagcaggagaaggttcttcttataaattctgctgtcttccgagtttcaccaagttttgtgtttattttgcattttcgaattttccctacctccgtccaaaattgtatgtctttaaaacttctcatttcttttttcaatatagccatgagccatcgaaacaatcgtaagagtacttgtttcaacaatataggccctcgttttttactaagctatatatagttggttaaact

SEQ ID NO: 101623 - protein, 364 aa, Arabidopsis thaliana
  peptide (1)..(364): Ceres Seq. ID no. 13608306
SQLCRFHRLKRERLRSPSVVKMGFKRKKDDGDGEEMESDVRGKSTFSGGEKRNVILPSMIKNKDKRSKVYAKQKHEKKLEKQKKIRARDAAEKRALELGEEPPQKMIPKTIENTRESDETVCRPDDEELFADIDADEFNPVLRREIAPKVLLTTCRFNSTRGPALISELLSVIPNSHYQKRGTYDLKKIVEYATKKDFTSLIVVHTNRREPDALLIIGLPNGPTAHFKLSNLVLRKDIKNHGNPTSHQPELVLNNFTTRLGNRVGRFFQSLFPPDPNFRGRRVVTFHNQRDFIFFRHHRYIFETKESKSDKGKEETIKPRLQECGPRFTLKLVTLQHGTFDTKGGEFEWVHKPEMDTSRRRFFL

SEQ ID NO: 101624 - protein, 343 aa, Arabidopsis thaliana; identical to SEQ ID NO: 35833
  peptide (1)..(343): Ceres Seq. ID no. 13608307

SEQ ID NO: 101625 - protein, 329 aa, Arabidopsis thaliana; identical to SEQ ID NO: 35834
  peptide (1)..(329): Ceres Seq. ID no. 13608308

SEQ ID NO: 101626 - DNA, 953 bp, Arabidopsis thaliana
  misc_feature (1)..(953): Ceres Seq. ID no. 13608313
  misc_feature (1)..(953): Ortholog of  Ceres SEQ ID NO 13638567 as cited in SEQ ID NO 51303
  misc_feature (1)..(953): Ortholog of  Ceres SEQ ID NO 12610031 as cited in SEQ ID NO 55811
  misc_feature (1)..(953): Ortholog of  Ceres SEQ ID NO 12610896 as cited in SEQ ID NO 55861
  misc_feature (1)..(953): Ortholog of  Ceres SEQ ID NO 12619664 as cited in SEQ ID NO 66048
  misc_feature (1)..(953): Ortholog of  Ceres SEQ ID NO 12635952 as cited in SEQ ID NO 0
catcaccttcaccttcaacatcaaacatcacatttcttcctcttttctctcttttttctcagtcttcaaagagtttcttagtaacccaaatcaatggcaggtatcaaagttttcggacacccagcttccattgccaccaggagagtcctcatcgccctccacgagaaaaacctcgactttgagctcgttcatgtcgaactcaaagacggtgagcacaagaaggagcctttcctctcccgcaacccttttggtcaggttccagcctttgaagatggagacctcaagctcttcgaatcaagagcgattactcagtacatagctcaccgatatgaaaaccaaggaaccaaccttctccaaaccgactccaagaacatatctcagtacgcaatcatggccattggaatgcaagtagaagatcaccagttcgacccagtggcttcaaagcttgcttttgaacaaatattcaagtccatctacggcttgaccacagacgaagccgttgttgcagaagaggaggctaagttagccaaggtccttgatgtctacgaggctaggctcaaggagttcaagtatttggctggtgaaactttcactttgactgatcttcaccacattcccgcgattcaatacctgctcggaactcccaccaagaagctcttcaccgagcgtccacgtgtcaatgagtgggtggctgaaatcaccaagaggccagcttccgagaaggttcagtgagaaatttctaaaaggaaaatatggttttgcttcagtcacagtaataatgctaagattaaataagcggctttctcattgcccaatttctcagtactttctttctgttgtatcctctgttttctttcagttatgtgagtgtgtgtgtatgctcttgagagtatctttggcaaaaactatttatctaatcttcaagctattctaaaataaatcaattagttaac

SEQ ID NO: 101627 - protein, 212 aa, Arabidopsis thaliana; identical to SEQ ID NO: 20959
  peptide (1)..(212): Ceres Seq. ID no. 13608314

SEQ ID NO: 101628 - protein, 113 aa, Arabidopsis thaliana; identical to SEQ ID NO: 20960
  peptide (1)..(113): Ceres Seq. ID no. 13608315

SEQ ID NO: 101629 - protein, 109 aa, Arabidopsis thaliana; identical to SEQ ID NO: 20961
  peptide (1)..(109): Ceres Seq. ID no. 13608316

SEQ ID NO: 101630 - DNA, 1154 bp, Arabidopsis thaliana
  misc_feature (1)..(1154): Ceres Seq. ID no. 13608324
  misc_feature (1)..(1154): Ortholog of  Ceres SEQ ID NO 12582036 as cited in SEQ ID NO 50981
  misc_feature (1)..(1154): Ortholog of  Ceres SEQ ID NO 14311969 as cited in SEQ ID NO 58929
  misc_feature (1)..(1154): Ortholog of  Ceres SEQ ID NO 15173523 as cited in SEQ ID NO 61797
  misc_feature (1)..(1154): Ortholog of  Ceres SEQ ID NO 14309357 as cited in SEQ ID NO 0
aaaattgaaattcgaaaacagaacaaaaaaaaaaatctctctcaatctctctcagatctgaatccatccatcaccgatctctaatggcggcaccaccagcatcatcctcggcgagggaagagttcgtgtacctcgcaaagctcgcagagcaagcggaacgttacgaagaaatggttgaattcatggaaaaagtcgctgaagccgttgacaaagacgaactcaccgtcgaagaacgtaatctcctctccgtcgcttacaaaaacgtaatcggcgctcgtcgtgcttcctggagaatcatctcttccattgaacaaaaagaagagagtcgtggtaacgatgaccatgtgaccacgatccgtgattacagaagcaagatcgaatctgagttatcgaaaatctgtgacggtattcttaagcttcttgatactagacttgttcctgcttctgctaatggagattctaaggttttttaccttaagatgaagggagattatcataggtatttggctgagtttaagactggtcaagagaggaaagatgctgctgaacatactctcaccgcttacaaagctgctcaggatattgctaatgctgaattggctccaacgcatccgattcgtcttggtttggctttgaatttctctgtgttttactatgagattcttaattctccagatcgtgcttgtaatctcgctaagcaggcgtttgatgaagccattgctgagttagatactcttggagaggagtcatacaaggatagtaccttgatcatgcagcttcttcgtgacaatcttactctctggacttctgacatgcaggacgaaagtccggaggagattaaagaagcagcagcaccaaagcctgctgaagaacagaaggagatctaagtttgtggtttcttttttcagtattcttaagttatgcaattataattatgtttctgcttggtgtttattttctaatctttcctttgctatccccgaagcttctaaggccgtctaattcttgtcctttgtttgcttttctcaatcgtggatgctactggatttctgttttgttttacttcttctcttgattgattgcatttcccggcttatgccttgtacttgaaactcagttttctctcttattaatgatttgccattcacctggtt

SEQ ID NO: 101631 - protein, 267 aa, Arabidopsis thaliana; identical to SEQ ID NO: 39219
  peptide (1)..(267): Ceres Seq. ID no. 13608325

SEQ ID NO: 101632 - protein, 238 aa, Arabidopsis thaliana; identical to SEQ ID NO: 39220
  peptide (1)..(238): Ceres Seq. ID no. 13608326

SEQ ID NO: 101633 - protein, 234 aa, Arabidopsis thaliana; identical to SEQ ID NO: 39221
  peptide (1)..(234): Ceres Seq. ID no. 13608327

SEQ ID NO: 101634 - DNA, 825 bp, Arabidopsis thaliana
  misc_feature (1)..(825): Ceres Seq. ID no. 13608328
  misc_feature (1)..(825): Ortholog of  Ceres SEQ ID NO 12780822 as cited in SEQ ID NO 67471
aacaaagttgtgtctctctgaagtctgaaccaaaaagataagacgaaaaggagatcaatggaggaagaatacgtaagagtaataagcataacaacaataggagtaatctcatggggtctcattttcatccttgtaagacgaatcttctcaagctactcgttcgacttcagcacccgtatagtctcaacgcttcacgcaacaatcgctgtcactttagcaactctctcgattcaagattggtcttgtcctgtttgtcccattgcttctacatcgtctctccggcagatggaaacgttggcgttttcattgtcgtacatgatctacgatctcatttgtagccactttgatcaagtccttagcattgataatgcggttcatcattctgtttgcattcttggttttgtagctggacttttctaccaaaagtgtggatccgagatggtggcagcactttggataacagagatctcaagtccgtttcttcacctcagggagattcttaaagagattggttatagagacaccgacctaaatcttgcagccgatgtgtgttttgcaacaattttctcgttggccagaatggtgggtggaccttacctagtttacgtaacaatatcagccgataatcccattctcatcaaggcaatggcgttggggttacaacttgtgagcgcattctggttctataaaatcctcaaaatgatgagatacaaatttatcaaaagatcaatgtccaacaaaaaatcggcttagttgaaattccaaaaactctatcatgtaacatttgactcatccttttctatatgtaagttaaatgtgaggaat

SEQ ID NO: 101635 - protein, 231 aa, Arabidopsis thaliana
  peptide (1)..(231): Ceres Seq. ID no. 13608329
MEEEYVRVISITTIGVISWGLIFILVRRIFSSYSFDFSTRIVSTLHATIAVTLATLSIQDWSCPVCPIASTSSLRQMETLAFSLSYMIYDLICSHFDQVLSIDNAVHHSVCILGFVAGLFYQKCGSEMVAALWITEISSPFLHLREILKEIGYRDTDLNLAADVCFATIFSLARMVGGPYLVYVTISADNPILIKAMALGLQLVSAFWFYKILKMMRYKFIKRSMSNKKSA

SEQ ID NO: 101636 - protein, 155 aa, Arabidopsis thaliana
  peptide (1)..(155): Ceres Seq. ID no. 13608330
METLAFSLSYMIYDLICSHFDQVLSIDNAVHHSVCILGFVAGLFYQKCGSEMVAALWITEISSPFLHLREILKEIGYRDTDLNLAADVCFATIFSLARMVGGPYLVYVTISADNPILIKAMALGLQLVSAFWFYKILKMMRYKFIKRSMSNKKSA

SEQ ID NO: 101637 - protein, 145 aa, Arabidopsis thaliana
  peptide (1)..(145): Ceres Seq. ID no. 13608331
MIYDLICSHFDQVLSIDNAVHHSVCILGFVAGLFYQKCGSEMVAALWITEISSPFLHLREILKEIGYRDTDLNLAADVCFATIFSLARMVGGPYLVYVTISADNPILIKAMALGLQLVSAFWFYKILKMMRYKFIKRSMSNKKSA

SEQ ID NO: 101638 - DNA, 3082 bp, Arabidopsis thaliana
  misc_feature (1)..(3082): Ceres Seq. ID no. 13608348
  misc_feature (1)..(3082): Ortholog of  Ceres SEQ ID NO 13532807 as cited in SEQ ID NO 53012
  misc_feature (1)..(3082): Ortholog of  Ceres SEQ ID NO 13663060 as cited in SEQ ID NO 60964
  misc_feature (1)..(3082): Ortholog of  Ceres SEQ ID NO 13598532 as cited in SEQ ID NO 65204
  misc_feature (1)..(3082): Ortholog of  Ceres SEQ ID NO 13656849 as cited in SEQ ID NO 65764
  misc_feature (1)..(3082): Ortholog of  Ceres SEQ ID NO 13500573 as cited in SEQ ID NO 67431
  misc_feature (1)..(3082): Ortholog of  Ceres SEQ ID NO 13656501 as cited in SEQ ID NO 69206
acttgacaaaattgaaaaacgcgtctccgagaggaaaatttagagaaaagcttctcgcgatcgcatcgggctcgtagatcgatctcctcctccatccaatcttccgttttcgtattcaccgtccggtaagaccttccggtacttgtgaatcggagaagaggaaggagaaaaattatcgcgttcctggaaattgaatttctagggtttcgtttttttctgaattattctgattctgatttcgtcaagggtgtttttcttaattggttgattgatcgtctttctagttcaattgttgaaaagtaattgaacatctattgaaatctgcttctcgtgatttgattctgggtttcgttgattggtttttttcgaggggtttgtttgttttatccttttttatttctataagatcaatttctcattgagaagaatacgatggcagcagggggtgttgatgtttccagaagttccgttgctgtcaaaaaagactacgacttttacaggaatggttctcgtgatgtgtatgttcgacagagtggtagagatgacgagaggcgtcaaatcaaaaggcctagtgaccatgatctcaggaggaatgatgggcgtcaccgatcacggttggcatatgagaaaggggaactacgggaggaagcagaggttcagagaccctctgagaaaaggaggaagttttcacccatcgtgtggaatgcagaaaaagtgggtagagctccatctagggagaagaccaagtctcctttccctgttccgactacaactgtgatatccaatcaggctgttgctggtaagactacttcaaacgatcaagtgaatgccttgatgtcgccagaacctagttatcttgctccagtgcagccttcagaagccctgctggctgtgaaacatcctgttgatgatttggaggagggtcagttggaggaagaacaggtgatgcaggaggatgtaaaggagggtctgttggaggaagaacaagtgatgcaggaaccaaatataaagacatctaggtgggggacaggtttgacttccccaaaggaggagttaatatctgttaacgtttccaagactaatagatggaacaggagcagtttgacaccggagtgcgaggaagtaatggtgtctgaagaacagcagtgctattcgtctggatctggcagtggacatctcagcgtagagaagcttagtgcagatggaaattctggtcgtgagtattatagttctgatcatgatgagttagaacatgaagatcaagattctttaactccgggagagatgaacatgatgtttgggagcaggtctgtgaatgaatttcagaagctaaacaagataaatgaaggaacatatggaattgtttacaaagcaagggatgagaaaacaaaagagattgttgcgctcaaaaagatcaagatgaaggaagataggttcgaagaagagtatggattccctttgacatcattgagggaaattaacatacttttgtcatgcaatcaccctgcgattgtgaacgtgaaggaggttgtggttggagggaaaaacgataatgatgtttatatggtcatggaacacttagaacacgacctgaggggagtaatggatagaaggaaggaaccttttagcactagcgaagtcaagtgcttgatgatgcagctgttggatggtttgaaatacctccacacaaattggattatccacagggatctgaagccatctaatcttctgatgaacaattgtggggagttaaaaatatgtgattttgggatggcgcgccagtatgggagccctatcaagccttacacccagatggttattacccagtggtacaggccacctgaacttcttctaggagcaaaagagtactctacagcagttgatatgtggtcagtgggttgcattatggctgaactgttgtctcaaaagcctttgttcccgggtaagagtgagcttgaccaacttcagaagatctttgcggtccttggaacaccaaacgaagcaatatggcctgggttctcatcatttccgaatgctaaagccaagtttcctacacagccttacaatatgttacgtaagaagtttccagctatttcatttgtaggtggtcaaattctttctgaacgtggatttgatttgctgaacagtctactaactttggaccctgagaaacgtctaacagtggaagatgctctcaaccatggttggttccatgaagtcccgttaccaaaatccaaagatttcatgccgacatatcctccaaagcggtaactgagaaaaaacgtgctatcatttggacgagaggatgtcaacaaatacacagggaagtcgactggtcgtattttggtattttcctttttactcaaaagacttgctttcatctattcttaactcagttgcgttgctttgttgcctggagattcagggcattctagtgtaccatttattcggattcatgtgtaaatatgagtggtccgtaaaactgaaaggtgtgtttctctcttttcgttaggaccctaatgttattgctatcaagagttgtacacactattgactcacatgctttaatggaagagatctcagtattcactttctctctctagtaattgggttgggatggttattgtttatgtcctcatatttcttctgtgcattgtttttattcacgaggtaaacgcaaagagtttatcacaaacgtgagaatggaagttgacatcagtaagtttattttgattacttatttaccacgctctgttatcaatgttggtttgttgttcgacgtccctttgtctttgaggtgctcgtatttggtctgttggcagtgagaaaaagatgattcatgatgagtttctgtggacataggaggtatggcagtggtttttttcatgttaatccgagaattaagggatttgggataaaaagctatatagaaagaagctaaaataagtttgtcttcaacactataaccctttgtcctcctttctttttaacttctgtaaacagctaagctaaatcaagttcatttcaataacgaataaactagaatcagcattacctttgacgaggccataaacagaaagga

SEQ ID NO: 101639 - protein, 612 aa, Arabidopsis thaliana; identical to SEQ ID NO: 39029
  peptide (1)..(612): Ceres Seq. ID no. 13608349

SEQ ID NO: 101640 - protein, 478 aa, Arabidopsis thaliana; identical to SEQ ID NO: 39030
  peptide (1)..(478): Ceres Seq. ID no. 13608350

SEQ ID NO: 101641 - protein, 441 aa, Arabidopsis thaliana; identical to SEQ ID NO: 39031
  peptide (1)..(441): Ceres Seq. ID no. 13608351

SEQ ID NO: 101642 - DNA, 1503 bp, Arabidopsis thaliana
  misc_feature (1)..(1503): Ceres Seq. ID no. 13608352
  misc_feature (1)..(1503): Ortholog of  Ceres SEQ ID NO 15226223 as cited in SEQ ID NO 65500
cccgaaagcaaagtaagctagcttagctaggtccaagatccaagctttggaattttgtaaattgtctccactcttagccgttttaatggaaactgttccaccatctcccattacatggccagatgggggagctctcactaacgactgggtacatgggcttatgtcgtgtttcgaatggtcttcatggaatctacctccttcccagttaccttcactattgcctgtcaacgtctttgattccctcgtcctcaccgctcataaaatcctccacaaagaacgtaactgcgttcatatcgatgatcttgactctgtatccaacgttgttgtggttggtgacattcatggtcagcttcatgaccttcttttcctattgaaagatactggctttccttgtcaaaaccggtgttatgttttcaacggagactatgtggatcgcggtgcttggggacttgaaaccttccttgttctcttgtcctggaaggttttgatgccggacagagtctacctactccgtggtaatcatgagtcaaagtattgtacatctatgtatggtttcgagaaggaagtgcttacaaaatacggagacaagggaaaacatgtgtaccggaaatgtttgggttgctttgaaggtcttcctttggcttccataatttctggacgtgtttatacagcacatggagggcttttccgcagcccagtcttgcctaagcgaacaacaagggggaaaaagaaccgtcgggtagttcttctggaacctgagccgagctcaatgaaactcggtaccttagatgagttgatgcaagctcgaagatcagttcttgatcctccttgggaaggttcaaacttgataccaggagacgttttatggtctgatccttcaatgactccgggcctttcaccaaatgaacagagaggcattggtcttctttggggtcccgattgtacagaggattttttgaagaaatatgaactgaagttgatcatcagatcacatgaaggtccagatgctagagagaagagaactggtcttggtggaatggacaatggatatacaatagaccacaatgtcgaatccggaaagcttatcactattttcagtgcacctgactatccgcaattccaagcaacagaagagaggtacaaaaacaaaggagcatatattattttgcaggcgcctgatttctcggatcctcaatttcatagtttcgaagctgttaaaccgcgaccaaaggcgcatccatattatgactttgaaaatgtcattgattctgatgatgagatggataagtcagcaatggacaccaataacgaacaaccaaatagctgaccgaagctgaaaaggagtatcttgaattgatgttttttacagttgttgtgattgctcattatttgcaaacataaaatggaatcaaatgtaaagaaaagagatgaagaaaatcatttgtagaattcacatttaagttatgtatggaagatgaagaaataagaaccatcttaaatctc

SEQ ID NO: 101643 - protein, 413 aa, Arabidopsis thaliana
  peptide (1)..(413): Ceres Seq. ID no. 13608353
METVPPSPITWPDGGALTNDWVHGLMSCFEWSSWNLPPSQLPSLLPVNVFDSLVLTAHKILHKERNCVHIDDLDSVSNVVVVGDIHGQLHDLLFLLKDTGFPCQNRCYVFNGDYVDRGAWGLETFLVLLSWKVLMPDRVYLLRGNHESKYCTSMYGFEKEVLTKYGDKGKHVYRKCLGCFEGLPLASIISGRVYTAHGGLFRSPVLPKRTTRGKKNRRVVLLEPEPSSMKLGTLDELMQARRSVLDPPWEGSNLIPGDVLWSDPSMTPGLSPNEQRGIGLLWGPDCTEDFLKKYELKLIIRSHEGPDAREKRTGLGGMDNGYTIDHNVESGKLITIFSAPDYPQFQATEERYKNKGAYIILQAPDFSDPQFHSFEAVKPRPKAHPYYDFENVIDSDDEMDKSAMDTNNEQPNS

SEQ ID NO: 101644 - protein, 388 aa, Arabidopsis thaliana
  peptide (1)..(388): Ceres Seq. ID no. 13608354
MSCFEWSSWNLPPSQLPSLLPVNVFDSLVLTAHKILHKERNCVHIDDLDSVSNVVVVGDIHGQLHDLLFLLKDTGFPCQNRCYVFNGDYVDRGAWGLETFLVLLSWKVLMPDRVYLLRGNHESKYCTSMYGFEKEVLTKYGDKGKHVYRKCLGCFEGLPLASIISGRVYTAHGGLFRSPVLPKRTTRGKKNRRVVLLEPEPSSMKLGTLDELMQARRSVLDPPWEGSNLIPGDVLWSDPSMTPGLSPNEQRGIGLLWGPDCTEDFLKKYELKLIIRSHEGPDAREKRTGLGGMDNGYTIDHNVESGKLITIFSAPDYPQFQATEERYKNKGAYIILQAPDFSDPQFHSFEAVKPRPKAHPYYDFENVIDSDDEMDKSAMDTNNEQPNS

SEQ ID NO: 101645 - protein, 279 aa, Arabidopsis thaliana
  peptide (1)..(279): Ceres Seq. ID no. 13608355
MPDRVYLLRGNHESKYCTSMYGFEKEVLTKYGDKGKHVYRKCLGCFEGLPLASIISGRVYTAHGGLFRSPVLPKRTTRGKKNRRVVLLEPEPSSMKLGTLDELMQARRSVLDPPWEGSNLIPGDVLWSDPSMTPGLSPNEQRGIGLLWGPDCTEDFLKKYELKLIIRSHEGPDAREKRTGLGGMDNGYTIDHNVESGKLITIFSAPDYPQFQATEERYKNKGAYIILQAPDFSDPQFHSFEAVKPRPKAHPYYDFENVIDSDDEMDKSAMDTNNEQPNS

SEQ ID NO: 101646 - DNA, 1609 bp, Arabidopsis thaliana
  misc_feature (1)..(1609): Ceres Seq. ID no. 13608356
  misc_feature (1)..(1609): Ortholog of  Ceres SEQ ID NO 12627133 as cited in SEQ ID NO 68031
tctcttttctttcactctctgttttgttctttatcgcctgagaattgatgtggatttttcaaatttcagttaatcttagctaattgacttgaaattcaatgaaaagattcaatttttggtttaattaagcaagttgtgagatagatgaacgaatttgttgaccaattgcgttttacaggatacgtttgttgctctatgaagtcttatagattatctgaacttagttcttcccaagttgatagtttgaagtcacgccctcgcattgacttctcttctattttcgccactgtgaacccgattatcgatgctgttcgtagcaatggggataatgctgtcaaagaatacactgaaagatttgacaaagtccagctgaataaagttgtggaagatatgtctgagctttctgttcctgagctcgattccaatgtcaaagaagcgtttgatgttgcgtatgacaacatatatgcgtttcacttagcccaaaagtcaactgagaaaagcgttgagaatatgaaaggtgtcagatgtaaaagggtgtcaagatctattggctctgtaggtctttatgtgcctggtggaacagctgttttgccatcaacggctttgatgcttgctattcctgctcaaattgctggatgtaaaacagttgttcttgcaactccaccaagtaaggatggaagcatttgtaaggaggttctgtattgcgccaagagggctggtgttactcacatactcaaagctggtggagcgcaggctatagctgccatggcctgggggacagattcttgtccaaaggttgagaagatttttggtcctgggaaccagtatgtcacagctgctaagatgattcttcaaaacagcgaggcaatggtctcaatcgatatgcctgctggtccttcagaagtcctagttattgctgacgaacatgctagtccagtttacattgcagcagacttactttctcaggcggagcatggtccagatagtcaagttgttcttgtagttgtgggcgatagtgtagatctcaacgccatcgaagaagaaattgccaagcagtgcaaaagccttcctagaggagagtttgcttcaaaagcactaagtcacagtttcacagtgtttgctcgagatatgattgaggcaatatctttctcaaatctatatgcacccgaacatttgatcatcaatgtcaaagacgctgagaaatgggagggactgattgagaacgcaggctcggttttcataggaccatggactccagagagtgttggggattatgcgagcgggacaaaccacgttcttccaacatatggatatgcaagaatgtacagtggcgtctctctcgactctttcctaaagttcatgactgtacaatctttgacagaggaaggtctgagaaacctcggcccttatgtagcaactatggctgaaatcgaaggtttagatgcacacaagagagccgttactctcagactcaaggatatcgaagccaaacagcttgcataatccaattgagatttatattcagacaaaagaggcaaaaattctttttgtattgtatgaacatatttggtttcctgagatggaataacaataaaataagagatgttgg

SEQ ID NO: 101647 - protein, 452 aa, Arabidopsis thaliana; identical to SEQ ID NO: 25238
  peptide (1)..(452): Ceres Seq. ID no. 13608357

SEQ ID NO: 101648 - protein, 435 aa, Arabidopsis thaliana; identical to SEQ ID NO: 25239
  peptide (1)..(435): Ceres Seq. ID no. 13608358

SEQ ID NO: 101649 - protein, 370 aa, Arabidopsis thaliana; identical to SEQ ID NO: 25240
  peptide (1)..(370): Ceres Seq. ID no. 13608359

SEQ ID NO: 101650 - DNA, 1466 bp, Arabidopsis thaliana
  misc_feature (1)..(1466): Ceres Seq. ID no. 13608387
  misc_feature (1)..(1466): Ortholog of  Ceres SEQ ID NO 14303263 as cited in SEQ ID NO 1224
  misc_feature (1)..(1466): Ortholog of  Ceres SEQ ID NO 13593955 as cited in SEQ ID NO 54278
  misc_feature (1)..(1466): Ortholog of  Ceres SEQ ID NO 13597380 as cited in SEQ ID NO 64054
  misc_feature (1)..(1466): Ortholog of  Ceres SEQ ID NO 12625474 as cited in SEQ ID NO 64169
  misc_feature (1)..(1466): Ortholog of  Ceres SEQ ID NO 13597502 as cited in SEQ ID NO 64681
actttttttctttctttctgagtgaaaaacactttagtctcccactctttatattttgtagcttcacagcaaaaattctcttttacttatcagacagataagatcatatagcaaatatgttgcaagatagagtttctggttctttgtctagttcgaaaatatctcgatgtgttttgtttctctcactcttttgtttcttcctcttgacgatgcatgcttcagcaaaccgcttacagcgagttccaaatccagggccttccccggcaccagagcctaagccatgtccgagtccagggccaaaccccgcaccagcgacaactaagaggacacataacactacgtttccggcgatcttcgcctttggggattcgatcttagacacaggaaataacgattatattttgaccttgatcaaagctaattttcttccatatggcatgaattttccagataaagttcccaccggcagattttgcaacggcaaaatcccttcggactttatcgcggattatataggagtaaaaccagttgtaccggcatatttgagaccgggactgacccaggaagatttgctcactggtgtatcctttgcttcgggtggttctggctatgatcctttgacaccaatcgtagtaagtgcgataccgatgtcaaaacaattgacatactttcaagaatacatagagaaagtgaaaggctttgtgggaaaagagaaagccgagcacataatatccaaaggcctagccattgtggtagcgggcagcgacgatctggccaatacctactatggtgaacacttagaggaattcttgtatgacatagatacatatacctcttttatggctagctctgctgcaagttttgctatgcaactatatgaatcaggagcaaaaaaaataggatttattggtgtttctccgatcgggtgtataccgatacagagaaccacaagaggaggacttaaaagaaaatgtgctgatgaactcaactttgcagctcagctttttaattccaaactctccacaagtttgaacgaattggctaaaaccatgaaaaataccacattggtgtatattgacatctactcttctttcaatgatatgattcaaaaccccaaaaaatatggatttgatgagattgatagaggatgttgcgggacggggctactcgaattaggtccgctttgcaacaaatatacatcacttctttgcaagaatgtgtcttcttttatgttttgggactcttaccatccaacggaaagagcttataaaatcttaagccaaaagtttgtagagaatgacatgggccctttctatgacaattaaatgtaaaatttaagatgacacatttgagatgaaatttggctaaataaaagctgtatctcatttggattagtgtcttcaaaaacatgtttattgtattatacatataaattgacatggagcgataaattgagttgtttttct

SEQ ID NO: 101651 - protein, 402 aa, Arabidopsis thaliana
  peptide (1)..(402): Ceres Seq. ID no. 13608388
MLQDRVSGSLSSSKISRCVLFLSLFCFFLLTMHASANRLQRVPNPGPSPAPEPKPCPSPGPNPAPATTKRTHNTTFPAIFAFGDSILDTGNNDYILTLIKANFLPYGMNFPDKVPTGRFCNGKIPSDFIADYIGVKPVVPAYLRPGLTQEDLLTGVSFASGGSGYDPLTPIVVSAIPMSKQLTYFQEYIEKVKGFVGKEKAEHIISKGLAIVVAGSDDLANTYYGEHLEEFLYDIDTYTSFMASSAASFAMQLYESGAKKIGFIGVSPIGCIPIQRTTRGGLKRKCADELNFAAQLFNSKLSTSLNELAKTMKNTTLVYIDIYSSFNDMIQNPKKYGFDEIDRGCCGTGLLELGPLCNKYTSLLCKNVSSFMFWDSYHPTERAYKILSQKFVENDMGPFYDN

SEQ ID NO: 101652 - protein, 371 aa, Arabidopsis thaliana
  peptide (1)..(371): Ceres Seq. ID no. 13608389
MHASANRLQRVPNPGPSPAPEPKPCPSPGPNPAPATTKRTHNTTFPAIFAFGDSILDTGNNDYILTLIKANFLPYGMNFPDKVPTGRFCNGKIPSDFIADYIGVKPVVPAYLRPGLTQEDLLTGVSFASGGSGYDPLTPIVVSAIPMSKQLTYFQEYIEKVKGFVGKEKAEHIISKGLAIVVAGSDDLANTYYGEHLEEFLYDIDTYTSFMASSAASFAMQLYESGAKKIGFIGVSPIGCIPIQRTTRGGLKRKCADELNFAAQLFNSKLSTSLNELAKTMKNTTLVYIDIYSSFNDMIQNPKKYGFDEIDRGCCGTGLLELGPLCNKYTSLLCKNVSSFMFWDSYHPTERAYKILSQKFVENDMGPFYDN

SEQ ID NO: 101653 - protein, 295 aa, Arabidopsis thaliana
  peptide (1)..(295): Ceres Seq. ID no. 13608390
MNFPDKVPTGRFCNGKIPSDFIADYIGVKPVVPAYLRPGLTQEDLLTGVSFASGGSGYDPLTPIVVSAIPMSKQLTYFQEYIEKVKGFVGKEKAEHIISKGLAIVVAGSDDLANTYYGEHLEEFLYDIDTYTSFMASSAASFAMQLYESGAKKIGFIGVSPIGCIPIQRTTRGGLKRKCADELNFAAQLFNSKLSTSLNELAKTMKNTTLVYIDIYSSFNDMIQNPKKYGFDEIDRGCCGTGLLELGPLCNKYTSLLCKNVSSFMFWDSYHPTERAYKILSQKFVENDMGPFYDN

SEQ ID NO: 101654 - DNA, 1061 bp, Arabidopsis thaliana
  misc_feature (1)..(1061): Ceres Seq. ID no. 13608391
  misc_feature (1)..(1061): Ortholog of  Ceres SEQ ID NO 13597679 as cited in SEQ ID NO 65073
atggcaaagagaggggaaagcttgagagacaaacctaaatggagtcttgaaggcatgactgctcttgttaccggtggatctaaaggcctcggaaaagctgtggtggaggaactagccatgttgggagcaagagttcacacatgtgccagagacgaaactcagcttcaagaaagcttacgtgaatggcaagcaaaagggttacaagtcaccacttctgtttgcgatgtttcttctcgtgaccagcgagagaaactcatggaaactgtttcctctctcttccaaggaaaactcagcatcctcgtacccaatgtgggaataggtgtactaaagccgacgactgagtgtacagcagaagagttctcatttataatagctacaaatctggagtcaactttccatttctcgcaactcgcgcatcctttattgaaagcctctggttcagggaacattgtgctcatgtcttccgtggctggagttgtaaatttgggtaatacatcaatctatggagcaaccaaaggagccatgaatcagctggcgagaaatttagcatgcgagtgggcgagtgataatataagggctaattctgtttgtccatggttcattacaactccgtcaactaaagatttcctcggtgataaagatgtaaaagaaaaggtggagagtgtgacaccattgagacgtgttggagaggcaaatgaagtatcatcgcttgttgcatttctatgtcttcccgcagcttcttatataacaggtcaaaccatttgcgttgatggaggtttcactattaacggcttctctttgccttaaacacgtatatatgcatatattcatgcttaaatttatgtgattaattagtggtttcactgcatattaattcatacaagttttatatgtaacttatgttgagggagctcactccgttcatgccttctaatgtttggacgaagaactcaatcttttatcttatcggataagaagttacttgtgttcacatttgatgtttgttcgtttccaatcgtattgtgacttttgatatataaaataattattgtatatattct

SEQ ID NO: 101655 - protein, 268 aa, Arabidopsis thaliana
  peptide (1)..(268): Ceres Seq. ID no. 13608392
MAKRGESLRDKPKWSLEGMTALVTGGSKGLGKAVVEELAMLGARVHTCARDETQLQESLREWQAKGLQVTTSVCDVSSRDQREKLMETVSSLFQGKLSILVPNVGIGVLKPTTECTAEEFSFIIATNLESTFHFSQLAHPLLKASGSGNIVLMSSVAGVVNLGNTSIYGATKGAMNQLARNLACEWASDNIRANSVCPWFITTPSTKDFLGDKDVKEKVESVTPLRRVGEANEVSSLVAFLCLPAASYITGQTICVDGGFTINGFSLP

SEQ ID NO: 101656 - protein, 250 aa, Arabidopsis thaliana
  peptide (1)..(250): Ceres Seq. ID no. 13608393
MTALVTGGSKGLGKAVVEELAMLGARVHTCARDETQLQESLREWQAKGLQVTTSVCDVSSRDQREKLMETVSSLFQGKLSILVPNVGIGVLKPTTECTAEEFSFIIATNLESTFHFSQLAHPLLKASGSGNIVLMSSVAGVVNLGNTSIYGATKGAMNQLARNLACEWASDNIRANSVCPWFITTPSTKDFLGDKDVKEKVESVTPLRRVGEANEVSSLVAFLCLPAASYITGQTICVDGGFTINGFSLP

SEQ ID NO: 101657 - protein, 229 aa, Arabidopsis thaliana
  peptide (1)..(229): Ceres Seq. ID no. 13608394
MLGARVHTCARDETQLQESLREWQAKGLQVTTSVCDVSSRDQREKLMETVSSLFQGKLSILVPNVGIGVLKPTTECTAEEFSFIIATNLESTFHFSQLAHPLLKASGSGNIVLMSSVAGVVNLGNTSIYGATKGAMNQLARNLACEWASDNIRANSVCPWFITTPSTKDFLGDKDVKEKVESVTPLRRVGEANEVSSLVAFLCLPAASYITGQTICVDGGFTINGFSLP

SEQ ID NO: 101658 - DNA, 954 bp, Arabidopsis thaliana
  misc_feature (1)..(954): Ceres Seq. ID no. 13608399
  misc_feature (1)..(954): Ortholog of  Ceres SEQ ID NO 15170458 as cited in SEQ ID NO 52842
  misc_feature (1)..(954): Ortholog of  Ceres SEQ ID NO 13597679 as cited in SEQ ID NO 65073
gggttctgtggttcataatcagaaatggctaagacaggggaaagcttgagagacaaacctagatggagtcttgtaggcatgaccgctcttgtcaccggtggctcaaaaggcatcggagaagctgtggttgaggaactagctacgttaggggcaagaatccacacatgtgccagagacgaaactcagcttcaagaaagcttacgtaagtggcaagcaaaagggtttcaggttaccacttctgtctgcgacgtttcttctcgtgataaacgagagaagctcatggaaaccgtttccactatcttcgaaggaaaactcaacatacttgtcaacaatgtgggaacgtgtatagtcaaaccgaccttacaacatacagccgaagatttctcatttacaatggcaacgaatctcgagtcagcttttcatctctcgcagctcgcgcatcctttgttgaaagcttctggttcagggagcatcgtgctcatctcctccgtatctggagttgtacatgtcaatggtgcatccatatatggagtatctaaaggagctatgaatcagctaggaagaaacttagcgtgcgagtgggcaagtgacaacataaggactaactctgtgtgtccatggttcatagaaactcctttagttaccgaaagtcttagtaatgaggagtttagaaaagaagtggagagtagaccaccaatgggacgtgttggagaagtaaatgaagtatcatcgcttgtggcatttctttgtcttcctgcagcttcttatattacaggtcaaaccatttgtgttgatggaggtttcactgttaatggtttctctttcaagcctctgccttaagacgtcgattgttttcattttacgttatttttttaacatttacaatttgtttagatatgtaaacataaacacaattacacaaacaaacaaaaaaaattggcgtttggaatgtaa

SEQ ID NO: 101659 - protein, 271 aa, Arabidopsis thaliana; identical to SEQ ID NO: 26384
  peptide (1)..(271): Ceres Seq. ID no. 13608400

SEQ ID NO: 101660 - protein, 253 aa, Arabidopsis thaliana; identical to SEQ ID NO: 26385
  peptide (1)..(253): Ceres Seq. ID no. 13608401

SEQ ID NO: 101661 - protein, 186 aa, Arabidopsis thaliana; identical to SEQ ID NO: 26386
  peptide (1)..(186): Ceres Seq. ID no. 13608402

SEQ ID NO: 101662 - DNA, 872 bp, Arabidopsis thaliana
  misc_feature (1)..(872): Ceres Seq. ID no. 13608405
  misc_feature (1)..(872): Ortholog of  Ceres SEQ ID NO 14301396 as cited in SEQ ID NO 51789
  misc_feature (1)..(872): Ortholog of  Ceres SEQ ID NO 12610031 as cited in SEQ ID NO 55811
  misc_feature (1)..(872): Ortholog of  Ceres SEQ ID NO 12610896 as cited in SEQ ID NO 55861
  misc_feature (1)..(872): Ortholog of  Ceres SEQ ID NO 12619664 as cited in SEQ ID NO 66048
  misc_feature (1)..(872): Ortholog of  Ceres SEQ ID NO 12635952 as cited in SEQ ID NO 0
agaaagaaactgatagtagaaaaaaaaagagagaagaaaaatggtgttgacaatctatgctcctttattcgcttcttcaaagagagctgttgtgacattggtggagaagggagtatcattcgaaactgtcaatgtcgatctcatgaaaggagaacagagacagcctgagtatctcgcgattcagcctttcggtaaaatcccagtcctcgtcgacggagactacaaaatcttcgagtcgcgtgcgatcatgaggtatatagcagagaagtatagatcacaaggacctgatcttttggggaagactattgaagagagaggacaagtagagcaatggttagacgttgaggctacaagttaccatccaccactattggctttaacgctcaacattgtctttgcaccacttatgggtttccctgctgatgagaaagttattaaggagagtgaagagaagcttgcagaagtgcttgatgtctatgaagctcagctttctaagaacgaatacttggctggtgattttgtgagtctagctgatttggctcaccttcctttcaccgagtatcttgttggtcctattgggaaggctcatttgatcaaagataggaagcatgttagcgcttggtgggataagattagtagccgtgctgcgtggaaggaggtttccgctaagtactcactacctgtttaaacaaggagatgttgacttggggggtttgtgtgagctttgtgttctttgagggagttcgttttcgggtcgattgtcttgttgtttcaataagaaacggaactctgtctcatttgttgtctctggtttcttgtattctgtaacttttcaagcttttcaataagagtttaaaatcagagtgactcaa

SEQ ID NO: 101663 - protein, 215 aa, Arabidopsis thaliana; identical to SEQ ID NO: 22480
  peptide (1)..(215): Ceres Seq. ID no. 13608406

SEQ ID NO: 101664 - protein, 181 aa, Arabidopsis thaliana; identical to SEQ ID NO: 22481
  peptide (1)..(181): Ceres Seq. ID no. 13608407

SEQ ID NO: 101665 - protein, 146 aa, Arabidopsis thaliana; identical to SEQ ID NO: 22482
  peptide (1)..(146): Ceres Seq. ID no. 13608408

SEQ ID NO: 101666 - DNA, 1624 bp, Arabidopsis thaliana
  misc_feature (1)..(1624): Ceres Seq. ID no. 13608409
  misc_feature (1)..(1624): Ortholog of  Ceres SEQ ID NO 13594209 as cited in SEQ ID NO 59089
  misc_feature (1)..(1624): Ortholog of  Ceres SEQ ID NO 14302228 as cited in SEQ ID NO 65061
  misc_feature (1)..(1624): Ortholog of  Ceres SEQ ID NO 14308027 as cited in SEQ ID NO 65826
  misc_feature (1)..(1624): Ortholog of  Ceres SEQ ID NO 15169631 as cited in SEQ ID NO 67173
  misc_feature (1)..(1624): Ortholog of  Ceres SEQ ID NO 12614124 as cited in SEQ ID NO 68392
  misc_feature (1)..(1624): Ortholog of  Ceres SEQ ID NO 15176087 as cited in SEQ ID NO 68692
  misc_feature (1)..(1624): Ortholog of  Ceres SEQ ID NO 14307980 as cited in SEQ ID NO 69214
atcacaaatcaaacactttcatacatgagcaatattcaagaaatggagatgatattgatggtctctttgtgcttaacgaccctcattacccttttcttgcttaaacaattcctcaaacgaaccgccaacaaagtgaacttaccaccatctccatggaggcttccgttgattggtaacctccaccagcttagcctccaccctcaccgttccctccattccctaagccttcggtacggaccactcatgctccttcattttggccgtgtccccatactcgtagtatcctccggggaagcagctcaagaggtattgaaaacacacgatcttaagtttgccaaccgcccgagatcaaaagccgttcatgggcttatgaatggggggcgtgatgtggtgtttggtccctatggagaatattggagacagatgaagagtgtatgcattctcaatctgctcacgaacaaaatggttgcgtcctttgagaagataagagaagaagagctaaatgaaatgatcaagaagctggagaaagcaagttcttcttcttcgtcagaaaatctgagcgaactctttgttactctcccaagcgatgttacgagtagaattgccttgggaagaaaacatagtgaggacgaaaccgcaagggatctcaagaagcgagtgaggcagatcatggagcttttaggcgagttcccaatcggggactatgtcccggctttggcatggatagacaggatcaacggtttcaatgctagaataaaggaagtaagtcaagggtttagcgatcttatggacaaagtggtgcaagaacatttagaggcaggtaatcataaagaggactttgtcgatatactgttatcaatcgaaagcgagaagagtattggattccaagctcaaagagacgacatcaaattcatgatattggatatgtttataggagggacgtcaacaagttcaactctactagaatggataatgacggagctgatcagaaatccaaatgttatgaagaaactccaagacgagattcggtcaaccattaggccacatggttcatacataaaagaaaaagatgttgaaaatatgaaatacttgaaagccgtgattaaagaggtgtttcgggtgcatcctcctcttccactaatacttcccagattattaagtgaagatgtcaaagtaaagggatataacatagccgcaggaaccgaggtgataatcaatgcttgggccatccaaagagaccccgcgatatggggaccggatgcagaagaattcaaaccagaaagacatttagattcaactttggattatcatggaaaagatttaaacttcatcccattcggatcagggagaaggatttgtccagggataaatcttgctttgggtttggtagaggtgacagtggccaaccttgtaggccgatttgactggagggccgaggctggaccaaatggggatcaacctgatctaactgaagcttttggtctcgatgtttgccgaaagttccctctcattgcatttccatcttccgttatttaaaatgtttctctttttatcttttaccttgttatgcacttaattaataagaagcattgtaagatataataaaatccttcattttagaaaa

SEQ ID NO: 101667 - protein, 511 aa, Arabidopsis thaliana
  peptide (1)..(511): Ceres Seq. ID no. 13608410
ITNQTLSYMSNIQEMEMILMVSLCLTTLITLFLLKQFLKRTANKVNLPPSPWRLPLIGNLHQLSLHPHRSLHSLSLRYGPLMLLHFGRVPILVVSSGEAAQEVLKTHDLKFANRPRSKAVHGLMNGGRDVVFGPYGEYWRQMKSVCILNLLTNKMVASFEKIREEELNEMIKKLEKASSSSSSENLSELFVTLPSDVTSRIALGRKHSEDETARDLKKRVRQIMELLGEFPIGDYVPALAWIDRINGFNARIKEVSQGFSDLMDKVVQEHLEAGNHKEDFVDILLSIESEKSIGFQAQRDDIKFMILDMFIGGTSTSSTLLEWIMTELIRNPNVMKKLQDEIRSTIRPHGSYIKEKDVENMKYLKAVIKEVFRVHPPLPLILPRLLSEDVKVKGYNIAAGTEVIINAWAIQRDPAIWGPDAEEFKPERHLDSTLDYHGKDLNFIPFGSGRRICPGINLALGLVEVTVANLVGRFDWRAEAGPNGDQPDLTEAFGLDVCRKFPLIAFPSSVI

SEQ ID NO: 101668 - protein, 503 aa, Arabidopsis thaliana
  peptide (1)..(503): Ceres Seq. ID no. 13608411
MSNIQEMEMILMVSLCLTTLITLFLLKQFLKRTANKVNLPPSPWRLPLIGNLHQLSLHPHRSLHSLSLRYGPLMLLHFGRVPILVVSSGEAAQEVLKTHDLKFANRPRSKAVHGLMNGGRDVVFGPYGEYWRQMKSVCILNLLTNKMVASFEKIREEELNEMIKKLEKASSSSSSENLSELFVTLPSDVTSRIALGRKHSEDETARDLKKRVRQIMELLGEFPIGDYVPALAWIDRINGFNARIKEVSQGFSDLMDKVVQEHLEAGNHKEDFVDILLSIESEKSIGFQAQRDDIKFMILDMFIGGTSTSSTLLEWIMTELIRNPNVMKKLQDEIRSTIRPHGSYIKEKDVENMKYLKAVIKEVFRVHPPLPLILPRLLSEDVKVKGYNIAAGTEVIINAWAIQRDPAIWGPDAEEFKPERHLDSTLDYHGKDLNFIPFGSGRRICPGINLALGLVEVTVANLVGRFDWRAEAGPNGDQPDLTEAFGLDVCRKFPLIAFPSSVI

SEQ ID NO: 101669 - protein, 497 aa, Arabidopsis thaliana; identical to SEQ ID NO: 96730
  peptide (1)..(497): Ceres Seq. ID no. 13608412

SEQ ID NO: 101670 - DNA, 953 bp, Arabidopsis thaliana
  misc_feature (1)..(953): Ceres Seq. ID no. 13608423
  misc_feature (1)..(953): Ortholog of  Ceres SEQ ID NO 14305591 as cited in SEQ ID NO 0
atgtttgtgatagtaattcgtcatcctgaagtgaagtgggctgagactaccgagaagattttcctcactgtagtattagctgatactaaggataccaaggttaacctagacccagaaggagtctttgatttctctgcgaaagttggtccagaaaaccacgtttatgagctcaaactggaacttgccgataaagtcaatgttgaggaaagcaaaatcaacattggagagagaagcatattctgcataattgagaaagcagagccggaaaggtggaataagctactccgtgtgaagaagcccccacactatgtcaaggttgattgggacaagtgggttgatgaggacgatgaaggcagtgctggtgccgcagatatggatatggcaggaatggaaggaatgggaggaatgggaggcatgggcggcatgggaggaatgggtggaatgggaggaatgggtggaatgggaggaatggaaggaatggatttctcgatatacctagctctgagaaatgacctcatacttgatccttgcttcgtgcagaaattaatgggtggaatgggtggaatgggtggaatgggcggactcgaagggctcggtggaatgggaggcatgggtggaatgggaggcatgggtggtatgggaggcatggaagagtttgaagacagtgatgatgaagaagagacagcaaaatcaggagacaagaaggatgatgccgttaaggaggaaggtcttgcgacagagaaggcaccagcggcagaagaaacaacatctgttaaggaagacaagtgaagactctgttctagagatgatgaaaaaccatatggtattattagcttttcaggtttatgaaaccctctgaattacttcctcttttatatgaatgttgttggtactctgttttctttctatggatttgatcttggtttaagtttcttctaccttttgttttgggt

SEQ ID NO: 101671 - protein, 262 aa, Arabidopsis thaliana
  peptide (1)..(262): Ceres Seq. ID no. 13608424
MFVIVIRHPEVKWAETTEKIFLTVVLADTKDTKVNLDPEGVFDFSAKVGPENHVYELKLELADKVNVEESKINIGERSIFCIIEKAEPERWNKLLRVKKPPHYVKVDWDKWVDEDDEGSAGAADMDMAGMEGMGGMGGMGGMGGMGGMGGMGGMGGMEGMDFSIYLALRNDLILDPCFVQKLMGGMGGMGGMGGLEGLGGMGGMGGMGGMGGMGGMEEFEDSDDEEETAKSGDKKDDAVKEEGLATEKAPAAEETTSVKEDK

SEQ ID NO: 101672 - protein, 138 aa, Arabidopsis thaliana
  peptide (1)..(138): Ceres Seq. ID no. 13608425
MDMAGMEGMGGMGGMGGMGGMGGMGGMGGMGGMEGMDFSIYLALRNDLILDPCFVQKLMGGMGGMGGMGGLEGLGGMGGMGGMGGMGGMGGMEEFEDSDDEEETAKSGDKKDDAVKEEGLATEKAPAAEETTSVKEDK

SEQ ID NO: 101673 - protein, 136 aa, Arabidopsis thaliana
  peptide (1)..(136): Ceres Seq. ID no. 13608426
MAGMEGMGGMGGMGGMGGMGGMGGMGGMGGMEGMDFSIYLALRNDLILDPCFVQKLMGGMGGMGGMGGLEGLGGMGGMGGMGGMGGMGGMEEFEDSDDEEETAKSGDKKDDAVKEEGLATEKAPAAEETTSVKEDK

SEQ ID NO: 101674 - DNA, 1234 bp, Arabidopsis thaliana
  misc_feature (1)..(1234): Ceres Seq. ID no. 13608438
  misc_feature (1)..(1234): Ortholog of  Ceres SEQ ID NO 13595351 as cited in SEQ ID NO 55934
  misc_feature (1)..(1234): Ortholog of  Ceres SEQ ID NO 13639645 as cited in SEQ ID NO 57488
acttccggcggagaacgatgtctccgataccggaaagggcaaagcttcacatagctatggtggtgtttcagacaggctacgctggtaatcacgtgatcatgagatatgctctaaacttaggagtaagcaagctcgtcttcccactttaccgcaccatcgtcgctttctctgttcttgctccctctgcttacttccttgaaaaaaaagaaagaccggcgatgaaaatcagttttctgattcaattcttccttcttggactcgttggaataacgttaaaccaaggattttacatctttggattggacaatacctcaccaacattcgcatcagcaactgaaaatgttgttcctgctgtttcattcctcatggcagcgttgctcggaatagagaaggtggaatggaagaggaaagatggtatagccaaagtggtggggacaattgtatctgtcgcaggctctttggttataacactctataaaggaccaaccatttaccaaccgagtctgaatatagtgaaccaaactattaaacctgaagaagcagaggaagaaaacaagaactggacgttgggatgtctctgtttgatgggtcactgtttatgttggtcaagttggattgtgttacaatcaccattgcttaaaaagtacccagctcgcttctccttcgtctcctattcttgctttttcgcagtgatacagttctttggaatttcggcttatttcgagagagatctagagaggtggaagataatatcaggaggcgaattatacgcgttactctacactggtttagttggttcagcaatggtgtttgcaatacaaatatatgtagtggaaagaggaggacctctgtttgtatcagcgtatttgcctcttcaaactttgattgctgctgttttagctactttagctcttggtgaacacttttaccttggaggattgataggtgcaatactaatcatgagtggactatacttagttgtgatgggaaagagttgggagaatcaagctctttgccaacaacaacaacacatgatttcttcagcagcatcagattttggtgatgaagaagactaccataataataaaccaagatctcctattagtcaaccattaatttcttcctaaattttgttagatcctatttatgtcttaaattcctagttcctactctcttcctcattaaaatcgaaatggacccggttgacgaaatagagataaaaataaatttggtt

SEQ ID NO: 101675 - protein, 374 aa, Arabidopsis thaliana
  peptide (1)..(374): Ceres Seq. ID no. 13608439
FRRRTMSPIPERAKLHIAMVVFQTGYAGNHVIMRYALNLGVSKLVFPLYRTIVAFSVLAPSAYFLEKKERPAMKISFLIQFFLLGLVGITLNQGFYIFGLDNTSPTFASATENVVPAVSFLMAALLGIEKVEWKRKDGIAKVVGTIVSVAGSLVITLYKGPTIYQPSLNIVNQTIKPEEAEEENKNWTLGCLCLMGHCLCWSSWIVLQSPLLKKYPARFSFVSYSCFFAVIQFFGISAYFERDLERWKIISGGELYALLYTGLVGSAMVFAIQIYVVERGGPLFVSAYLPLQTLIAAVLATLALGEHFYLGGLIGAILIMSGLYLVVMGKSWENQALCQQQQHMISSAASDFGDEEDYHNNKPRSPISQPLISS

SEQ ID NO: 101676 - protein, 369 aa, Arabidopsis thaliana
  peptide (1)..(369): Ceres Seq. ID no. 13608440
MSPIPERAKLHIAMVVFQTGYAGNHVIMRYALNLGVSKLVFPLYRTIVAFSVLAPSAYFLEKKERPAMKISFLIQFFLLGLVGITLNQGFYIFGLDNTSPTFASATENVVPAVSFLMAALLGIEKVEWKRKDGIAKVVGTIVSVAGSLVITLYKGPTIYQPSLNIVNQTIKPEEAEEENKNWTLGCLCLMGHCLCWSSWIVLQSPLLKKYPARFSFVSYSCFFAVIQFFGISAYFERDLERWKIISGGELYALLYTGLVGSAMVFAIQIYVVERGGPLFVSAYLPLQTLIAAVLATLALGEHFYLGGLIGAILIMSGLYLVVMGKSWENQALCQQQQHMISSAASDFGDEEDYHNNKPRSPISQPLISS

SEQ ID NO: 101677 - protein, 356 aa, Arabidopsis thaliana; identical to SEQ ID NO: 23462
  peptide (1)..(356): Ceres Seq. ID no. 13608441

SEQ ID NO: 101678 - DNA, 1294 bp, Arabidopsis thaliana
  misc_feature (1)..(1294): Ceres Seq. ID no. 13608446
  misc_feature (1)..(1294): Ortholog of  Ceres SEQ ID NO 15172948 as cited in SEQ ID NO 51777
  misc_feature (1)..(1294): Ortholog of  Ceres SEQ ID NO 12784416 as cited in SEQ ID NO 61324
atattccaaaattaaagagaatttaatttattgttttccttccagaaaaatattaatattctttctaaactaaaaaatggagtcttcaaatagcacagaagcagagacatagagcgggaacgcgtttagtcacagctttcttctcctttagcttttctctctacacttgcttctctctctctctcctttgggttatccttcttgagatctgtgcttgcgtttcttcttcattcgacgacactttatctcgggagatttcagatttgtcgatttgttcagcaatggcgccaccgattgaggtttctaccaaaagctacgttgagaaacatgtttcacttcctactcttaatgagaggatactttcgtccatgagtcacagatcagtagctgcacacccatggcatgatctcgagataggacctgaagccccaattatcttcaattgtgtggttgagataggaaaagggagcaaggtgaaatatgaactcgacaaaactacgggtctcattaaggtcgaccgtattctttactcatctgtcgtatacccacacaactatgggttcattccgcgtaccctttgtgaggacagtgaccctattgatgttcttgtcattatgcaggaaccggtgatcccaggatgctttcttcgggccaaagctattggtctgatgccaatgattgatcagggtgagaaagacgacaagatcattgctgtctgcgctgacgatccagagtatcgccattacaacgacatcagtgagcttccgcctcatcgtatggctgagatccgccgtttctttgaagactataagaaaaacgagaacaaggaagtagccgttaacgacttccttccggcaactgcagcctacgacgcagttcagcattccatggatctctatgcagactacgtcgtggagaacctaagacgttgaatcaccacctcaagcaatggaatgaaagctcacaactgcattattcacaaatataaatatacatataaatgtcaggcttctcaaaggatatatttgttgtgtatgtcctctgatgaatccggtagatgatgccgataattcttttttttttttgtcgtatgaaaccgataatcaaagactaaaacagggatttttctcatttgtggtcatcactttttaaattttggtgtcatttctcatcttaatcaatttgtttttgagttttattcttctattagatcttttatacatcaaagaatagatgaagattcctccctaaaaccttatagtatgtcatttattcacaatatgttatacgtgtt

SEQ ID NO: 101679 - protein, 216 aa, Arabidopsis thaliana
  peptide (1)..(216): Ceres Seq. ID no. 13608447
MAPPIEVSTKSYVEKHVSLPTLNERILSSMSHRSVAAHPWHDLEIGPEAPIIFNCVVEIGKGSKVKYELDKTTGLIKVDRILYSSVVYPHNYGFIPRTLCEDSDPIDVLVIMQEPVIPGCFLRAKAIGLMPMIDQGEKDDKIIAVCADDPEYRHYNDISELPPHRMAEIRRFFEDYKKNENKEVAVNDFLPATAAYDAVQHSMDLYADYVVENLRR

SEQ ID NO: 101680 - protein, 187 aa, Arabidopsis thaliana
  peptide (1)..(187): Ceres Seq. ID no. 13608448
MSHRSVAAHPWHDLEIGPEAPIIFNCVVEIGKGSKVKYELDKTTGLIKVDRILYSSVVYPHNYGFIPRTLCEDSDPIDVLVIMQEPVIPGCFLRAKAIGLMPMIDQGEKDDKIIAVCADDPEYRHYNDISELPPHRMAEIRRFFEDYKKNENKEVAVNDFLPATAAYDAVQHSMDLYADYVVENLRR

SEQ ID NO: 101681 - DNA, 2039 bp, Arabidopsis thaliana
  misc_feature (1)..(2039): Ceres Seq. ID no. 13608467
  misc_feature (1)..(2039): Ortholog of  Ceres SEQ ID NO 12566921 as cited in SEQ ID NO 0
aatctctctctctctccctctcccaaaatctcacgatgcaacctcagccgcatatttctccgaacaccgcaactgccgcgatctcagccgcgcttgaatctcagcgcagtagaaaaaaccgaggaagttacaattgcggtagatgtggtcaacctaagaaaggccatgtctgtcttttaactgctccacctgatattcccactactccgatcgcttctgagccagtgagctgcatctccgccgccgcatcttcttcccgttctactgtcttatctttaacagcggcgccgtcatcgcgacagaccttcactcacttacgccgagctttatcgttcgatgacgtcgatgcgcgtaattcactcgatgaatccgatctggatgctgcatcgatggatctggatctacaattggatacggatattgttcagcctgggaggtttcatgcggtgggtttatgggaggtgcttaagcggctacctccgtctagtttactgatggcggctagggtttgcaaaggatggagagagacatcgaggaagatgtggaaagcggctgaggagcttcggattagggttccggagagagctcagattggatacattggatccttattacaaaaatgtcctcgacttattagactctcacttaaaatcgagagtgattttgacgcgacgactctggcttgcattgcattttcttgtcctaacctggaggttttggagattacaacttcgggtgcagctgtcaataggatttctggggatgagctgagtcggtttgttgctaataaacgaggactaacaagccttaagatggaaggatgttccaatttgggaggattttccctctcttcatcaagcctctccactctttggctctcggatcttcattctctctcaaagatgatcttcaactgtccaaatcttacggaaatatcacttgaattttctcgccaagaagatgattcaactgatcttgtaacaatggttgatggtttgggaaggacttgcactagattgcagaacatccatatagcctctttgaagctttcacatactgttgtactttctcttactgctgtgaatttcaggtatttgagaatgctctcgctagttcttggaataaatatcactgatgcatctgtagctgccatttcctcaggttacaaaaaccttgaactgcttgatctgagtggttccagcattactgatactggcctcgggatgatctgcgatgtcttacctgatacactctcaaaattacttgttgctctttgtcccaacattacatcaagtggcattcaatttgctactgctcaattgccccttcttgagctgatggattgtggcatgactgtctctgatcccaactcagataatccgacctttgtagagaatccaagtccacataaaacaccaggctacaatcaaaagatgtttatcaaacataaacggctgaagaaacttagtttgtggggatgctccagtttggacgctttgttcctaaactgcccagagctcatggacttgaacttgaacttatgcagtaatttgcatccggagagtctggtgctacaatgtccaaagttacaacttgtgtacgcatcaggatgtcaaggcctattgaccggagctatccgaaaacaggtttctgaaaacttctcggctggtgagaaccatatgccacggaaacgcttggctgatgcatctaaaaggattcaagcttaagctttaccttcattataccaagaaacaagggaagatggtatttatgcagggaagagaaggaagttggagaaagaaatgtgtaccattatacattaataatccttttattggactcgtcacaattttcgtctaccatatttatatttactgtactgtgtacatcagattatgttggatcacgttctcttctgttgtttcacttatcaactttacatgtttatcattgttctccaattgcttcgaataaattgtatgataacattctgtatttgtttaaattatatactactagagtactaggggtattttctt

SEQ ID NO: 101682 - protein, 574 aa, Arabidopsis thaliana
  peptide (1)..(574): Ceres Seq. ID no. 13608468
SLSLSLSQNLTMQPQPHISPNTATAAISAALESQRSRKNRGSYNCGRCGQPKKGHVCLLTAPPDIPTTPIASEPVSCISAAASSSRSTVLSLTAAPSSRQTFTHLRRALSFDDVDARNSLDESDLDAASMDLDLQLDTDIVQPGRFHAVGLWEVLKRLPPSSLLMAARVCKGWRETSRKMWKAAEELRIRVPERAQIGYIGSLLQKCPRLIRLSLKIESDFDATTLACIAFSCPNLEVLEITTSGAAVNRISGDELSRFVANKRGLTSLKMEGCSNLGGFSLSSSSLSTLWLSDLHSLSKMIFNCPNLTEISLEFSRQEDDSTDLVTMVDGLGRTCTRLQNIHIASLKLSHTVVLSLTAVNFRYLRMLSLVLGINITDASVAAISSGYKNLELLDLSGSSITDTGLGMICDVLPDTLSKLLVALCPNITSSGIQFATAQLPLLELMDCGMTVSDPNSDNPTFVENPSPHKTPGYNQKMFIKHKRLKKLSLWGCSSLDALFLNCPELMDLNLNLCSNLHPESLVLQCPKLQLVYASGCQGLLTGAIRKQVSENFSAGENHMPRKRLADASKRIQA

SEQ ID NO: 101683 - protein, 563 aa, Arabidopsis thaliana
  peptide (1)..(563): Ceres Seq. ID no. 13608469
MQPQPHISPNTATAAISAALESQRSRKNRGSYNCGRCGQPKKGHVCLLTAPPDIPTTPIASEPVSCISAAASSSRSTVLSLTAAPSSRQTFTHLRRALSFDDVDARNSLDESDLDAASMDLDLQLDTDIVQPGRFHAVGLWEVLKRLPPSSLLMAARVCKGWRETSRKMWKAAEELRIRVPERAQIGYIGSLLQKCPRLIRLSLKIESDFDATTLACIAFSCPNLEVLEITTSGAAVNRISGDELSRFVANKRGLTSLKMEGCSNLGGFSLSSSSLSTLWLSDLHSLSKMIFNCPNLTEISLEFSRQEDDSTDLVTMVDGLGRTCTRLQNIHIASLKLSHTVVLSLTAVNFRYLRMLSLVLGINITDASVAAISSGYKNLELLDLSGSSITDTGLGMICDVLPDTLSKLLVALCPNITSSGIQFATAQLPLLELMDCGMTVSDPNSDNPTFVENPSPHKTPGYNQKMFIKHKRLKKLSLWGCSSLDALFLNCPELMDLNLNLCSNLHPESLVLQCPKLQLVYASGCQGLLTGAIRKQVSENFSAGENHMPRKRLADASKRIQA

SEQ ID NO: 101684 - protein, 445 aa, Arabidopsis thaliana
  peptide (1)..(445): Ceres Seq. ID no. 13608470
MDLDLQLDTDIVQPGRFHAVGLWEVLKRLPPSSLLMAARVCKGWRETSRKMWKAAEELRIRVPERAQIGYIGSLLQKCPRLIRLSLKIESDFDATTLACIAFSCPNLEVLEITTSGAAVNRISGDELSRFVANKRGLTSLKMEGCSNLGGFSLSSSSLSTLWLSDLHSLSKMIFNCPNLTEISLEFSRQEDDSTDLVTMVDGLGRTCTRLQNIHIASLKLSHTVVLSLTAVNFRYLRMLSLVLGINITDASVAAISSGYKNLELLDLSGSSITDTGLGMICDVLPDTLSKLLVALCPNITSSGIQFATAQLPLLELMDCGMTVSDPNSDNPTFVENPSPHKTPGYNQKMFIKHKRLKKLSLWGCSSLDALFLNCPELMDLNLNLCSNLHPESLVLQCPKLQLVYASGCQGLLTGAIRKQVSENFSAGENHMPRKRLADASKRIQA

SEQ ID NO: 101685 - DNA, 2458 bp, Arabidopsis thaliana
  misc_feature (1)..(2458): Ceres Seq. ID no. 13608475
  misc_feature (1)..(2458): Ortholog of  Ceres SEQ ID NO 13600595 as cited in SEQ ID NO 629
tctcaaatctcaaatctcaaattttttattaaacgcctacatatattactcacacttgttttcagatcataaagttttttcttggatttatatataatgcactaatacatacacacccacatgcttacacacatgttcgaactgtaatcagtaaaagaaacatcagagaggaagagaaggagaagaaaagatggagatgggtcgtctggtcttcgggttgtgtttgattcttattgtgggtacgtttcttgaattctccggcggtgctacggcggcgaagggagtaacgtacgacggacggtctttgataatcgatggacagaggaagcttctcttctccggttccatccactatcctcgcagcacacccgagatgtggccgtctctgataaaaaagacaaaggaaggaggcatcgatgtgatccaaacgtacgttttctggaacctccatgagcctaagcttggacagtatgattttagtggaagaaacgatttagtgaagtttattaaagaaattagatcacaaggtctctatgtctgtctacgtattggacccttcatcgaagccgagtggaattacgggggattgccattttggttacgggatgtacccggtatggtataccgaaccgacaatgagcccttcaagttccacatgcaaaaattcaccgctaagatcgtagatttgatgaaatctgagggcttatatgcttctcaaggaggtccaattattctttctcagatcgagaacgagtatgcaaacgtggagggggctttccatgagaaaggagcatcgtacatcaagtgggcaggtcaaatggcggtcgggcttaagaccggagtgccatggatcatgtgcaagtcgcccgacgctcctgatcccgtgatcaatacctgcaacgggatgaaatgcggcgagacttttcctggaccaaactcacccaataagccgaaaatgtggactgaggattggacttcattctttcaggtttatggaaaagagccttatattagatctgctgaggatattgctttccatgccgctcttttcgttgcaaaaaatggaagttacatcaactattacatgtaccatggtggaacaaactttggaaggacttcatcttcgtatttcattacaggatactatgatcaagctcctctcgacgaatacggtcttttaagacagcctaagtacggtcatttgaaggagcttcacgctgcgataaaatcctctgcaaatcctctgcttcaaggaaagcaaacgattctctccttgggaccaatgcaacaagcttatgtctttgaagacgcgaacaatggatgcgttgcgtttctggtaaacaatgacgctaaagccagtcaaatacaattcagaaacaatgcgtatagcttgagtcccaagtcaattggtattcttcagaactgcaaaaacctaatttatgaaactgcaaaagtgaatgtgaagatgaatacgagagttacaacgccggttcaagtgttcaacgttcccgataactggaatttgtttagagaaacaatccctgcattcccaggcacatctttgaagacaaatgctttgttggaacacactaatttgacaaaggacaaaactgattatctttggtacacttcaagctttaagctggattcaccctgcacgaacccgtctatctacacagaatcatcaggacatgttgtccacgtgttcgtcaacaatgcactagcaggatctggacatggaagcagagacataagggtagttaaactacaagctccggttagcttaatcaatggacaaaacaatatatcgatcctcagcggcatggttggtctaccggactctggagcttacatggagaggagatcttatggactaaccaaagtacaaattagctgtggcgggacaaaacccatcgatttgagtagatctcaatggggttactcggtgggtttgcttggagagaaagttaggttatatcaatggaagaatttaaatagagtgaagtggagtatgaataaagctggactaattaagaaccgccccctcgcttggtacaagacaacgtttgatgggccgaatggagatgggcccgtgggcctacacatgtcgagtatgggtaaaggagaaatttgggtgaatggtgaaagcattggtcgttattgggtctcgtttctcacccctgctggacaaccttctcaatctatatatcatattcctcgggcgttcttaaaaccatctggaaatttattggtggtatttgaagaggaaggtggtgatcctcttgggatatctttgaatacaatatcggttgttggttcgagtcaagctcaatctcaattctcctgaagattatttttttaaaaatggtttttgggtaattgggggtgttttataaaccaaacaatacattatattgaaatgatacaatacacaaattgaatgaaatatacaggtttc

SEQ ID NO: 101686 - protein, 718 aa, Arabidopsis thaliana; identical to SEQ ID NO: 39984
  peptide (1)..(718): Ceres Seq. ID no. 13608476

SEQ ID NO: 101687 - protein, 716 aa, Arabidopsis thaliana; identical to SEQ ID NO: 39985
  peptide (1)..(716): Ceres Seq. ID no. 13608477

SEQ ID NO: 101688 - protein, 657 aa, Arabidopsis thaliana; identical to SEQ ID NO: 39986
  peptide (1)..(657): Ceres Seq. ID no. 13608478

SEQ ID NO: 101689 - DNA, 1381 bp, Arabidopsis thaliana
  misc_feature (1)..(1381): Ceres Seq. ID no. 13608479
  misc_feature (1)..(1381): Ortholog of  Ceres SEQ ID NO 15178181 as cited in SEQ ID NO 58740
  misc_feature (1)..(1381): Ortholog of  Ceres SEQ ID NO 12614739 as cited in SEQ ID NO 68587
gacatatatttatcttcttgaaaagcgaatgatgtctataaattgttttcgaacagcgaaggctccgcttcaatcatttgtagcagtaagaacgaattcgagacctagaaattcatcgaaccgtctcgtttctgtattcggacgcaagtcttcttctccttcatttgttactctcagagttgtttcatcgatggcttacgagaaagagcttgatgctgctaagaaagctgcttcactcgctgctcgtctctgtcagaaagttcaaaaggctttgttgcaatcagatgtgcaatcaaaatctgataaaagtccagtgaccgttgctgattatggttcacaagcagttgttagtttagtcttagaaaaagagctcagttctgaacccttttcattggtggctgaagaggactcaggcgatctacgcaaggatggttctcaggatactctggagcgcatcacaaaactcgtgaacgacactttggctaccgaggaatcgtttaatggctctactttgtctactgatgatctacttagagccattgactgtggaacatctgaaggtggtccaaatggtcgacactgggtcttggatccaattgatggcactaaaggatttctgaggggagatcaatacgcagtagcactaggattgctcgaggaagggaaagtagttttaggtgtgcttgcttgtccaaacttgccgttagcatccatagcaggaaacaacaagaacaaatcttcgtcagacgaaattggatgcctcttctttgctacaattggttcagggacatatatgcagctcctagattcaaaatcttctcctgtaaaagtgcaagtctctagtgttgagaatcctgaagaggcatcgttcttcgagtcattcgaaggagctcactctctacatgacttatccagctccattgccaataaactcggtgtcaaagctccaccagtccgtattgatagccaagcaaagtatggagctttatcaagaggagatggagctatatacttacggtttcctcataaaggataccgcgaaaagatttgggaccatgtcgctggtgctatagttgttacagaggcgggtggaatagtgacagatgcagcaggaaagccactggatttctcgaaagggaagtatcttgatttggacacaggcattatcgttgctaacgagaagctaatgcctctgcttttgaaagcagttcgtgactccatagctgagcaagagaaagcttcagctctctgatttgtttttttctctcgtacgttctttgtttctctgtaactgttgtttcattttctttcaccgaatttcaccagtgagaatttcttccattttcgaaaaagaaataaaaatgaaattctgttttgggct

SEQ ID NO: 101690 - protein, 416 aa, Arabidopsis thaliana
  peptide (1)..(416): Ceres Seq. ID no. 13608480
TYIYLLEKRMMSINCFRTAKAPLQSFVAVRTNSRPRNSSNRLVSVFGRKSSSPSFVTLRVVSSMAYEKELDAAKKAASLAARLCQKVQKALLQSDVQSKSDKSPVTVADYGSQAVVSLVLEKELSSEPFSLVAEEDSGDLRKDGSQDTLERITKLVNDTLATEESFNGSTLSTDDLLRAIDCGTSEGGPNGRHWVLDPIDGTKGFLRGDQYAVALGLLEEGKVVLGVLACPNLPLASIAGNNKNKSSSDEIGCLFFATIGSGTYMQLLDSKSSPVKVQVSSVENPEEASFFESFEGAHSLHDLSSSIANKLGVKAPPVRIDSQAKYGALSRGDGAIYLRFPHKGYREKIWDHVAGAIVVTEAGGIVTDAAGKPLDFSKGKYLDLDTGIIVANEKLMPLLLKAVRDSIAEQEKASAL

SEQ ID NO: 101691 - protein, 407 aa, Arabidopsis thaliana
  peptide (1)..(407): Ceres Seq. ID no. 13608481
MMSINCFRTAKAPLQSFVAVRTNSRPRNSSNRLVSVFGRKSSSPSFVTLRVVSSMAYEKELDAAKKAASLAARLCQKVQKALLQSDVQSKSDKSPVTVADYGSQAVVSLVLEKELSSEPFSLVAEEDSGDLRKDGSQDTLERITKLVNDTLATEESFNGSTLSTDDLLRAIDCGTSEGGPNGRHWVLDPIDGTKGFLRGDQYAVALGLLEEGKVVLGVLACPNLPLASIAGNNKNKSSSDEIGCLFFATIGSGTYMQLLDSKSSPVKVQVSSVENPEEASFFESFEGAHSLHDLSSSIANKLGVKAPPVRIDSQAKYGALSRGDGAIYLRFPHKGYREKIWDHVAGAIVVTEAGGIVTDAAGKPLDFSKGKYLDLDTGIIVANEKLMPLLLKAVRDSIAEQEKASAL

SEQ ID NO: 101692 - protein, 406 aa, Arabidopsis thaliana; identical to SEQ ID NO: 78394
  peptide (1)..(406): Ceres Seq. ID no. 13608482

SEQ ID NO: 101693 - DNA, 1387 bp, Arabidopsis thaliana
  misc_feature (1)..(1387): Ceres Seq. ID no. 13608483
  misc_feature (1)..(1387): Ortholog of  Ceres SEQ ID NO 14302154 as cited in SEQ ID NO 0
attgtttcagaaaagctttaacctaatttcacttcgtctctctctcgcgctcccaatttctccgccggcgggaaaaccatgtcgcacttcggaaggtcaggtccaccggatatcagcgacacctactcacttctcgtccttaacatcaccttccgtacgactgctgatgatctctatcctctattcgcaaagtatggaaaggtcgttgatgtgtttattcccagagatcgaaggactggtgattcgcgtggttttgcgtttgttcggtataagtataaagacgaagctcacaaagcagtggaaaggcttgatggaagagttgttgatggcagagaaataactgttcagtttgcgaaatatgggccaaatgctgaaaaaatttccaaaggaagagttgtggaaccaccgccgaagtcacgaagatctagaagccgtagtcctaggcggagtcgtagtcctaggaggagccgtagcccgcctagacgtcgtagtcccagaagaagccgcagtcctcgtaggaggtcccgagatgactatagggaaaaagactaccggaagcggagcaggagcagaagctatgacaggcgtgaaaggcatgaggagaaggatagagatcatcgtcgtcgcactaggtctcgtagtgccagcccagatgaaaaacgcagagtcagaggccgttatgataatgagagccgcagtcacagtcgttccttgagtgcatctcctgctcgccgcagccctagaagttcctccccacagaaaacctctcctgctagagaagtttctcctgataagcgtagcaatgagaggtctccatctcctcgtcgcagcctcagcccaagaagccctgctttgcaaaaggcctctccttctaaggagatgtctcctgaaaggcgtagcaatgagaggtccccatctcctggtagccctgctcctctgcgcaaagttgatgctgcttctcgaagtcaatctccttatgctgcggaatgactgcagccacttgtgaaagtgatacggtgtatgatgaaaaacacgtttgcttgtactgatgatgtttcatcattaagcactggaacgtctaccctctgtagtattacttgctttccgtaggtgccctcaaactactgagtactgactgtatctttgtttcctgttatcgttctggtttagtgttcatgtgcaagaattattactgtttgaacagcctttttagtctctgttttatttgaatcttctctggtttggaattcatagcattctaactccattcccctggcttgtcttggatttttctagtctggttcgagaaaagaattgactgggaagatggcacaaccatgttgagattgtagctgttgatggctgtttatgaaactgtagatgatcg

SEQ ID NO: 101694 - protein, 303 aa, Arabidopsis thaliana; identical to SEQ ID NO: 35347
  peptide (1)..(303): Ceres Seq. ID no. 13608484

SEQ ID NO: 101695 - DNA, 2758 bp, Arabidopsis thaliana
  misc_feature (1)..(2758): Ceres Seq. ID no. 13608493
  misc_feature (1)..(2758): Ortholog of  Ceres SEQ ID NO 13595870 as cited in SEQ ID NO 62101
  misc_feature (1)..(2758): Ortholog of  Ceres SEQ ID NO 13590241 as cited in SEQ ID NO 63878
  misc_feature (1)..(2758): Ortholog of  Ceres SEQ ID NO 13657939 as cited in SEQ ID NO 66349
atgacgttttatatctcgagctcgttaactccaacccatttctcgaaacccttaaacccttctaataccctcttccccagtcaatttcgaggttctctgtctagtttcgtccgtcgaagaaaaccaacggaagctaaattaagctccaaattcaatctttttccttcacgaagaaatggtttgattacttgttgcagtacatcgagctttgagtctactgagtcttcagtttcacaggaagaagatgctgagtccaatcgtctatttgagaagttacgagaaactgaaagagaacgacttagcaacatggaagagctcgagagaaaggctaatgtacaattagaaaggcagcttgttatggcatcagattggagtagaacattgttaaccatgcgtggcaagttaaaaggaacagaatgggatcctgaaacctctcaccgtatcaattttagtgattttatgaagctcttagattccaacagtgttcaatacatggaatattcaaattacggacagacgatatcagtgatattgccttattataaagatggggagcccctaggagaagaagaagattcgaaaaaggagataattttccgtcgtcacattgtggaccgaatgccaattgatggttggaatgatgtatggaagaagttgcatcagcagatagtaaacgtagaggttttcaatgtagatgtggttccagctgaagtctatactacagttgccacttttgtggtttggtctatgagacttgccctctttgtttcgctttatgtttggatcgacagtatcacgaggccaatctatgccaaactaatcccttgtgatctcggaacccctaccaaaaagataaggcagcccctcaagcgccaagcactcggttccctaggcaagagtcgggcaaaatttatatcagcagaggagaaaactggtgttacttttgatgattttgcgggtcaggagtatataaagagggaattacaagaaattgtgcgaattttaaagaatgatgaggaatttcagaataaaggcatttattgtccgaaaggtgttctgcttcatggacctcccggaacggggaaaactttgttagccaaagctattgctggagaagctggtttacctttcttcgcggcaaatggaaccgactttgttgagatgtttgtaggagtggctgcatctcgtgttaaagatctttttgctagctctcggtcatatgcgccatctataatcttcattgatgagattgatgcaattggaagtaagcgaggtggacccgatattggcgggggaggagcagagagagaacaaggtttgcttcaaatattgactgagatggatggatttaaagttactacatcacaagtattagtcataggtgcaacaaatagattagatatccttgatcctgctctattgagaaaaggtcgttttgacaaaatcataagagttggtttaccgtcaaaagatggtagattggcgatattaaaggtacatgctagaaataaattctttcgatctgaggatgagaaggaggagttgctgcaagaagtagctgagaacacggaagattttaccggagcagaactgcaaaacgttctaaatgaagctggaatcttgacagctagaaaagatttggattacattggaagagaagaactccttgaggcgcttaagcggcaaaaagggacatttgagactggacaagaagatagtactgaagttccagaggaactgaagttgagattggcttaccgagaagcagctgttgctgttcttgcttgttatctcccagatcaatatcgtccaatcagcgagactgacataaactcgattagaagccaaccaaatatgcgttactctgaaacttcaggaagagtttttgcgagaaagtcagattatgtgaactcaataatccgtgcatgtgctcctagagtagttgaagaagagatgtttggaatagaaaacctgtgttggatctctgctaagtctactttagaagcttcacagcgagcggaatttctgattcttcagacgggaatgactgcttttggaaaagcttattaccgaaaccaaagagacctcgttcctaatcttgttccgaaacttgaggcattacgcgatgagtacatgaggtttgctgttgagaaatgctcatcaatcttacaagagtatcaatcagcccttgaagaaatcacagatgtgcttcttgagaaaggagaaatcaaagccgatgaaatctggaacatttacaacacagctccaaggattcctcaaaaacccgtgagacctgtcgatgagtatggagctttaatctatgcgggaagatggggaattcacggtgtatcgcttcctggaagagtaacattttcaccaggaaacattggttttgcaacatttggagctcctcgtcccatggagacacaaatcatcagcgatgacacatggaaactagtggatgagatttgggataaaaaggttgaagaaatcaaagcagaagctgttattcaaattgaagaagaaaagaagaaacctcagattttgatggcaacccatttcttttaaaatcatttttcagttttgcggtctcaagaacatcaaatgaacaaagctctccaggtgaaactttagagattattatgtatcatgtaaaacatagagatctgtagaaaagagtgttagtggaatcacactagtttatttgctgagaaaaatgtcaaatgtgatcatttttataaaatattttgttattttt

SEQ ID NO: 101696 - protein, 855 aa, Arabidopsis thaliana
  peptide (1)..(855): Ceres Seq. ID no. 13608494
MTFYISSSLTPTHFSKPLNPSNTLFPSQFRGSLSSFVRRRKPTEAKLSSKFNLFPSRRNGLITCCSTSSFESTESSVSQEEDAESNRLFEKLRETERERLSNMEELERKANVQLERQLVMASDWSRTLLTMRGKLKGTEWDPETSHRINFSDFMKLLDSNSVQYMEYSNYGQTISVILPYYKDGEPLGEEEDSKKEIIFRRHIVDRMPIDGWNDVWKKLHQQIVNVEVFNVDVVPAEVYTTVATFVVWSMRLALFVSLYVWIDSITRPIYAKLIPCDLGTPTKKIRQPLKRQALGSLGKSRAKFISAEEKTGVTFDDFAGQEYIKRELQEIVRILKNDEEFQNKGIYCPKGVLLHGPPGTGKTLLAKAIAGEAGLPFFAANGTDFVEMFVGVAASRVKDLFASSRSYAPSIIFIDEIDAIGSKRGGPDIGGGGAEREQGLLQILTEMDGFKVTTSQVLVIGATNRLDILDPALLRKGRFDKIIRVGLPSKDGRLAILKVHARNKFFRSEDEKEELLQEVAENTEDFTGAELQNVLNEAGILTARKDLDYIGREELLEALKRQKGTFETGQEDSTEVPEELKLRLAYREAAVAVLACYLPDQYRPISETDINSIRSQPNMRYSETSGRVFARKSDYVNSIIRACAPRVVEEEMFGIENLCWISAKSTLEASQRAEFLILQTGMTAFGKAYYRNQRDLVPNLVPKLEALRDEYMRFAVEKCSSILQEYQSALEEITDVLLEKGEIKADEIWNIYNTAPRIPQKPVRPVDEYGALIYAGRWGIHGVSLPGRVTFSPGNIGFATFGAPRPMETQIISDDTWKLVDEIWDKKVEEIKAEAVIQIEEEKKKPQILMATHFF

SEQ ID NO: 101697 - protein, 753 aa, Arabidopsis thaliana
  peptide (1)..(753): Ceres Seq. ID no. 13608495
MEELERKANVQLERQLVMASDWSRTLLTMRGKLKGTEWDPETSHRINFSDFMKLLDSNSVQYMEYSNYGQTISVILPYYKDGEPLGEEEDSKKEIIFRRHIVDRMPIDGWNDVWKKLHQQIVNVEVFNVDVVPAEVYTTVATFVVWSMRLALFVSLYVWIDSITRPIYAKLIPCDLGTPTKKIRQPLKRQALGSLGKSRAKFISAEEKTGVTFDDFAGQEYIKRELQEIVRILKNDEEFQNKGIYCPKGVLLHGPPGTGKTLLAKAIAGEAGLPFFAANGTDFVEMFVGVAASRVKDLFASSRSYAPSIIFIDEIDAIGSKRGGPDIGGGGAEREQGLLQILTEMDGFKVTTSQVLVIGATNRLDILDPALLRKGRFDKIIRVGLPSKDGRLAILKVHARNKFFRSEDEKEELLQEVAENTEDFTGAELQNVLNEAGILTARKDLDYIGREELLEALKRQKGTFETGQEDSTEVPEELKLRLAYREAAVAVLACYLPDQYRPISETDINSIRSQPNMRYSETSGRVFARKSDYVNSIIRACAPRVVEEEMFGIENLCWISAKSTLEASQRAEFLILQTGMTAFGKAYYRNQRDLVPNLVPKLEALRDEYMRFAVEKCSSILQEYQSALEEITDVLLEKGEIKADEIWNIYNTAPRIPQKPVRPVDEYGALIYAGRWGIHGVSLPGRVTFSPGNIGFATFGAPRPMETQIISDDTWKLVDEIWDKKVEEIKAEAVIQIEEEKKKPQILMATHFF

SEQ ID NO: 101698 - protein, 736 aa, Arabidopsis thaliana
  peptide (1)..(736): Ceres Seq. ID no. 13608496
MASDWSRTLLTMRGKLKGTEWDPETSHRINFSDFMKLLDSNSVQYMEYSNYGQTISVILPYYKDGEPLGEEEDSKKEIIFRRHIVDRMPIDGWNDVWKKLHQQIVNVEVFNVDVVPAEVYTTVATFVVWSMRLALFVSLYVWIDSITRPIYAKLIPCDLGTPTKKIRQPLKRQALGSLGKSRAKFISAEEKTGVTFDDFAGQEYIKRELQEIVRILKNDEEFQNKGIYCPKGVLLHGPPGTGKTLLAKAIAGEAGLPFFAANGTDFVEMFVGVAASRVKDLFASSRSYAPSIIFIDEIDAIGSKRGGPDIGGGGAEREQGLLQILTEMDGFKVTTSQVLVIGATNRLDILDPALLRKGRFDKIIRVGLPSKDGRLAILKVHARNKFFRSEDEKEELLQEVAENTEDFTGAELQNVLNEAGILTARKDLDYIGREELLEALKRQKGTFETGQEDSTEVPEELKLRLAYREAAVAVLACYLPDQYRPISETDINSIRSQPNMRYSETSGRVFARKSDYVNSIIRACAPRVVEEEMFGIENLCWISAKSTLEASQRAEFLILQTGMTAFGKAYYRNQRDLVPNLVPKLEALRDEYMRFAVEKCSSILQEYQSALEEITDVLLEKGEIKADEIWNIYNTAPRIPQKPVRPVDEYGALIYAGRWGIHGVSLPGRVTFSPGNIGFATFGAPRPMETQIISDDTWKLVDEIWDKKVEEIKAEAVIQIEEEKKKPQILMATHFF

SEQ ID NO: 101699 - DNA, 1218 bp, Arabidopsis thaliana
  misc_feature (1)..(1218): Ceres Seq. ID no. 13608507
  misc_feature (1)..(1218): Ortholog of  Ceres SEQ ID NO 13595503 as cited in SEQ ID NO 56643
gttcttcaaagcacaaaccaattctcgaccaaaagatcagaacaaagcgaaggcggattttctggattctcgacggccggagattcatggcgacggctaacggagcaaagagtccgtcgagtatgggccctaaggttttgttttattccatattgctcacacttcagtacggagcccagcctctgatctccaaacgctgcatcagaaaggatgttattgtaacttcatctgttttgacgtgcgagattgttaaggtcatatgtgctctgattctcatggcaagaaatggtagtttgaagggattagcaaaagagtggacgttgatgggatccttgacagcatcaggacttcctgcagccatatatgcactgcagaacagtttgctgcagatctcatacaggagtcttgattccttgacattttcaattctgaatcagacgaaaatctttttcacagcattctttactttcataatactaaggcagaagcaatcaattctacaaataggagccttgtgtctattgatcatggcagcagtccttctaagtgttggtgaaggctctaacaaagattcaagcggcattaatgcggatcaaaagctgttttatggaattatcccggtcttggcagcctctgtcctgtcgggtttagcctcttctctgtgtcaatgggcttctcaggtcaagaagcattcatcatacttaatgacggttgaaatgtctatcgttggaagcctctgtttattagtaagtactcttaaatctccagatggtgaagcgattaaaaaatatggcttctttcatggttggactgctttaacactggtcccagtaataagcaatgctcttggtgggattcttgttggcctagttacatcacatgccggtggtgtaagaaagggatttgtgattgtgtcggcattacttgtgacggcgctacttcaatttgcgtttgaaggaaaaccgccatcatcgtattgcctagttgctcttcctcttgtgatgagtagtatctcaatgtaccagaaatacccatacattgacaagaagaagaagaaggtgtaagaaaaaggttccattcagagaatagctgctagttacaacaatgagatatcttaatgccattattattaactaagtagatgatagtgtgattcttggagcattcaaaagactttgtagtatatttacattcaaagatggaatgagtccaattgag

SEQ ID NO: 101700 - protein, 353 aa, Arabidopsis thaliana; identical to SEQ ID NO: 42219
  peptide (1)..(353): Ceres Seq. ID no. 13608508

SEQ ID NO: 101701 - protein, 325 aa, Arabidopsis thaliana; identical to SEQ ID NO: 21559
  peptide (1)..(325): Ceres Seq. ID no. 13608509

SEQ ID NO: 101702 - protein, 313 aa, Arabidopsis thaliana; identical to SEQ ID NO: 21560
  peptide (1)..(313): Ceres Seq. ID no. 13608510

SEQ ID NO: 101703 - DNA, 1841 bp, Arabidopsis thaliana
  misc_feature (1)..(1841): Ceres Seq. ID no. 13608521
  misc_feature (1)..(1841): Ortholog of  Ceres SEQ ID NO 14304867 as cited in SEQ ID NO 54375
aatctctgtttgtatatatattatctttgcgatttttatccaaatcttccaaagcttagttttttttttttttcaatttctctcttgcgttttcgattttattacaagaactttgttttgggcttcatccatcgttcaaggttcgttgaaaactatgaagaaagttgagttttttatgctccttctctgcttcatcgcagcgtcatctctagtgtctgctgatccaccaacatgtcctgctgatttgggaggcaagtgtagtgattctgatgactggcaaggtgatttcttccctgaaatccccaagattaagtatgagggaccttcgagtaagaacccacttgcttacaggtggtataacgctgaagaagagattcttgggaagaaaatgaaggattggtttagattcagtgttgcgttttggcatactttccgtgggactggaggtgatccatttggtgctgctactaagtattggccttgggaagatggtactaactctgtgtctatggctaagagaagaatgagagctaactttgagttcttgaagaaacttggagttgattggtggtgttttcatgacagagacatagcacctgatggcactacacttgaggaatctaacaaaaacttggatgaagttatcgaactcgccaaagaactccaaaaggggagcaaaatcaaaccattgtggggaacagctcagcttttcttgcatcctcgttatatgcacggaggagcgaccagctctgaagttggagtgtatgcttacgctgctgctcaggtgaagaaagccatggaggtaacacattacttaggtggtgaaaactacgttttttggggtggtcgtgaaggttatcagacactcttgaacactgatatgggaagagagcttgatcatctagccaggttctttgaagctgctgttgcttacaagaagaagattggattcaaaggtaagtctactgcttctttttcttgtcctgtattcagtcttatgggagttattgcacaataatcttctttttatcaggcacgcttttaatcgagcccaagcctcaagaacccaccaagcaccagtatgactgggatgctgcaacagctgccaatttcttgaggaaatatggtcttattgatgagtttaagctcaacattgagtgtaaccatgccacgctctctggtcacacttgtcatcacgagcttgaaactgcaagaattaatggtttacttggcaacattgatgcaaacactggcgatgctcaaactggatgggatacagatcagtttcttacagatgttggagaagcaaccatggttatgatgagtgtcatcaaaaatggtgggattgctccaggcggcttcaactttgacgctaaactgcgaagagagagtacagacgtggaagacttattcattgctcatattagtggaatggatacaatggctcgtggactgagaaatgcagtcaaaatcttggaggagggaagtctaagtgaattggtacgcaagcgatatgcaacttgggactctgagcttgggaagcaaatagaagaaggaaaagctgattttgagtatcttgagaagaaagctaaagagtttggagaaccaaaggtttcttctgctaaacaggaactcgctgagatgattttccaatctgcaatgtaagaagaagaacaagaaggctttttatgtttattaaaagtatcgtcttttttagtttccctcgcatctttgagaagtttgaaaaccaaaacattggaaaataagatgattagagaggttggtttcattatttcagttgatgtactatggtttcacactctaattactttaaattgaat

SEQ ID NO: 101704 - protein, 338 aa, Arabidopsis thaliana
  peptide (1)..(338): Ceres Seq. ID no. 13608522
ISVCIYIIFAIFIQIFQSLVFFFFQFLSCVFDFITRTLFWASSIVQGSLKTMKKVEFFMLLLCFIAASSLVSADPPTCPADLGGKCSDSDDWQGDFFPEIPKIKYEGPSSKNPLAYRWYNAEEEILGKKMKDWFRFSVAFWHTFRGTGGDPFGAATKYWPWEDGTNSVSMAKRRMRANFEFLKKLGVDWWCFHDRDIAPDGTTLEESNKNLDEVIELAKELQKGSKIKPLWGTAQLFLHPRYMHGGATSSEVGVYAYAAAQVKKAMEVTHYLGGENYVFWGGREGYQTLLNTDMGRELDHLARFFEAAVAYKKKIGFKGKSTASFSCPVFSLMGVIAQ

SEQ ID NO: 101705 - protein, 287 aa, Arabidopsis thaliana
  peptide (1)..(287): Ceres Seq. ID no. 13608523
MKKVEFFMLLLCFIAASSLVSADPPTCPADLGGKCSDSDDWQGDFFPEIPKIKYEGPSSKNPLAYRWYNAEEEILGKKMKDWFRFSVAFWHTFRGTGGDPFGAATKYWPWEDGTNSVSMAKRRMRANFEFLKKLGVDWWCFHDRDIAPDGTTLEESNKNLDEVIELAKELQKGSKIKPLWGTAQLFLHPRYMHGGATSSEVGVYAYAAAQVKKAMEVTHYLGGENYVFWGGREGYQTLLNTDMGRELDHLARFFEAAVAYKKKIGFKGKSTASFSCPVFSLMGVIAQ

SEQ ID NO: 101706 - protein, 280 aa, Arabidopsis thaliana
  peptide (1)..(280): Ceres Seq. ID no. 13608524
MLLLCFIAASSLVSADPPTCPADLGGKCSDSDDWQGDFFPEIPKIKYEGPSSKNPLAYRWYNAEEEILGKKMKDWFRFSVAFWHTFRGTGGDPFGAATKYWPWEDGTNSVSMAKRRMRANFEFLKKLGVDWWCFHDRDIAPDGTTLEESNKNLDEVIELAKELQKGSKIKPLWGTAQLFLHPRYMHGGATSSEVGVYAYAAAQVKKAMEVTHYLGGENYVFWGGREGYQTLLNTDMGRELDHLARFFEAAVAYKKKIGFKGKSTASFSCPVFSLMGVIAQ

SEQ ID NO: 101707 - DNA, 1900 bp, Arabidopsis thaliana
  misc_feature (1)..(1900): Ceres Seq. ID no. 13608525
  misc_feature (1)..(1900): Ortholog of  Ceres SEQ ID NO 14304867 as cited in SEQ ID NO 54375
aaggggcaaaactgaaaatcacacaaaaacaaacaaaactttgcttacgtcacatcattatctgtgactaattcttaatcatcatcatcatcatcacttacttaaatctaaaaaaatctctgtttgtatatatattatctttgcgatttttatccaaatcttccaaagcttagttttttttttttttcaatttctctcttgcgttttcgattttattacaagaactttgttttgggcttcatccatcgttcaaggttcgttgaaaactatgaagaaagttgagttttttatgctccttctctgcttcatcgcagcgtcatctctagtgtctgctgatccaccaacatgtcctgctgatttgggaggcaagtgtagtgattctgatgactggcaaggtgatttcttccctgaaatccccaagattaagtatgagggaccttcgagtaagaacccacttgcttacaggtggtataacgctgaagaagagattcttgggaagaaaatgaaggattggtttagattcagtgttgcgttttggcatactttccgtgggactggaggtgatccatttggtgctgctactaagtattggccttgggaagatggtactaactctgtgtctatggctaagagaagaatgagagctaactttgagttcttgaagaaacttggagttgattggtggtgttttcatgacagagacatagcacctgatggcactacacttgaggaatctaacaaaaacttggatgaagttatcgaactcgccaaagaactccaaaaggggagcaaaatcaaaccattgtggggaacagctcagcttttcttgcatcctcgttatatgcacggaggagcgaccagctctgaagttggagtgtatgcttacgctgctgctcaggtgaagaaagccatggaggtaacacattacttaggtggtgaaaactacgttttttggggtggtcgtgaaggttatcagacactcttgaacactgatatgggaagagagcttgatcatctagccaggttctttgaagctgctgttgcttacaagaagaagattggattcaaaggcacgcttttaatcgagcccaagcctcaagaacccaccaagcaccagtatgactgggatgctgcaacagctgccaatttcttgaggaaatatggtcttattgatgagtttaagctcaacattgagtgtaaccatgccacgctctctggtcacacttgtcatcacgagcttgaaactgcaagaattaatggtttacttggcaacattgatgcaaacactggcgatgctcaaactggatgggatacagatcagtttcttacagatgttggagaagcaaccatggttatgatgagtgtcatcaaaaatggtgggattgctccaggcggcttcaactttgacgctaaactgcgaagagagagtacagacgtggaagacttattcattgctcatattagtggaatggatacaatggctcgtggactgagaaatgcagtcaaaatcttggaggagggaagtctaagtgaattggtacgcaagcgatatgcaacttgggactctgagcttgggaagcaaatagaagaaggaaaagctgattttgagtatcttgagaagaaagctaaagagtttggagaaccaaaggtttcttctgctaaacaggaactcgctgagatgattttccaatctgcaatgtaagaagaagaacaagaaggctttttatgtttattaaaagtatcgtcttttttagtttccctcgcatctttgagaagtttgaaaaccaaaacattggaaaataagatgattagagaggttggtttcattatttcagttgatgtactatggtttcacactctaattactttaaattgaataacaaaaaactgtttaggcctt

SEQ ID NO: 101708 - protein, 477 aa, Arabidopsis thaliana; identical to SEQ ID NO: 41662
  peptide (1)..(477): Ceres Seq. ID no. 13608526

SEQ ID NO: 101709 - protein, 470 aa, Arabidopsis thaliana; identical to SEQ ID NO: 41663
  peptide (1)..(470): Ceres Seq. ID no. 13608527

SEQ ID NO: 101710 - protein, 399 aa, Arabidopsis thaliana; identical to SEQ ID NO: 41664
  peptide (1)..(399): Ceres Seq. ID no. 13608528

SEQ ID NO: 101711 - DNA, 1369 bp, Arabidopsis thaliana
  misc_feature (1)..(1369): Ceres Seq. ID no. 13608532
  misc_feature (1)..(1369): Ortholog of  Ceres SEQ ID NO 12782785 as cited in SEQ ID NO 0
acaaaggaaaacgttaatggtggatctgagcactgtcaatgtcatcaccaccgaagtagagttgactccactcaacagaaactgaaactggaaagtttgagacttttaagtgatgaaaagttctcagatgtcagaaacagaatttaaagtgttgcttgagacattcacatttcctgctgattctgctcccttcaagagttgtcatgcctctaccatagttgaggttgttaaagatcatttcttggctgcgtatttcggaggcaccagggaaggagcacctgatgtcaaaatctggttgcagcatttcaaggatggtcaatgggattcaccggttattgttgatgaagagccaggagttccaatgtataaccctgtcttgttcaaacttccatctcatgagctcttattgttctacaaaatcggccaggaggttcaaaaatggagtggttgcatgaaacgatcatatgataaaggtataacttggactgaaagagaacagcttcctcctgggattctcggtcctatcaaaaacaagcccattttgcttgaagacggtactctcctttgcggatcatctgttgagagttggaattcttggggagcatggatggaggtcacttcagatgcgggtagaacatggagaaagaaagggccaatatacattcaaggcaagagtcttagcgtgatccaaccagttccataccaaaccgcagctgggaacttacggattttactcagatcctttactggcattgacagaatctgtatctcagagtctttggatggcggtgagaactggagttttgcagtaccaacggttctcccaaacccaaattcaggtattgatggagtcaagcttaaggatggtaggctagtgcttgcttacaacacagactcaagaggtgtgctcaaattaggagtttctttagacgacggtgattcatggaccgatattttaacgttggaggaatctccgggaatggagtattcgtacccggctgttatacaagccggagacggcaatgtccacgtcacctatacatataacaggacacaaattaagcatgtggtgctcaagactgcgacagatatcgattcgaagccataccgacatggtgaagcaggaggaggacacgtgaacttggatttgtacgaaccaaacattaattaattagctatttgtctcttgaaccatcgatgtggagtgtgacttccttcttacggaagaacaaagaatgttctctttcttgtcttgtaagttattgattgatcgattcttgagtttgtaaaagttgccactagttgatgaatattattgagattgtttataatatatttattgtaatcatataagttagagatttacttt

SEQ ID NO: 101712 - protein, 352 aa, Arabidopsis thaliana; identical to SEQ ID NO: 43663
  peptide (1)..(352): Ceres Seq. ID no. 13608533

SEQ ID NO: 101713 - protein, 347 aa, Arabidopsis thaliana; identical to SEQ ID NO: 35320
  peptide (1)..(347): Ceres Seq. ID no. 13608534

SEQ ID NO: 101714 - protein, 269 aa, Arabidopsis thaliana; identical to SEQ ID NO: 35321
  peptide (1)..(269): Ceres Seq. ID no. 13608535

SEQ ID NO: 101715 - DNA, 897 bp, Arabidopsis thaliana
  misc_feature (1)..(897): Ceres Seq. ID no. 13608540
  misc_feature (1)..(897): Ortholog of  Ceres SEQ ID NO 15172991 as cited in SEQ ID NO 51333
  misc_feature (1)..(897): Ortholog of  Ceres SEQ ID NO 13594870 as cited in SEQ ID NO 51929
  misc_feature (1)..(897): Ortholog of  Ceres SEQ ID NO 12610679 as cited in SEQ ID NO 56077
  misc_feature (1)..(897): Ortholog of  Ceres SEQ ID NO 12635481 as cited in SEQ ID NO 0
acatttcgtgcgaaatttcaatttttttgcaatatcctttattgattgaccgaagatattttacaagcctttctccactaagcccttctctcttcttctcttggcctctcacttgaatctcccacaaagcgatcaatcacaaattccttcttctctctctctcttttcgtccctaagaatcaattatgaaaggagctaaatcaaagactgaaaccaggagctccaagctctctgtgaccaagaagccggctaaaggagcagggcgtggcaaagctgctgctaaggaccccaacaaaccaaagaggccagccagtgctttcttcgttttcatggaagatttccgtgagactttcaagaaggaaaaccccaagaacaagtctgtagctactgttggaaaagctgctggagacaagtggaagtccttgtctgattctgagaaagctccttatgttgctaaggctgagaaacgcaaggttgaatatgagaagaacattaaagcttacaacaagaaactggaggaaggtccaaaagaagatgaggaatctgacaagtcagtgtcagaggtcaatgacgaggatgatgctgaggatggtagtgaagaggaggaggacgatgactaagaagctgaatgttggtagcattagtatagatggctgcaaaaatctctctgtttttatctttacttgaaatgttaacggggctgattaaaatgggtctttctttttatctttttatatttccacaatctctcactaaagccctctgaatggagaaagtgaattgtagaatgtttagatggtgaaagagagacttgcagctctgtactctttgctttataaaacgatttagttttcttttctcagtttattatattgttgaattgatgatgatgttagc

SEQ ID NO: 101716 - protein, 144 aa, Arabidopsis thaliana; identical to SEQ ID NO: 28717
  peptide (1)..(144): Ceres Seq. ID no. 13608541

SEQ ID NO: 101717 - protein, 96 aa, Arabidopsis thaliana; identical to SEQ ID NO: 28718
  peptide (1)..(96): Ceres Seq. ID no. 13608542

SEQ ID NO: 101718 - protein, 79 aa, Arabidopsis thaliana; identical to SEQ ID NO: 28719
  peptide (1)..(79): Ceres Seq. ID no. 13608543

SEQ ID NO: 101719 - DNA, 821 bp, Arabidopsis thaliana
  misc_feature (1)..(821): Ceres Seq. ID no. 13608544
  misc_feature (1)..(821): Ortholog of  Ceres SEQ ID NO 15172991 as cited in SEQ ID NO 51333
  misc_feature (1)..(821): Ortholog of  Ceres SEQ ID NO 13594870 as cited in SEQ ID NO 51929
  misc_feature (1)..(821): Ortholog of  Ceres SEQ ID NO 12610679 as cited in SEQ ID NO 56077
  misc_feature (1)..(821): Ortholog of  Ceres SEQ ID NO 12635481 as cited in SEQ ID NO 0
atcccccacttaaccctctcatctctcggcctctcactcgaatctccttcacaaagcgtacaaatcacaaacacgtagttattctctctttactctctctatttctctctcttcaaaccctacgaagatcttcttcttcttcttcaagaatcgatcatgaaaggagctaaatctaaggctgaaaccaggagcacaaagctctctgtgactaagaagcctgctaagggagccaaaggtgctgctaaagatccaaacaaacctaagaggccttccagtgccttcttcgttttcatggaagatttccgtgtgacgtacaaggaggagcaccctaagaacaagtctgttgctgctgttggcaaagctggtggtgaaaagtggaaatccttgtctgactctgagaaggctccttatgtggctaaggctgacaagcgcaaggttgagtatgagaagaacatgaaagcctacaacaagaaattggaggaaggccctaaggaagatgaggaatctgacaagtcagtttcagaggttaacgatgaggatgatgctgaggatggcagtgaagaggaggaagacgatgattaagaagttgaagttgtggtagcgtaatatagaaggctgcaaggaatctctcggatgtttttatctcctctcttaaaatgttaattcgggtggttaaagtggttttttttttttttctttttctttttcttactgatgtttcgttttagtaaactattacctatctcccactgattctacgggtaatggaaaaagtgaatgtagaatgtttagatggtgaaatgagagatttgtagctctat

SEQ ID NO: 101720 - protein, 141 aa, Arabidopsis thaliana; identical to SEQ ID NO: 28781
  peptide (1)..(141): Ceres Seq. ID no. 13608545

SEQ ID NO: 101721 - protein, 96 aa, Arabidopsis thaliana; identical to SEQ ID NO: 28782
  peptide (1)..(96): Ceres Seq. ID no. 13608546

SEQ ID NO: 101722 - DNA, 1384 bp, Arabidopsis thaliana
  misc_feature (1)..(1384): Ceres Seq. ID no. 13608558
  misc_feature (1)..(1384): Ortholog of  Ceres SEQ ID NO 14310639 as cited in SEQ ID NO 53858
  misc_feature (1)..(1384): Ortholog of  Ceres SEQ ID NO 14312851 as cited in SEQ ID NO 58364
attgacaagttcatctgtctctcttgtcgtagtgaaagagaaaaagaaacaagtttttttctgttgggtaattttctactcgtcattggtttcatcgacattgaactagaaccagaatggctactgctacgtctcaccaatcagtcgtttcatttgcttctctccggtcttctccttcttctacaatctctcaatgtggattcaagatcgattcttcactgagctttacatcgaaaaagacaaacttttgcaagattaaagcaatggcatcatcagtttcttatgacaacactctcttgtctccttccaagacaatccctgacaattctcaaaagaaatcaaatgaagcagctttgatattgattaggcatggagaatctttatggaacgagaagaatctttttactggttgtgttgatgtgccattgactgagaaaggtgttgaagaagctattgaagcagggaagaggattagtaacattcctgttgatgttatctttacatcttctttgattcgtgctcagatgactgcaatgcttgctatgattcaacaccgtcgtaagaaggtaccgatcatcttgcacgatgaaagcgaacaggcgaaaacttggagtcaagtttttagtgatgagactaaaaaccaatccattcctgtcatacctgcttggcagctcaatgaaagaatgtatggagaattacaaggtcttaacaagcaagaaacagccgagagatatgggaaagagcaagttcacgaatggcgtaggagttatgatattcctcctcccaaaggagagagtttggagatgtgtgctgagagagcagtagcttattttcaggacaatatcgaaccgaagcttgcagctggaaagaacgtaatgatagctgctcacgggaactcgctgcggtctatcattatgtatcttgacaaattgacttgccaggaggtgataagtctagagctatcgacaggtatacctcttctctacatattcaaagaaggcaaattcatgaagcggggaagcccggttggtccaacagaagctggtgtttatgcttataccaagagattggctcaatacagacagaagctagaggacgatagtgaagtactctgtgcctgaagtaaactagaaaatttggttcttcatctactcaactctcttcccacaagcttaggaccttagaggcgtttacaaagaatacataacttctgattttgttctttttttctggttcttcttcattcatatgtgtcataaccaccactgttacctgaaggataatgttcaaaatgtgaccgtttccgtctttctagccaaacacttgttgatgttgtgtttgttgttgttaccaaactctttaagcaaacaagtattattctgtg

SEQ ID NO: 101723 - protein, 334 aa, Arabidopsis thaliana
  peptide (1)..(334): Ceres Seq. ID no. 13608559
MATATSHQSVVSFASLRSSPSSTISQCGFKIDSSLSFTSKKTNFCKIKAMASSVSYDNTLLSPSKTIPDNSQKKSNEAALILIRHGESLWNEKNLFTGCVDVPLTEKGVEEAIEAGKRISNIPVDVIFTSSLIRAQMTAMLAMIQHRRKKVPIILHDESEQAKTWSQVFSDETKNQSIPVIPAWQLNERMYGELQGLNKQETAERYGKEQVHEWRRSYDIPPPKGESLEMCAERAVAYFQDNIEPKLAAGKNVMIAAHGNSLRSIIMYLDKLTCQEVISLELSTGIPLLYIFKEGKFMKRGSPVGPTEAGVYAYTKRLAQYRQKLEDDSEVLCA

SEQ ID NO: 101724 - protein, 285 aa, Arabidopsis thaliana
  peptide (1)..(285): Ceres Seq. ID no. 13608560
MASSVSYDNTLLSPSKTIPDNSQKKSNEAALILIRHGESLWNEKNLFTGCVDVPLTEKGVEEAIEAGKRISNIPVDVIFTSSLIRAQMTAMLAMIQHRRKKVPIILHDESEQAKTWSQVFSDETKNQSIPVIPAWQLNERMYGELQGLNKQETAERYGKEQVHEWRRSYDIPPPKGESLEMCAERAVAYFQDNIEPKLAAGKNVMIAAHGNSLRSIIMYLDKLTCQEVISLELSTGIPLLYIFKEGKFMKRGSPVGPTEAGVYAYTKRLAQYRQKLEDDSEVLCA

SEQ ID NO: 101725 - protein, 198 aa, Arabidopsis thaliana; identical to SEQ ID NO: 22421
  peptide (1)..(198): Ceres Seq. ID no. 13608561

SEQ ID NO: 101726 - DNA, 537 bp, Arabidopsis thaliana
  misc_feature (1)..(537): Ceres Seq. ID no. 13608566
  misc_feature (1)..(537): Ortholog of  Ceres SEQ ID NO 15179080 as cited in SEQ ID NO 0
ggaaaggtagaagaatcgagtcggaaaaatggaaacgacgaagagtaacagcagcgagtccgatgtcaacgccaaatgggacgcttgtctcgatctcactgctcgtcgctttgtctactcttccctcggcggcgctttcgccggtcttctcttcttcaggagtccggttacgagatgggcgtcgattgcttttggtgctggaattggtattggttctgcatacacagattgttctcgtgtttttgatgcgtcttcttcaacttcagctactttattagcagctcccaagagtacggagacttctgtatctcaggcagcagaagagtgaagacaacgaggaagcttggaggtaaaaaaccaaacattgatagagttacattacgaaatggtaattgatcttgcaggacaaggcttttgagataacgccattgttaaaaaaaaacttttgcttctcagtgtggttttgtacactgatgtcaaaattgttaatgacccactcattttttttgttttgaaaaatcttatgttcttttactt

SEQ ID NO: 101727 - protein, 99 aa, Arabidopsis thaliana; identical to SEQ ID NO: 24405
  peptide (1)..(99): Ceres Seq. ID no. 13608567

SEQ ID NO: 101728 - protein, 91 aa, Arabidopsis thaliana
  peptide (1)..(91): Ceres Seq. ID no. 13608568
KGRRIESEKWKRRRVTAASPMSTPNGTLVSISLLVALSTLPSAALSPVFSSSGVRLRDGRRLLLVLELVLVLHTQIVLVFLMRLLQLQLLY

SEQ ID NO: 101729 - protein, 71 aa, Arabidopsis thaliana; identical to SEQ ID NO: 24406
  peptide (1)..(71): Ceres Seq. ID no. 13608569

SEQ ID NO: 101730 - DNA, 1109 bp, Arabidopsis thaliana
  misc_feature (1)..(1109): Ceres Seq. ID no. 13608577
  misc_feature (1)..(1109): Ortholog of  Ceres SEQ ID NO 14315662 as cited in SEQ ID NO 53109
  misc_feature (1)..(1109): Ortholog of  Ceres SEQ ID NO 12620168 as cited in SEQ ID NO 66161
ttttatctcttgagcacacacacacatacaagactctcctcacagaacgatttagatttaatcgggaaaaagttcagtcagtgacactaatgttcgaatcgaacatggttcttcaaacactatcttcttcttctcctccaattcaccgtctctatcttcaccattctcagattctcccttcttctgggtcacccagcaagatttctcttcagatacatggaaggactttggccattcgatcttttcatgaaatttctgctagaggtttaccggctttgaacaaagcttccttgaagaagctaccaatcaaaggatctacctttctgctggggcagagcttgttgatggtttctgctcacccacagttggcagcagcagcagaaatcataaagcctgaaccgatttacgaagttggagagttatttgaacttagtattcagctttcttacttgctgttactactggggttgcttggagttggtactttctatgtgatccgtcaagtacttgtacgcagagaactagacctctccgctaaagaattgcaggagcaagtaaggagcggagatgcaagtgcaacagagctctttgagcttggtgcagtgatgttgagaaggaagttttatcctgcagccaacaagtttttgcaacaagctatccagaaatgggacggtgatgatcaagatcttgctcaggtctataacgctcttggagtgagttatgtacgagaggataaacttgacaaaggaattgctcagtttgaaatggcggtgaagctgcaacccggttatgtaacagcttggaacaaccttggggatgcttatgagaagaagaaggagttgcctttggcattgaatgcgtttgaagaagttttgttgtttgatccaaacaataaggtggctcggcctcggcgagatgcgttgaaggatcgcgtgaagctttataaaggtgttgtggctgttaagtctaagaaacggtgacggctcaaacaagatgcaaactctgaaccaagaaccgttggtctctctcccccttgtgtatttttttggtttggtaatatgtatggagattttgtgttaatatgaaaatgaaactttgttgttttttgt

SEQ ID NO: 101731 - protein, 325 aa, Arabidopsis thaliana
  peptide (1)..(325): Ceres Seq. ID no. 13608578
LSLEHTHTYKTLLTERFRFNREKVQSVTLMFESNMVLQTLSSSSPPIHRLYLHHSQILPSSGSPSKISLQIHGRTLAIRSFHEISARGLPALNKASLKKLPIKGSTFLLGQSLLMVSAHPQLAAAAEIIKPEPIYEVGELFELSIQLSYLLLLLGLLGVGTFYVIRQVLVRRELDLSAKELQEQVRSGDASATELFELGAVMLRRKFYPAANKFLQQAIQKWDGDDQDLAQVYNALGVSYVREDKLDKGIAQFEMAVKLQPGYVTAWNNLGDAYEKKKELPLALNAFEEVLLFDPNNKVARPRRDALKDRVKLYKGVVAVKSKKR

SEQ ID NO: 101732 - protein, 296 aa, Arabidopsis thaliana
  peptide (1)..(296): Ceres Seq. ID no. 13608579
MFESNMVLQTLSSSSPPIHRLYLHHSQILPSSGSPSKISLQIHGRTLAIRSFHEISARGLPALNKASLKKLPIKGSTFLLGQSLLMVSAHPQLAAAAEIIKPEPIYEVGELFELSIQLSYLLLLLGLLGVGTFYVIRQVLVRRELDLSAKELQEQVRSGDASATELFELGAVMLRRKFYPAANKFLQQAIQKWDGDDQDLAQVYNALGVSYVREDKLDKGIAQFEMAVKLQPGYVTAWNNLGDAYEKKKELPLALNAFEEVLLFDPNNKVARPRRDALKDRVKLYKGVVAVKSKKR

SEQ ID NO: 101733 - protein, 291 aa, Arabidopsis thaliana
  peptide (1)..(291): Ceres Seq. ID no. 13608580
MVLQTLSSSSPPIHRLYLHHSQILPSSGSPSKISLQIHGRTLAIRSFHEISARGLPALNKASLKKLPIKGSTFLLGQSLLMVSAHPQLAAAAEIIKPEPIYEVGELFELSIQLSYLLLLLGLLGVGTFYVIRQVLVRRELDLSAKELQEQVRSGDASATELFELGAVMLRRKFYPAANKFLQQAIQKWDGDDQDLAQVYNALGVSYVREDKLDKGIAQFEMAVKLQPGYVTAWNNLGDAYEKKKELPLALNAFEEVLLFDPNNKVARPRRDALKDRVKLYKGVVAVKSKKR

SEQ ID NO: 101734 - DNA, 1369 bp, Arabidopsis thaliana
  misc_feature (1)..(1369): Ceres Seq. ID no. 13608585
  misc_feature (1)..(1369): Ortholog of  Ceres SEQ ID NO 14311596 as cited in SEQ ID NO 51728
  misc_feature (1)..(1369): Ortholog of  Ceres SEQ ID NO 14307004 as cited in SEQ ID NO 59551
  misc_feature (1)..(1369): Ortholog of  Ceres SEQ ID NO 13661504 as cited in SEQ ID NO 61294
  misc_feature (1)..(1369): Ortholog of  Ceres SEQ ID NO 12617197 as cited in SEQ ID NO 63406
  misc_feature (1)..(1369): Ortholog of  Ceres SEQ ID NO 13597804 as cited in SEQ ID NO 64182
  misc_feature (1)..(1369): Ortholog of  Ceres SEQ ID NO 14302768 as cited in SEQ ID NO 64889
  misc_feature (1)..(1369): Ortholog of  Ceres SEQ ID NO 13598565 as cited in SEQ ID NO 65250
  misc_feature (1)..(1369): Ortholog of  Ceres SEQ ID NO 13598597 as cited in SEQ ID NO 65496
  misc_feature (1)..(1369): Ortholog of  Ceres SEQ ID NO 13596284 as cited in SEQ ID NO 68273
  misc_feature (1)..(1369): Ortholog of  Ceres SEQ ID NO 13596227 as cited in SEQ ID NO 68750
  misc_feature (1)..(1369): Ortholog of  Ceres SEQ ID NO 14308995 as cited in SEQ ID NO 0
atatatacgaaacgtaccacaaatttctaactaaagcattcatagtctctcgaaagcctcttttcagaaccgaagctctttactttcgtccaccgggaaatatgccagtcgacgtagcctcaccggccggaaaaaccgtctgcgtcaccggagctggtggatacatcgcttcttggattgttaagatacttctcgagagaggttacacagtcaaaggaaccgtacggaatccagatgatccgaagaacacacatttgagagaactagaaggaggaaaggagagactgattctgtgcaaagcagatcttcaggactacgaggctcttaaggcggcgattgatggttgcgacggcgtctttcacacggcttctcctgtcaccgacgatccggaacaaatggtggagccggccgtgaatggagccaagtttgtaattaatgctgcggctgaggccaaggtcaagcgcgtggtcatcacctcctccattggtgccgtctacatggacccgaaccgtgaccctgaggctgtcgttgacgaaagttgttggagtgatcttgacttctgcaaaaacaccaagaattggtattgttacggcaagatggtggcggaacaagcggcgtgggagacagcaaaggagaaaggtgttgacttggtggtgttgaatccggtgctggttcttggaccgccgttacagccgacgatcaacgccagtctttaccacgtcctcaaatatctaaccggctcggctaagacttatgctaatttgactcaagcttatgtggatgttcgcgatgtcgcgctggctcatgttctggtctatgaggcaccctcggcctccggacgttatctcctagccgagagtgctcgccaccgcggggaagttgttgagattctggctaagctattcccggagtatcctcttccgaccaagtgcaaggacgagaagaaccctagagccaagccatacaaattcactaaccagaagattaaggacttaggcttagagttcacttccaccaagcaaagcctctacgacacagtcaagagcttacaagagaaaggccatcttgctcctcctcctcctcctccttcagcatcgcaagaatccgtggaaaatggcattaagatcgggtcttgaaaagcttattaattccctcaagtatcccccttaagtatccttaaccattgaagttgcttttgtttgttgtctctggttatgtgaaacctctgtttcaatatgtctcgtctggttatgaatctgtacactcagttctttggccaaaccgtttgatggattttgtagtcaagtcttcatgtttgatctatgtaatagattacacttaagtaaacaacttcatttttattctatgc

SEQ ID NO: 101735 - protein, 377 aa, Arabidopsis thaliana
  peptide (1)..(377): Ceres Seq. ID no. 13608586
IYETYHKFLTKAFIVSRKPLFRTEALYFRPPGNMPVDVASPAGKTVCVTGAGGYIASWIVKILLERGYTVKGTVRNPDDPKNTHLRELEGGKERLILCKADLQDYEALKAAIDGCDGVFHTASPVTDDPEQMVEPAVNGAKFVINAAAEAKVKRVVITSSIGAVYMDPNRDPEAVVDESCWSDLDFCKNTKNWYCYGKMVAEQAAWETAKEKGVDLVVLNPVLVLGPPLQPTINASLYHVLKYLTGSAKTYANLTQAYVDVRDVALAHVLVYEAPSASGRYLLAESARHRGEVVEILAKLFPEYPLPTKCKDEKNPRAKPYKFTNQKIKDLGLEFTSTKQSLYDTVKSLQEKGHLAPPPPPPSASQESVENGIKIGS

SEQ ID NO: 101736 - protein, 344 aa, Arabidopsis thaliana; identical to SEQ ID NO: 22657
  peptide (1)..(344): Ceres Seq. ID no. 13608587

SEQ ID NO: 101737 - protein, 246 aa, Arabidopsis thaliana; identical to SEQ ID NO: 22658
  peptide (1)..(246): Ceres Seq. ID no. 13608588

SEQ ID NO: 101738 - DNA, 835 bp, Arabidopsis thaliana
  misc_feature (1)..(835): Ceres Seq. ID no. 13608589
  misc_feature (1)..(835): Ortholog of  Ceres SEQ ID NO 12610267 as cited in SEQ ID NO 51993
  misc_feature (1)..(835): Ortholog of  Ceres SEQ ID NO 13495070 as cited in SEQ ID NO 53216
  misc_feature (1)..(835): Ortholog of  Ceres SEQ ID NO 12598241 as cited in SEQ ID NO 61025
  misc_feature (1)..(835): Ortholog of  Ceres SEQ ID NO 13661333 as cited in SEQ ID NO 61620
  misc_feature (1)..(835): Ortholog of  Ceres SEQ ID NO 13596812 as cited in SEQ ID NO 62283
  misc_feature (1)..(835): Ortholog of  Ceres SEQ ID NO 13623021 as cited in SEQ ID NO 0
  misc_feature (1)..(835): Ortholog of  Ceres SEQ ID NO 14302179 as cited in SEQ ID NO 0
  misc_feature (1)..(835): Ortholog of  Ceres SEQ ID NO 14309080 as cited in SEQ ID NO 0
gaagaaagaaagagaaaagaaattgagaagaaaaaagaaaaaaaggtgaccgtattctccgtcgattgtagccgcccgaagaaatatcttctcctctctcgtttaaccacgaatttgctctgatattagtgtttctctagccatggcgaacgcggcatctggaatggctgtgcatgatgattgcaagctgagatttctggaactgaaggctaaaaggacacaccgtttcatagtttacaagattgaggagaagcagaagcaagttgttgttgagaaagttggtcaaccgatccaaacttacgaggagtttgcagcatgtcttccagctgatgaatgccgttacgccatttacgattttgactttgtaactgctgagaattgccagaagagcaagatcttcttcatcgcgtggtgtccggatattgctaaggtgagaagcaagatgatctacgcgagctccaaggacaggttcaagagggaactagatgggattcaagtagagctacaggcaactgatccaacagagatggatctcgatgttttcaggagccgtgccaactaaaaagtaaaaaccaaagtttattatcatcatccccttgaaagatctattctcttattctgttatttttgagtgatggtactggtacttgattatgtttttacattgtgttgtgaagttatgaacctataaacaacttcattctatcggtgtttcggtcttgtgttcgatgttgtctttggttttaaaatggtgtgtaaggaccccaaatcgtctattgaagatgaacccttttaggtatatcattgatgaaatggatgattaaaagtttctctc

SEQ ID NO: 101739 - protein, 139 aa, Arabidopsis thaliana; identical to SEQ ID NO: 26126
  peptide (1)..(139): Ceres Seq. ID no. 13608590

SEQ ID NO: 101740 - protein, 132 aa, Arabidopsis thaliana; identical to SEQ ID NO: 26127
  peptide (1)..(132): Ceres Seq. ID no. 13608591

SEQ ID NO: 101741 - DNA, 1395 bp, Arabidopsis thaliana
  misc_feature (1)..(1395): Ceres Seq. ID no. 13608592
  misc_feature (1)..(1395): Ortholog of  Ceres SEQ ID NO 13596433 as cited in SEQ ID NO 68721
  misc_feature (1)..(1395): Ortholog of  Ceres SEQ ID NO 13599169 as cited in SEQ ID NO 0
atctaacttttccagataatatattcaaaattttacagagaggaagaagaagttcccgacacttgtgagagactataaaagtatacgatctcctcctctcgctctcttcagatcacaaagttttcgtttttagggttctctcatcgatctcggtttgtgatcttcttcttcatcaatggcgtctagtgataaacaaacaagcccaaagcctcctccttcaccgtctcctctccgtaattccaagttttgtcagtcaaatatgaggattttgatctcaggaggagctggattcattggttctcaccttgttgataagctgatggaaaacgaaaagaatgaggtgattgttgctgataactatttcactggttcaaaggacaaccttaagaagtggattggtcatccaagatttgagcttatccgtcacgatgtcacggagccacttttgatcgaggttgatcagatttaccatcttgcatgtcctgcttctcctatcttctacaagtacaaccctgtgaagacaatcaagaccaatgtgattggcacactgaacatgctaggtctcgccaagcgtgttggagcaaggattttgcttacctcaacctcggaggtatatggagatcctctcattcatccccagcctgagagctattggggaaatgtcaacccaattggtgttaggagctgttatgatgaaggcaagcgtgttgctgagaccttgatgtttgactaccacaggcaacatggaattgaaatccgcattgctagaatcttcaacacttatggtccacgcatgaacatcgatgatggccgtgttgtaagcaacttcattgcacaagcactccggggtgaggcattgactgttcagaaaccagggacacagactcgcagtttctgttatgtatctgacatggttgatggacttatgcgcctcatggaaggagatgacactggtcccatcaacatcggtaacccaggtgagtttacaatggtggagttggctgagacagtgaaagagctgattaacccgagcatagagataaagatggttgagaacacaccggatgatccaagacagaggaagccagacatcacaaaggctaaagaagtgttgggatgggaaccaaaggtgaagcttcgtgaaggccttccacttatggaagaagacttcaggctaaggctcggagtccacaagaactaaaactccatcaccgatcacacgcaaacgtgaatgcactacataaccaagttctacttttcatattccatggtgcaagcggttggtttcatataatatgtttctactttccacagtcgaaattattcctagagaaaaataaagattatgaacgaatgctttttatatttaaggaagataaaatttactttcttgcc

SEQ ID NO: 101742 - protein, 341 aa, Arabidopsis thaliana; identical to SEQ ID NO: 21850
  peptide (1)..(341): Ceres Seq. ID no. 13608593

SEQ ID NO: 101743 - protein, 313 aa, Arabidopsis thaliana; identical to SEQ ID NO: 21851
  peptide (1)..(313): Ceres Seq. ID no. 13608594

SEQ ID NO: 101744 - protein, 293 aa, Arabidopsis thaliana; identical to SEQ ID NO: 21852
  peptide (1)..(293): Ceres Seq. ID no. 13608595

SEQ ID NO: 101745 - DNA, 1222 bp, Arabidopsis thaliana
  misc_feature (1)..(1222): Ceres Seq. ID no. 13608601
  misc_feature (1)..(1222): Ortholog of  Ceres SEQ ID NO 14314534 as cited in SEQ ID NO 52434
  misc_feature (1)..(1222): Ortholog of  Ceres SEQ ID NO 12619999 as cited in SEQ ID NO 66123
  misc_feature (1)..(1222): Ortholog of  Ceres SEQ ID NO 13656436 as cited in SEQ ID NO 69154
attgctcctctcctctttctcacgaagaagaagacgaagcccatcaaattaaacaagaaaaattccattttcctccattgattgtgagtgagaacaaacatttaaagcttcttactcaaagtttctttctttatagatctcaaaaaattcgatatttttctcgattcatccgccattaaggttttattgcgagatcgaagagagaaggagaaaatgacgcatagagtagatcaggaatatgattatttgtttaagattgtgttgattggtgattctggtgttgggaaatcgaatatcttgtcgagattcaccaggaatgagttttgcttggaatctaaatccactattggtgttgaattcgccaccagaactactcaggttgaaggaaagaccattaaggcccagatctgggacactgcaggtcaggagaggtacagggcgatcacaagcgcgtattacagaggcgcagtgggtgcacttcttgtctacgacattactaagagacagacctttgacaatgttttaaggtggctgcgcgaactgagagaccatgcagattccaacattgtgatcatgatggctgggaacaaatccgatctgaaccacttgagatccgttgctgaggaagatggtcaaagtttggctgagaaggaaggtctctctttcctggagacatctgctcttgaagcaacaaacgtcgagaaagcgtttcagaccatcttaggtgagatctaccatatcataagcaaaaaggcactggctgcacaagaagcagcagcagctaattctgcaatccctgggcaaggaactacgattaacgtcgatgacacatctggaggcgcgaaacgagcatgttgctcttcttaaactaaaggtaaactgtttatttcggttgctccttgttcagagattcaaacttttgttttcactggcttctcttcttttcaagttttggctgatgaaacgtaactatgcaagactatgtagaatactctgtttttattctcttcggtttggggtttgtgttcagtttaaagcttgttagtagtatacttagaatcttctggtgcttgcttgctttcccttcttcttcccttggtgtgtttctattgatttctggtttataaagtattttttctatctccggtttagtccggttcgtcttggctttgtttaatcaaatcattgattcctctcttatcaatgtattgtatccggttcc

SEQ ID NO: 101746 - protein, 217 aa, Arabidopsis thaliana; identical to SEQ ID NO: 23142
  peptide (1)..(217): Ceres Seq. ID no. 13608602

SEQ ID NO: 101747 - DNA, 2064 bp, Arabidopsis thaliana
  misc_feature (1)..(2064): Ceres Seq. ID no. 13608603
  misc_feature (1)..(2064): Ortholog of  Ceres SEQ ID NO 13594317 as cited in SEQ ID NO 57796
atggaggacgagccacttttaccacttatgggcctgttattagtggcccaagacgagacggatgtcggatcatgcgatttggctgttgcaatccatagacaccaccgagcgagcatcttcttcttcttcttcgctaaccggagtaatcgtaagcagcttcgactggtgaaaatgtgttactctctctctatacaatcttcaattgacttccataatcgaaacgctctaaaaatccatggagatcgagcaattttgacttcgaacttacctacactcaggaggattccgtttttgccggagcgagatcgccggagaaagttggtcctctgtaccgggagagtcgtaaactcattgaaattcaccggaaacacttccgtcgatctatgtggtattcctcgtcatcgattaagagtttcttgcagcgatgctcgccgtacaccggaagaaacggcggcggagttgacggcgcaacccaatttttcagaatttataacgtcggagagagtcaaagtggttgcgatgctcgcgcttgctttggcgctatgcaatgcggatcgtgttgtgatgtccgttgcgattgttcctctttcgctttctcgtggatggagcaaatcattttccggtatcgttcagtcatcgtttctatggggatacttaatttctccaattgctggtggaactttggtggaccgttatggtggtaaagtagtcatggcgtggggtgtggctttgtggtcgttggcaacttttcttaccccttgggcggctgatagttctttgtgggctcttcttgctgcaagagcgatggttggggttgctgaaggagtggctcttccttgtatgaacaacatggttgcgagatggtttcccccaacagaacgttctagggcggttggtattgcaatggcagggtttcagcttgggaatgttgtaggactcatgttgtctcctattcttatgtctcaaggaggtatatatggcccatttgtaatttttggactatcggggttcctttggttgctcgtgtggctctctgcaacgtcaagtgcaccagatcgacatcctcagattacaaagtctgaacttgagtatataaagcaaaagaagcaaatatctactatggagaacaaacgaattagcacaagtggaatacctccttttggacgccttctctccaagatgccgacttgggctgttatagttgcaaattccatgcatagctggggtttctttgtgattctttcatggatgcccatatacttcaattcagtatatcatgtgaacctcaaacaagctgcttggtttagtgccgttccatggagtatgatggctttcacaggatacattgctggtttttggtcggatttgttgatacggcgtggtacaagcatcaccttaacgcgaaaaatcatgcagtccattggtttcattggtcctggaattgctctcattggtctaacgacggcaaaacaacctttagtggcatcagcctggcttagtttagccgttgggcttaaatcattcagccatttggggtttcttattaatcttcaggaaattgctcccgaatattccggtgttctacatggaatgtgtcttactgctgggacattagctgcgatagttggcacagttggagctggtttctttgtagaactattgggctccttccagggattcatccttcttacagcaatattgtatctcctttctgctctcttttacaacatatacgcaactggagaaagagtagattttgacacaacagcttgaaggtgaccacaaagtcacttaataggtggatcagctagtaaagaagttgcaactctatatagaatcagcttttgctctccaagtaaataccaggaacaagacctcggctttgtacagaaactagaatttcttcgtctcgatggttctctccttgataaataaatgaaaaaatgtagcaagttatctatgttcaatgtcgtgaatcgccttagagaagataatgaaaacaatgttgacgtagtatttgtttgttatacggttcaatggtatagagacacgaagactttcatc

SEQ ID NO: 101748 - protein, 590 aa, Arabidopsis thaliana
  peptide (1)..(590): Ceres Seq. ID no. 13608604
MEDEPLLPLMGLLLVAQDETDVGSCDLAVAIHRHHRASIFFFFFANRSNRKQLRLVKMCYSLSIQSSIDFHNRNALKIHGDRAILTSNLPTLRRIPFLPERDRRRKLVLCTGRVVNSLKFTGNTSVDLCGIPRHRLRVSCSDARRTPEETAAELTAQPNFSEFITSERVKVVAMLALALALCNADRVVMSVAIVPLSLSRGWSKSFSGIVQSSFLWGYLISPIAGGTLVDRYGGKVVMAWGVALWSLATFLTPWAADSSLWALLAARAMVGVAEGVALPCMNNMVARWFPPTERSRAVGIAMAGFQLGNVVGLMLSPILMSQGGIYGPFVIFGLSGFLWLLVWLSATSSAPDRHPQITKSELEYIKQKKQISTMENKRISTSGIPPFGRLLSKMPTWAVIVANSMHSWGFFVILSWMPIYFNSVYHVNLKQAAWFSAVPWSMMAFTGYIAGFWSDLLIRRGTSITLTRKIMQSIGFIGPGIALIGLTTAKQPLVASAWLSLAVGLKSFSHLGFLINLQEIAPEYSGVLHGMCLTAGTLAAIVGTVGAGFFVELLGSFQGFILLTAILYLLSALFYNIYATGERVDFDTTA

SEQ ID NO: 101749 - protein, 581 aa, Arabidopsis thaliana
  peptide (1)..(581): Ceres Seq. ID no. 13608605
MGLLLVAQDETDVGSCDLAVAIHRHHRASIFFFFFANRSNRKQLRLVKMCYSLSIQSSIDFHNRNALKIHGDRAILTSNLPTLRRIPFLPERDRRRKLVLCTGRVVNSLKFTGNTSVDLCGIPRHRLRVSCSDARRTPEETAAELTAQPNFSEFITSERVKVVAMLALALALCNADRVVMSVAIVPLSLSRGWSKSFSGIVQSSFLWGYLISPIAGGTLVDRYGGKVVMAWGVALWSLATFLTPWAADSSLWALLAARAMVGVAEGVALPCMNNMVARWFPPTERSRAVGIAMAGFQLGNVVGLMLSPILMSQGGIYGPFVIFGLSGFLWLLVWLSATSSAPDRHPQITKSELEYIKQKKQISTMENKRISTSGIPPFGRLLSKMPTWAVIVANSMHSWGFFVILSWMPIYFNSVYHVNLKQAAWFSAVPWSMMAFTGYIAGFWSDLLIRRGTSITLTRKIMQSIGFIGPGIALIGLTTAKQPLVASAWLSLAVGLKSFSHLGFLINLQEIAPEYSGVLHGMCLTAGTLAAIVGTVGAGFFVELLGSFQGFILLTAILYLLSALFYNIYATGERVDFDTTA

SEQ ID NO: 101750 - protein, 533 aa, Arabidopsis thaliana
  peptide (1)..(533): Ceres Seq. ID no. 13608606
MCYSLSIQSSIDFHNRNALKIHGDRAILTSNLPTLRRIPFLPERDRRRKLVLCTGRVVNSLKFTGNTSVDLCGIPRHRLRVSCSDARRTPEETAAELTAQPNFSEFITSERVKVVAMLALALALCNADRVVMSVAIVPLSLSRGWSKSFSGIVQSSFLWGYLISPIAGGTLVDRYGGKVVMAWGVALWSLATFLTPWAADSSLWALLAARAMVGVAEGVALPCMNNMVARWFPPTERSRAVGIAMAGFQLGNVVGLMLSPILMSQGGIYGPFVIFGLSGFLWLLVWLSATSSAPDRHPQITKSELEYIKQKKQISTMENKRISTSGIPPFGRLLSKMPTWAVIVANSMHSWGFFVILSWMPIYFNSVYHVNLKQAAWFSAVPWSMMAFTGYIAGFWSDLLIRRGTSITLTRKIMQSIGFIGPGIALIGLTTAKQPLVASAWLSLAVGLKSFSHLGFLINLQEIAPEYSGVLHGMCLTAGTLAAIVGTVGAGFFVELLGSFQGFILLTAILYLLSALFYNIYATGERVDFDTTA

SEQ ID NO: 101751 - DNA, 2167 bp, Arabidopsis thaliana
  misc_feature (1)..(2167): Ceres Seq. ID no. 13608611
  misc_feature (1)..(2167): Ortholog of  Ceres SEQ ID NO 14313670 as cited in SEQ ID NO 54491
gacatcaaaaacacgaatatcgatagtacacttctacgtgcaattttctcctttctcttcctggacatctgtctgtttattacattttcttgtaatctctttttggggttttacaatatctatcccctaaagtttcggaaaattctgtttttctgttctcattcttcgtgatctttttcactttcttcaaaaaaaaaacatgtgtggaatacttgccgtgttaggatgttccgatgattctcaggccaagagagttcgtgttcttgagctttctcgcagattgaggcacagaggacctgactggagtggcttatatcagaacggagataattacttggcccatcaacgtcttgccgtcatcgatcctgcttccggtgatcaacctcttttcaacgaggacaagaccattgttgtcacggtgaacggagagatttataaccatgaggagctgagaaaacgtctgaagaatcacaagttccgtactggtagtgattgtgaagtcattgctcacttgtacgaggagtatggtgtggattttgttgatatgttggatggaatattctcctttgtgttgctcgacacacgagataactctttcatggtggctcgtgatgcgattggtgtcacttcgctctacattggttggggactagacggatctgtgtggatatcttcagagatgaaaggcctaaacgatgactgtgagcatttcgaaacgtttcctccaggtcatttttattcaagcaaattaggagggtttaagcaatggtataatcctccttggttcaatgaatctgttccttcaacgccttatgagcctcttgcgataagacgcgcctttgaaaacgctgtgattaagcggttgatgactgatgttccatttggagttttgctctctggtggtcttgattcttcccttgttgcctccatcactgcacgtcacttggccggtactaaggcggctaagcaatggggtcctcagctccattccttttgcgttggtcttgagggctcaccggacttgaaggcagggaaagaggtggcggaatatttggggacggtgcaccacgagttccacttctcggtgcaggacgggattgatgcgatagaggatgtgatttaccatgttgagacctatgatgtgacgactatcagagcgagcacaccgatgttcttgatgtcccggaaaatcaagtctctaggggtcaagatggttctctccggcgaaggtgcggacgagatctttggagggtacctctatttccacaaggcacctaacaagaaagagtttcaccaagaaacttgtcgcaagatcaaggctcttcacaagtatgactgtctaagagccaacaaatctacctctgcctttggactagaggcacgtgttcctttccttgacaaagacttcatcaacacagctatgtctctcgaccctgaatccaagatgatcaagccagaggaaggaaggatcgagaaatgggttctaaggagagcctttgacgacgaagaacgtccttatctaccaaaacacattctctacagacagaaagaacagttcagtgatggtgttggctacagttggatcgatggcctgaaagatcacgctgctcaaaatgtcaatgacaagatgatgtcgaacgcggggcatatcttccctcacaacactccaaacactaaagaagcttactactacagaatgatctttgaaaggttcttcccgcagaactctgcgagactaacggttcctggaggtgccaccgtggcttgttcgactgcaaaggcagtggagtgggatgcaagctggtccaacaatatggatccatcaggaagagccgctatcggagttcacctttcggcctacgatggcaagaacgtggcattgaccataccaccacttaaggcaattgacaacatgccgatgatgatgggtcaaggagttgtgattcagtcataacttcgaaggagaaatggatgaaatatgtgttatatcttcccaatgggtgaagtgttttgtatgattttaaaaataagaatgtgatcctttttttttcctatgaagatctgaatgtataatctatcttgtaaaaatttgtttctttgtaagatttgaatgtaccgcttttacgtagatcgatgtacatcaatcttataagtttcaattatgtat

SEQ ID NO: 101752 - protein, 584 aa, Arabidopsis thaliana; identical to SEQ ID NO: 35014
  peptide (1)..(584): Ceres Seq. ID no. 13608612

SEQ ID NO: 101753 - protein, 469 aa, Arabidopsis thaliana; identical to SEQ ID NO: 35015
  peptide (1)..(469): Ceres Seq. ID no. 13608613

SEQ ID NO: 101754 - protein, 451 aa, Arabidopsis thaliana; identical to SEQ ID NO: 35016
  peptide (1)..(451): Ceres Seq. ID no. 13608614

SEQ ID NO: 101755 - DNA, 1266 bp, Arabidopsis thaliana
  misc_feature (1)..(1266): Ceres Seq. ID no. 13608615
  misc_feature (1)..(1266): Ortholog of  Ceres SEQ ID NO 14303417 as cited in SEQ ID NO 54923
  misc_feature (1)..(1266): Ortholog of  Ceres SEQ ID NO 15169084 as cited in SEQ ID NO 59115
  misc_feature (1)..(1266): Ortholog of  Ceres SEQ ID NO 12635513 as cited in SEQ ID NO 0
  misc_feature (1)..(1266): Ortholog of  Ceres SEQ ID NO 15179044 as cited in SEQ ID NO 0
aaccgataagcctgtatctcctctcaaaccaatctcctccgtcaaatcaaccacgtcatctaatccaacggtagatactcagtcatcaaaccacagccacaaaactcgtttcaagaaacgaataaacttacaaaatcccctccaagtcttatttcttcacaaccatctctgaactcatctttcaatctctcttgattccaatccattcttcttcaagtgccgggttctcgggtcggatcttctaagtctagctagggataatggctactgtcactactcatgcctcggcctcgattttccgaccttgtacttcaaagccaagattcctcaccggttcttccggtaggttgaaccgcgacttgtcgtttacatcgatcggttcatcggccaaaacgtcgtcgttcaaggttgaagctaagaaaggagaatggttgcccggtttggcatcgcctgattatctcaccggcagtcttgccggtgacaatgggtttgacccgttgggtctagcagaggatccagagaacttgaaatggttcgtccaggcagagctggtcaacggacgatgggctatgctcggtgtcgctgggatgcttttgccggaagttttcaccaagatcggaatcataaatgttcctgagtggtacgatgctgggaaagagcagtattttgcatcgtcgtcgacattgttcgtgatcgagttcatattgtttcattacgttgagatcagacggtggcaagacatcaagaacccaggaagtgtgaaccaagaccctatctttaagcaatacagcttacctaagggtgaagttggttaccctggtggaatctttaacccgcttaactttgctcctacgcaagaggccaaggagaaagagctagcaaacgggaggttggcgatgttggcattcttagggtttgtggttcaacacaatgtgactggaaaaggaccatttgagaatctgttgcagcacttgtctgacccatggcacaacactattgtccaaaccttcaactaaagagtgaagacagacttatgatctcatacctatctatcttccatcactttcatgtctgtctgtgagtgtgtttcatcttagagttcttggtttttgagcttgaattattgttgaaccgttgtagctccatgaacaaatttggaatcttcaatgtacagaggaactaagttaatcaacattgttgtactctttaatatctattattcatgtggcaacagttatatataagcacaccataacttagattcac

SEQ ID NO: 101756 - protein, 251 aa, Arabidopsis thaliana; identical to SEQ ID NO: 26326
  peptide (1)..(251): Ceres Seq. ID no. 13608616

SEQ ID NO: 101757 - protein, 148 aa, Arabidopsis thaliana; identical to SEQ ID NO: 26327
  peptide (1)..(148): Ceres Seq. ID no. 13608617

SEQ ID NO: 101758 - protein, 142 aa, Arabidopsis thaliana; identical to SEQ ID NO: 26328
  peptide (1)..(142): Ceres Seq. ID no. 13608618

SEQ ID NO: 101759 - DNA, 1733 bp, Arabidopsis thaliana
  misc_feature (1)..(1733): Ceres Seq. ID no. 13608624
  misc_feature (1)..(1733): Ortholog of  Ceres SEQ ID NO 15170811 as cited in SEQ ID NO 52649
  misc_feature (1)..(1733): Ortholog of  Ceres SEQ ID NO 13638331 as cited in SEQ ID NO 58047
  misc_feature (1)..(1733): Ortholog of  Ceres SEQ ID NO 15225845 as cited in SEQ ID NO 65125
atcattcttagaaccaaaacggaaagtcccaacgatcccattttactccttttcaccacctctagtagcagagagagagagagagtatggcgattacggtgccgagacggcaactcttcatcggcggtcaatggactgagcccgttctccgtaaaactctccctgttgtcaatcccgccaccgaagacatcatcggttatattccagctgcaacttctgaagatgtggagcttgctgtggaagctgctaggaaagcatttactaggaacaacggaaaggattgggctagagcaactggtgctgttcgtgccaaatacttgcgcgctattgcagctaaggtaatagagaggaagtctgaactagctaatcttgaggctattgattgcggtaaacctctagatgaagcagcatgggacatggatgatgttgctggatgttttgaatattatgctgacctagctgaaggcttggatgcaaagcagaagactcctctttctcttccgatggatacttttaagggttatattctcaaggaacccattggcgtagttggcatgattactccatggaactatccgttattgatggctgtctggaaagtcgctccttcacttgctgctgggtgcacggctatactgaaaccttcagagttggcctccctgacatgtttggagctcgctgatatttgccgcgaggtgggtctaccacctggtgttcttaatattctgactggtttaggaactgaagcaggtgctccactggcatcgcatccacatgttgacaagattgtattcactggaagcacaacaactggaagcagcattatgacttccgctgccaaattggtgaaaccagtttccttggagcttgggggtaaaagccctatcattgtctttgatgatgtcgatattgataaagctgtggaatggactatgtttggttgtttctggacgaatgggcagatttgtagtgccacatctcgacttcttgtgcatgaaaggattgctgacgagtttttggacaagctggtaaagtggaccaagaacattaagatttcagatccttttgaagaaggctgtaggcttggtcctgttgtcagtaaaggacagtacgagagagttctaaagtttgtctcaaacgctaggaatgaaggtgcaactgttctttgtggaggagttcgtcctgagcatttaaagaagggatactttgttgaacctgcgattgtttcaaatgtgactacttcaatggaaatctggagagaggaagtctttggtcctgctctgtgtgtgaaaacattctccaccgaggatgaggcaattcagcttgcaaatgactctcaatatggattagcaggcgcagtattatcaaatgatctggagcggtgtgatcgtgttagtaaggctttccaggcgggaatagtgtgggtcaactgctctcagccatgcttctgccaagctccatggggtggaaccaaacgcagtggatttggccgtgaattgggagaatggggacttgagaactacttgagtgtgaagcaggtgactcagtatatctctgatgaaccatggggatggtacaaacctccttccaagctctgagacaaacactagttcctgatatttccttaaaacatgtactcatgagaatataccaataaagcaagagacccttctgtaagagaaatggtattgctactttaaattcttgaaaaaaatgaaaaataagatgagatg

SEQ ID NO: 101760 - protein, 503 aa, Arabidopsis thaliana; identical to SEQ ID NO: 24564
  peptide (1)..(503): Ceres Seq. ID no. 13608625

SEQ ID NO: 101761 - protein, 393 aa, Arabidopsis thaliana; identical to SEQ ID NO: 24565
  peptide (1)..(393): Ceres Seq. ID no. 13608626

SEQ ID NO: 101762 - protein, 364 aa, Arabidopsis thaliana; identical to SEQ ID NO: 24566
  peptide (1)..(364): Ceres Seq. ID no. 13608627

SEQ ID NO: 101763 - DNA, 883 bp, Arabidopsis thaliana
  misc_feature (1)..(883): Ceres Seq. ID no. 13608636
  misc_feature (1)..(883): Ortholog of  Ceres SEQ ID NO 12557831 as cited in SEQ ID NO 58
  misc_feature (1)..(883): Ortholog of  Ceres SEQ ID NO 13638808 as cited in SEQ ID NO 51951
  misc_feature (1)..(883): Ortholog of  Ceres SEQ ID NO 12637454 as cited in SEQ ID NO 0
aaaaataatatcgagacgagacgggtttgtttcttctctctatctctatatctaccaaaatcctttgccccccgaatctagttctctcgatcgaccctgtgacgatggctaataaccaagcaagccttcttctgcagaaacagcttaaagatctgtgtaagaaacctgttgatggtttctctgctggcctcgttgatgagaagaacgttttccaatggagcgtctctattatgggtcctcctgatactttgtatgaaggtggcttttttaatgcaattatgtcgtttccggagaattatccagtttcaccaccaactgtgacgtttacctcggagatgtggcatcctaatgtttattctgatggaaaagtttgcatttctattcttcatcctcctggtgatgatcctcatggatacgagcttgcctctgaacgttggacccctgtccatacggtagaaagcattgtgttgagtatcatatcgatgctctcaggtcccaacgatgagtcaccagcgaatgtggaagctgcaaaggaatggagagacaacagagcagagtttaggaagaaagtgagtcgctgtgtgagaagatcgcaagagatgctatgaacatctctccagcgtttttttcgtgttgtagaaatatcgattctaatcttcttatgagaaagcctaagcagaaccaaccatcttcaagcagcagccagatgaatctgactttgcaaaagcttctctttctttttcctttttgggttttgttctctaaggtttggtttggaatattggtgtggaatcaaatccgctccatattttaggattatattattgcactcgttaatggattcgtttgatctggctttttaactttattctggttttgggtt

SEQ ID NO: 101764 - protein, 167 aa, Arabidopsis thaliana; identical to SEQ ID NO: 35878
  peptide (1)..(167): Ceres Seq. ID no. 13608637

SEQ ID NO: 101765 - protein, 125 aa, Arabidopsis thaliana; identical to SEQ ID NO: 35879
  peptide (1)..(125): Ceres Seq. ID no. 13608638

SEQ ID NO: 101766 - protein, 109 aa, Arabidopsis thaliana; identical to SEQ ID NO: 35880
  peptide (1)..(109): Ceres Seq. ID no. 13608639

SEQ ID NO: 101767 - DNA, 1101 bp, Arabidopsis thaliana
  misc_feature (1)..(1101): Ceres Seq. ID no. 13608640
  misc_feature (1)..(1101): Ortholog of  Ceres SEQ ID NO 13660172 as cited in SEQ ID NO 67576
ataagaagggcttagggttcacttcagatctgtctttgaacattgctactctcaagtgatcaaattaactccgtcgcaggtgatgaggagatacagtccgccttattacagtcctccgaggagaggatacggtggtcgaggtagaagtcctcctcctcctcctcctcgacgtggatatggtggtggtggtggtggtggtggacgtagaggatctagccatggaagtctcttggttcgtaacattcctcttgattgcagaccagaagagcttcgtgagccctttgagaggtttggacctgtgagagatgtctatatccccagagactattactcagggcaaccgcgggggtttgcgtttgtggagtttgttgatgcatatgatgctggggaggctcaaagaagcatgaacaggagaagctttgctggaagagagataacggtggttgttgcttcagagtctaggaaaaggcctgaagagatgcgtgtgaagactaggactcgtagtagggaaccttcaggctccagggatcgttctcatggacggtctcgttcacgttcaatctctcgatcacgttctccacgtcgtccgtcagattctagaagcagataccgatcaaggtcttactctcctgcaccaagacgaagaggaggtcctcctcgtggggaagaagatgaaaattacagtcgtaggtcctactcccctggctatgaaggtgctgctgctgctgctccagatcgggacagaaatggagacaatgagattagagaaaaaccgggctatgaagcagaggatagacgtcgtggtggaagagcagtttcaaggtcgccatcaggatccaggtccaggtctgtggaggtatctccaagatgaaacttatgtgaagaagtggccgaccaaaactttgtgcaacgctttatgggttttgcatttctctagtagtgcgtctctgtgtctttaaaaactccttactctggcttgtcaaagatattttgtcttgtgatgtgatgttacttgaaatcggtttcggtttattgggtcttattataaaattgtatgaagaagattggttatgcttttgatgtgagacaggtttaaaaccc

SEQ ID NO: 101768 - protein, 262 aa, Arabidopsis thaliana; identical to SEQ ID NO: 35092
  peptide (1)..(262): Ceres Seq. ID no. 13608641

SEQ ID NO: 101769 - protein, 155 aa, Arabidopsis thaliana; identical to SEQ ID NO: 35093
  peptide (1)..(155): Ceres Seq. ID no. 13608642

SEQ ID NO: 101770 - protein, 140 aa, Arabidopsis thaliana; identical to SEQ ID NO: 35094
  peptide (1)..(140): Ceres Seq. ID no. 13608643

SEQ ID NO: 101771 - DNA, 1208 bp, Arabidopsis thaliana
  misc_feature (1)..(1208): Ceres Seq. ID no. 13608673
  misc_feature (1)..(1208): Ortholog of  Ceres SEQ ID NO 15171739 as cited in SEQ ID NO 57134
aatctcatagactcatagcaatggcgaatcacaacagtttcacttacatggaccatagcttcagcgatataagtctcaactttgattcctctgctttcagcgattgtaacagtgacatatcctgcgagtttccaacaactacctccgagagccgtcaacgaaaactcttcctctcttgcgccgttgataattccgatgacgtgatcagaaatctcataacgcatcttgagtcatcttcttcgatcgaggaacagaagcaagctgctatggagattagactcttatcaaagaacaaaccagagaatcgtatcaaactcgctaaagccggtgctattaaaccgttggtttctttaatctcgtcttcggatcttcagcttcaagagtatggagtcactgcggtgttgaatctatctctctgcgatgagaacaaagagatgattgtttcttccggtgcggttaaaccgctcgttaatgcgttgagattaggaacaccgacgacgaaagagaacgctgcttgtgctctgctccggttatctcaagtggaggaaaacaaaatcacgattgggagatcaggagcgattcctttactagtgaaccttctagaaaatggcggattcagagcgaagaaagacgcgtcgacggctttatactcgttgtgttcgacgaacgagaacaaaaccagagctgttgaatctgggattatgaagccgttagtggagttaatgattgattttgaatcggatatggttgataaatcagcgtttgttatgaatctgttaatgtcggcgccggaatcgaagccggcggttgtggaagaaggaggagttccggtgttggttgagattgttgaagcgggaacacagagacagaaggagataagtgtgtcgatattgttgcagctttgtgaggagagtgttgtgtatcgaaccatggtggctcgtgaaggagcggttcctccgctcgtggctttatcgcagggtagtgcgagtcgtggtgctaaggtaaaggctgaggcgttgatagagcttcttaggcaacccagacaacaacaacaacaacaacaacactttgaatctaacgacaacgagagataacactttagtttgggctttttattaatgggcctttgtagaatacatatcttgttaattatttggacggcccaagctgaacacatatcttgttaattattggtcgatgtgttttgc

SEQ ID NO: 101772 - protein, 363 aa, Arabidopsis thaliana
  peptide (1)..(363): Ceres Seq. ID no. 13608674
SHRLIAMANHNSFTYMDHSFSDISLNFDSSAFSDCNSDISCEFPTTTSESRQRKLFLSCAVDNSDDVIRNLITHLESSSSIEEQKQAAMEIRLLSKNKPENRIKLAKAGAIKPLVSLISSSDLQLQEYGVTAVLNLSLCDENKEMIVSSGAVKPLVNALRLGTPTTKENAACALLRLSQVEENKITIGRSGAIPLLVNLLENGGFRAKKDASTALYSLCSTNENKTRAVESGIMKPLVELMIDFESDMVDKSAFVMNLLMSAPESKPAVVEEGGVPVLVEIVEAGTQRQKEISVSILLQLCEESVVYRTMVAREGAVPPLVALSQGSASRGAKVKAEALIELLRQPRQQQQQQQHFESNDNER

SEQ ID NO: 101773 - protein, 357 aa, Arabidopsis thaliana
  peptide (1)..(357): Ceres Seq. ID no. 13608675
MANHNSFTYMDHSFSDISLNFDSSAFSDCNSDISCEFPTTTSESRQRKLFLSCAVDNSDDVIRNLITHLESSSSIEEQKQAAMEIRLLSKNKPENRIKLAKAGAIKPLVSLISSSDLQLQEYGVTAVLNLSLCDENKEMIVSSGAVKPLVNALRLGTPTTKENAACALLRLSQVEENKITIGRSGAIPLLVNLLENGGFRAKKDASTALYSLCSTNENKTRAVESGIMKPLVELMIDFESDMVDKSAFVMNLLMSAPESKPAVVEEGGVPVLVEIVEAGTQRQKEISVSILLQLCEESVVYRTMVAREGAVPPLVALSQGSASRGAKVKAEALIELLRQPRQQQQQQQHFESNDNER

SEQ ID NO: 101774 - protein, 348 aa, Arabidopsis thaliana
  peptide (1)..(348): Ceres Seq. ID no. 13608676
MDHSFSDISLNFDSSAFSDCNSDISCEFPTTTSESRQRKLFLSCAVDNSDDVIRNLITHLESSSSIEEQKQAAMEIRLLSKNKPENRIKLAKAGAIKPLVSLISSSDLQLQEYGVTAVLNLSLCDENKEMIVSSGAVKPLVNALRLGTPTTKENAACALLRLSQVEENKITIGRSGAIPLLVNLLENGGFRAKKDASTALYSLCSTNENKTRAVESGIMKPLVELMIDFESDMVDKSAFVMNLLMSAPESKPAVVEEGGVPVLVEIVEAGTQRQKEISVSILLQLCEESVVYRTMVAREGAVPPLVALSQGSASRGAKVKAEALIELLRQPRQQQQQQQHFESNDNER

SEQ ID NO: 101775 - DNA, 1162 bp, Arabidopsis thaliana
  misc_feature (1)..(1162): Ceres Seq. ID no. 13608677
  misc_feature (1)..(1162): Ortholog of  Ceres SEQ ID NO 14309202 as cited in SEQ ID NO 0
gtgttttctagtgttgcagaaaatggcaactactagtactactacaaagctctccgttctctgctgctctttcatttcatctcctctcgttgactctcctccttctctcgccttcttctctccgattccacgattcctcactgtccgaatcgcgactagctttagatcgagctctaggtttccggccaccaaaatccgcaagtcttcactcgccgccgtgatgtttccggaaaattcggttttatcagatgtctgcgcgtttggagtcactagcatcgttgcgttctcgtgcctcggtttctggggagagattggcaaacgtggcatcttcgaccagaaactcatccggaagcttgtgcatataaatattgggctagtttttatgctttgctggccgctgttcagttctggaatccaaggagcacttttcgcatctcttgtacctggactcaatatagtaaggatgctattgctggggcttggagtgtaccacgacgaaggaacaatcaagtcaatgagcagacatggagatcgcagggaactacttaaggggccgctttactatgtactgtcaatcacatcagcctgcatctactattggaaatcatccccaatcgcgattgcggtgatatgcaacctttgcgcaggagatggtatggctgacattgtgggtcggcggtttggaacagagaagcttccttacaacaaaaacaaatcatttgctggtagcattggaatggccaccgccgggtttctagcatctgttgcgtatatgtactactttgcttcatttggttacatcgaggatagcgggggaatgattcttcgtttcctcgtcatctctatagcatcagctcttgtggaatcactcccaataagcaccgacattgacgacaatctcaccatttccttaacctctgccttggccggattcttactcttctaataataccctctcgttgttatgtatcatcaaataaagggtcgagcttgattgctgatatggaggtaaaactgcattcattgttcccatcttcttctgtatgtacgtattagtgaaacatctcatattgttgttgtccacaaatcttatttttcagctgcaattgcagttgggtacaatgttgtaatgttctatccattagtgagacatatgatgacg

SEQ ID NO: 101776 - protein, 314 aa, Arabidopsis thaliana
  peptide (1)..(314): Ceres Seq. ID no. 13608678
CFLVLQKMATTSTTTKLSVLCCSFISSPLVDSPPSLAFFSPIPRFLTVRIATSFRSSSRFPATKIRKSSLAAVMFPENSVLSDVCAFGVTSIVAFSCLGFWGEIGKRGIFDQKLIRKLVHINIGLVFMLCWPLFSSGIQGALFASLVPGLNIVRMLLLGLGVYHDEGTIKSMSRHGDRRELLKGPLYYVLSITSACIYYWKSSPIAIAVICNLCAGDGMADIVGRRFGTEKLPYNKNKSFAGSIGMATAGFLASVAYMYYFASFGYIEDSGGMILRFLVISIASALVESLPISTDIDDNLTISLTSALAGFLLF

SEQ ID NO: 101777 - protein, 307 aa, Arabidopsis thaliana
  peptide (1)..(307): Ceres Seq. ID no. 13608679
MATTSTTTKLSVLCCSFISSPLVDSPPSLAFFSPIPRFLTVRIATSFRSSSRFPATKIRKSSLAAVMFPENSVLSDVCAFGVTSIVAFSCLGFWGEIGKRGIFDQKLIRKLVHINIGLVFMLCWPLFSSGIQGALFASLVPGLNIVRMLLLGLGVYHDEGTIKSMSRHGDRRELLKGPLYYVLSITSACIYYWKSSPIAIAVICNLCAGDGMADIVGRRFGTEKLPYNKNKSFAGSIGMATAGFLASVAYMYYFASFGYIEDSGGMILRFLVISIASALVESLPISTDIDDNLTISLTSALAGFLLF

SEQ ID NO: 101778 - protein, 241 aa, Arabidopsis thaliana
  peptide (1)..(241): Ceres Seq. ID no. 13608680
MFPENSVLSDVCAFGVTSIVAFSCLGFWGEIGKRGIFDQKLIRKLVHINIGLVFMLCWPLFSSGIQGALFASLVPGLNIVRMLLLGLGVYHDEGTIKSMSRHGDRRELLKGPLYYVLSITSACIYYWKSSPIAIAVICNLCAGDGMADIVGRRFGTEKLPYNKNKSFAGSIGMATAGFLASVAYMYYFASFGYIEDSGGMILRFLVISIASALVESLPISTDIDDNLTISLTSALAGFLLF

SEQ ID NO: 101779 - DNA, 1364 bp, Arabidopsis thaliana
  misc_feature (1)..(1364): Ceres Seq. ID no. 13608681
  misc_feature (1)..(1364): Ortholog of  Ceres SEQ ID NO 13659033 as cited in SEQ ID NO 66372
  misc_feature (1)..(1364): Ortholog of  Ceres SEQ ID NO 12625899 as cited in SEQ ID NO 69079
aaaagaatgggttctcttcttcctcttcttggcatctcagtagtctccgccattttctttctggttcttcaacaaccagaacaatcttcttcagccattatactgagcttgaagaaacgccatggaagctcctctggtagtagtggtaaccagtacagttcaagcagaccatcagctggtttccaagggaacaggagcacgtgctctctcttcctcggcacgtgggttcgtgataactcttatcctctctataaaccggcggattgtcccggcgtcgttgagcctgagttcgattgtcagatgtacggtcgtcctgactctgactacctcaagtatcgatggcaacctcagaattgcaatttacccacgttcaatggtgctcagtttctgttgaaaatgaagggcaaaaccataatgtttgcgggtgattcattggggaagaatcaatgggagtctttgatctgccttattgtttcatctgcaccgtccactcggacagaaatgaccagaggcttgcctctctccaccttcagattcttggattatgggataacaatgtcattttacaaagctccgttcttggtggacatagatgctgttcaaggcaagcgtgtgttgaagctggatgagatctctggtaatgccaatgcttggcatgacgctgatctcctcatcttcaacactggtcactggtggagccacaccggatctatgcaaggatgggacttgattcaatcaggcaattcttattaccaagacatggaccgttttgtggcaatggagaaagcacttcgtacttgggcgtattgggtcgaaactcacgttgatagatcccgaacacaagtcttgttcctctccatttctccaacacacgacaacccgagtgactgggcggcatcatcgtcttcaggatccaagaactgctacggagaaacagaaccgatcacaggaacagcttatccagtgagctcctacacagatcagctaagatcagtgattgttgaagtgcttcacgggatgcacaatccggcgtttcttctcgacataacactcctctcttccctaagaaaagacggtcatccgtcagtatacagcggcctcattagcggttcacaaaggtctagaccagaccagtctgcagattgtagccattggtgtttgcctggtttacctgatacatggaaccagttgttgtatacgcttctcatctattagcttctttttaaatctctttccatcaaattattcggttagtaatattttaacacattcgaagagagaatcttaagattaatcacggaatcagtcaattgtataaactttttgaggaaattttctttcaaatgaattataatttttattcc

SEQ ID NO: 101780 - protein, 404 aa, Arabidopsis thaliana
  peptide (1)..(404): Ceres Seq. ID no. 13608682
KRMGSLLPLLGISVVSAIFFLVLQQPEQSSSAIILSLKKRHGSSSGSSGNQYSSSRPSAGFQGNRSTCSLFLGTWVRDNSYPLYKPADCPGVVEPEFDCQMYGRPDSDYLKYRWQPQNCNLPTFNGAQFLLKMKGKTIMFAGDSLGKNQWESLICLIVSSAPSTRTEMTRGLPLSTFRFLDYGITMSFYKAPFLVDIDAVQGKRVLKLDEISGNANAWHDADLLIFNTGHWWSHTGSMQGWDLIQSGNSYYQDMDRFVAMEKALRTWAYWVETHVDRSRTQVLFLSISPTHDNPSDWAASSSSGSKNCYGETEPITGTAYPVSSYTDQLRSVIVEVLHGMHNPAFLLDITLLSSLRKDGHPSVYSGLISGSQRSRPDQSADCSHWCLPGLPDTWNQLLYTLLIY

SEQ ID NO: 101781 - protein, 402 aa, Arabidopsis thaliana
  peptide (1)..(402): Ceres Seq. ID no. 13608683
MGSLLPLLGISVVSAIFFLVLQQPEQSSSAIILSLKKRHGSSSGSSGNQYSSSRPSAGFQGNRSTCSLFLGTWVRDNSYPLYKPADCPGVVEPEFDCQMYGRPDSDYLKYRWQPQNCNLPTFNGAQFLLKMKGKTIMFAGDSLGKNQWESLICLIVSSAPSTRTEMTRGLPLSTFRFLDYGITMSFYKAPFLVDIDAVQGKRVLKLDEISGNANAWHDADLLIFNTGHWWSHTGSMQGWDLIQSGNSYYQDMDRFVAMEKALRTWAYWVETHVDRSRTQVLFLSISPTHDNPSDWAASSSSGSKNCYGETEPITGTAYPVSSYTDQLRSVIVEVLHGMHNPAFLLDITLLSSLRKDGHPSVYSGLISGSQRSRPDQSADCSHWCLPGLPDTWNQLLYTLLIY

SEQ ID NO: 101782 - protein, 304 aa, Arabidopsis thaliana
  peptide (1)..(304): Ceres Seq. ID no. 13608684
MYGRPDSDYLKYRWQPQNCNLPTFNGAQFLLKMKGKTIMFAGDSLGKNQWESLICLIVSSAPSTRTEMTRGLPLSTFRFLDYGITMSFYKAPFLVDIDAVQGKRVLKLDEISGNANAWHDADLLIFNTGHWWSHTGSMQGWDLIQSGNSYYQDMDRFVAMEKALRTWAYWVETHVDRSRTQVLFLSISPTHDNPSDWAASSSSGSKNCYGETEPITGTAYPVSSYTDQLRSVIVEVLHGMHNPAFLLDITLLSSLRKDGHPSVYSGLISGSQRSRPDQSADCSHWCLPGLPDTWNQLLYTLLIY

SEQ ID NO: 101783 - DNA, 929 bp, Arabidopsis thaliana
  misc_feature (1)..(929): Ceres Seq. ID no. 13608686
  misc_feature (1)..(929): Ortholog of  Ceres SEQ ID NO 15175072 as cited in SEQ ID NO 59991
  misc_feature (1)..(929): Ortholog of  Ceres SEQ ID NO 15178850 as cited in SEQ ID NO 0
aaagaaagaaaaaaatgccttcttttgcttttggatctcatcaccatttggcgaatcctacagactcgccgccgtactccgtcgaaattagcatcgacggtgactcctccgactgggattctttgtctcaggtcgatttagagtccggcggtgtaccggcgccggagaaacagctacattccggtggtaagaagaggagaactaggaggagaaagaggaggaagaagaagaagaagaagaaaggtggaagagattgcaggatctgtcatcttcctttagagactaacaaagaagctgaagatgaagatgaagaagaagaagatgattctgatgatgatgaagatgaagaagatgaagaagaagaagaagaagaagaagaagaagaatattatggtttgcctttgcaattaggttgctcttgtaaaggtgatttgggtgttgctcatagtaagtgtgctgagacttggtttaagatcaaaggaaacatgacatgtgagatatgcggcgcaatggctctaaacgtggctggtgaacaatctaatccggagagcactgcttctacacattcacaagcagctgcgggacaatctctaactcagacagagccacgaggaatctggcatggtcgccctgttatgaacttcttacttgctgctatggtcttcgccttcgttgtttcttggctttttcacttcaaagtcctcaagtgaaacgttttccatctctctctctctctctctctctctttcgcccacccgcacgagctcactcttctcctgttcttgagccgcttgcaatcgctgaatcaatccctcctgttgcttgattattcacacgttttgtagctgtaaaaacttggtagtgtttagattgttgtaacttgtgagatttacattttgtataatattgttctctgctccggcttcgtg

SEQ ID NO: 101784 - protein, 235 aa, Arabidopsis thaliana
  peptide (1)..(235): Ceres Seq. ID no. 13608687
RKKKMPSFAFGSHHHLANPTDSPPYSVEISIDGDSSDWDSLSQVDLESGGVPAPEKQLHSGGKKRRTRRRKRRKKKKKKKGGRDCRICHLPLETNKEAEDEDEEEEDDSDDDEDEEDEEEEEEEEEEEYYGLPLQLGCSCKGDLGVAHSKCAETWFKIKGNMTCEICGAMALNVAGEQSNPESTASTHSQAAAGQSLTQTEPRGIWHGRPVMNFLLAAMVFAFVVSWLFHFKVLK

SEQ ID NO: 101785 - protein, 231 aa, Arabidopsis thaliana
  peptide (1)..(231): Ceres Seq. ID no. 13608688
MPSFAFGSHHHLANPTDSPPYSVEISIDGDSSDWDSLSQVDLESGGVPAPEKQLHSGGKKRRTRRRKRRKKKKKKKGGRDCRICHLPLETNKEAEDEDEEEEDDSDDDEDEEDEEEEEEEEEEEYYGLPLQLGCSCKGDLGVAHSKCAETWFKIKGNMTCEICGAMALNVAGEQSNPESTASTHSQAAAGQSLTQTEPRGIWHGRPVMNFLLAAMVFAFVVSWLFHFKVLK

SEQ ID NO: 101786 - DNA, 1619 bp, Arabidopsis thaliana
  misc_feature (1)..(1619): Ceres Seq. ID no. 13608693
  misc_feature (1)..(1619): Ortholog of  Ceres SEQ ID NO 14312212 as cited in SEQ ID NO 54399
  misc_feature (1)..(1619): Ortholog of  Ceres SEQ ID NO 15225341 as cited in SEQ ID NO 55222
  misc_feature (1)..(1619): Ortholog of  Ceres SEQ ID NO 14311755 as cited in SEQ ID NO 57271
  misc_feature (1)..(1619): Ortholog of  Ceres SEQ ID NO 15171156 as cited in SEQ ID NO 58259
  misc_feature (1)..(1619): Ortholog of  Ceres SEQ ID NO 14302212 as cited in SEQ ID NO 66507
  misc_feature (1)..(1619): Ortholog of  Ceres SEQ ID NO 13653980 as cited in SEQ ID NO 69253
attgtttagattccaggtcaaactgtgatccattatctttgctactaaactaagttcttttctctgatcgaatcaaaaagttttcaactttctaaatttttttagttctaaggaaaaaacctctccgagaatggttttatcggtgaagcaaacactctctccgaaaatcggacttttccgacgaaacccttcatcctcactaggaagatctcctgtttctctctcgtttccatcgacggagcttccaaaacgcaccgttttagccgtgtcaaagccgcttcatctctcttcttctctgagagctaagtctccggtagtgagatgtgaagcttatgaagctgaccgatcagagcctcatccgatcggtgatgatgctgcggcggcggaaacgaaatcagaggcggctaagaaattgaagatcgggatttactttgctacttggtgggctttgaacgttgtgttcaatatctacaacaagaaggtcttgaacgcttatccttacccatggcttacctcgacgctttctcttgccgctggttcgttgatgatgcttatctcttgggctgttgggatcgttgagactcccaagacggattttgatttctggaaaactctttttccggttgctgtggcacacacaattggtcatgtggctgcaacggtgagtatgtcaaaggttgctgtttctttcactcacatcatcaagagtggtgaacctgcgtttagtgtgcttgtctcgaggtttattttgggtgaaaccttccctacttcggtttacttgtctctcattccaatcattggtggttgcgctctgtctgcccttaccgagcttaacttcaacatgattggtttcatgggagctatgatttcgaacttggctttcgtgttccgtaacatcttctcgaagaagggaatgaagggaaagtctgtgagcgggatgaactactacgcctgtctctcaatgctgtccctattgatcctcactccctttgccattgctgttgaaggacctcagatgtgggtcgatggctggcagacagcgctcgctactgtcggaccacagtttgtctggtgggtggttgcgcagagtgtgttctatcacctctacaaccaagtgtcttacatgtctttagaccaaatctctcccttgacgtttagtgttggtaacaccatgaaacgtatctccgtcattgtctcctccatcattatcttccgcactccagtccagcccgtcaatgctcttggagcagccattgctatccttggaaccttcttgtattcccaggcaaagctctgatgcgaaagacataagagtgtaataagggtctggtgttgagctcctgacttcggttaaaaccgggaaaagagcttaatgtagatatttgtcctcaataatgaaagaaatgatgagattggacactaccatgtttagagtgtgttaggcagtttttttttttttacttttgagtttttttgaatttgggggaatgagaagattgcctctttgtaactaaagtgggaaatagatatttgtccccttgagaataagacaccctgcaactctctttttaacttggagagacatattataaaaagtagagaatatttatctcgagatt

SEQ ID NO: 101787 - protein, 388 aa, Arabidopsis thaliana; identical to SEQ ID NO: 22731
  peptide (1)..(388): Ceres Seq. ID no. 13608694

SEQ ID NO: 101788 - protein, 250 aa, Arabidopsis thaliana; identical to SEQ ID NO: 22732
  peptide (1)..(250): Ceres Seq. ID no. 13608695

SEQ ID NO: 101789 - protein, 249 aa, Arabidopsis thaliana; identical to SEQ ID NO: 22733
  peptide (1)..(249): Ceres Seq. ID no. 13608696

SEQ ID NO: 101790 - DNA, 1625 bp, Arabidopsis thaliana
  misc_feature (1)..(1625): Ceres Seq. ID no. 13608697
  misc_feature (1)..(1625): Ortholog of  Ceres SEQ ID NO 13647121 as cited in SEQ ID NO 151
  misc_feature (1)..(1625): Ortholog of  Ceres SEQ ID NO 15176411 as cited in SEQ ID NO 54468
  misc_feature (1)..(1625): Ortholog of  Ceres SEQ ID NO 14307131 as cited in SEQ ID NO 59707
tttcaaggagaagaatatatttgactcagagagagattcattcagtaatggcagcctcaggcacctctgctactttcagagcctccgtttcttcagctccttcctcttcttcccaattgacccatttgaaatcacccttcaaagctgtcaaatatacgcctctgccatcgtctcgctccaagtcatcatccttctccgtctcctgcaccatcgccaaggacccgcctgttctcatggccgccggatctgacccggccctgtggcaacgacccgattcgttcggtcggtttgggaagtttggtgggaagtatgtacctgaaacccttatgcacgctctatctgagcttgaatccgctttctatgctcttgccaccgacgatgatttccagagagagttggctggaatcttgaaggactatgtgggtagagaaagtcctctgtattttgcagagaggcttacggagcattacaggcgcgagaatggcgaagggcctcttatatacttgaagagagaagacttgaatcacacaggagctcacaagattaacaacgctgtggctcaggctcttcttgctaagcggttggggaagaagaggattattgctgagacaggagcgggtcaacatggtgtggctacagctactgtgtgtgcccgttttggtttggagtgtattatctatatgggtgctcaagatatggagagacaagcactcaatgtgttcagaatgcgacttcttggtgccgaggtgagaggagtccactctggaacagcgacattgaaggatgcgacatctgaagcgataagagattgggtgacaaatgtggagactacccattacatattgggatctgtggcgggtcctcatccttaccccatgatggtcagagactttcacgctgtgattggtaaagaaacaaggaaacaagcgttggagaaatggggcgggaagccggatgtcttggtggcttgtgtcggtggtggttcaaacgctatgggactcttccatgaatttgtgaatgacacagaggtccggatgatcggtgtggaagcagcgggattcggattggacagtggcaaacacgctgctacattgacaaagggagatgttggtgtcctccatggagctatgagttacttgctgcaagatgatgatggacaaatcattgaaccacactccatcagtgcaggattggactaccctggagtcggacccgagcacagtttctttaaagacatgggacgggctgaatactatagcataaccgacgaagaagcgttggaagcgttcaagagagtgtcgcggttagagggaatcattccagcactggagacctcacacgcactagcttacctcgagaagctatgtcccacattatcagacgggacgagagtggtcttgaacttcagcggaagaggagataaagatgttcagacagtggctaaatatcttgatgtttgaagagagaaacacttatgtttgtttttcagttattcagacagaatgaaatcctttttgtacttgtaatctgtttgtactttacttctctctggtcagtacgtttccaacaaaattggaaatagaaaaagattacgaagagaacgaaatttgaataaatgtattatc

SEQ ID NO: 101791 - protein, 485 aa, Arabidopsis thaliana
  peptide (1)..(485): Ceres Seq. ID no. 13608698
SRRRIYLTQREIHSVMAASGTSATFRASVSSAPSSSSQLTHLKSPFKAVKYTPLPSSRSKSSSFSVSCTIAKDPPVLMAAGSDPALWQRPDSFGRFGKFGGKYVPETLMHALSELESAFYALATDDDFQRELAGILKDYVGRESPLYFAERLTEHYRRENGEGPLIYLKREDLNHTGAHKINNAVAQALLAKRLGKKRIIAETGAGQHGVATATVCARFGLECIIYMGAQDMERQALNVFRMRLLGAEVRGVHSGTATLKDATSEAIRDWVTNVETTHYILGSVAGPHPYPMMVRDFHAVIGKETRKQALEKWGGKPDVLVACVGGGSNAMGLFHEFVNDTEVRMIGVEAAGFGLDSGKHAATLTKGDVGVLHGAMSYLLQDDDGQIIEPHSISAGLDYPGVGPEHSFFKDMGRAEYYSITDEEALEAFKRVSRLEGIIPALETSHALAYLEKLCPTLSDGTRVVLNFSGRGDKDVQTVAKYLDV

SEQ ID NO: 101792 - protein, 470 aa, Arabidopsis thaliana; identical to SEQ ID NO: 22870
  peptide (1)..(470): Ceres Seq. ID no. 13608699

SEQ ID NO: 101793 - protein, 408 aa, Arabidopsis thaliana; identical to SEQ ID NO: 22871
  peptide (1)..(408): Ceres Seq. ID no. 13608700

SEQ ID NO: 101794 - DNA, 1794 bp, Arabidopsis thaliana
  misc_feature (1)..(1794): Ceres Seq. ID no. 13608701
  misc_feature (1)..(1794): Ortholog of  Ceres SEQ ID NO 13594536 as cited in SEQ ID NO 51382
aaaggtcatatgcttttctccagttcctctctctgtctatctctctcctccttcaataatttctgcaaaccctaactttctcattcggcgctcaagtttctctccaccccttcgagatttggtgcgatgatgttgcgtgctgtttttaggagagcttccattagaggctcttcttctgcttcgggattgggaaaatcattgcaatcctctcgtgttgcagtgtctgctcaatttcattctgtttcagcaacagagacgttggtgcctcgtggaaaccatgctcatagcttccatcaccgttcttgtccagggtgtccagactgttcaaggactattatcaacggttaccaaggcacagccctgcaaagatgggtcaggcccttttcatctgatagtggggatgtcgtggaagctgttgtgccacacatgggtgaatcaatcactgatggcaccctagccgcctttctgaagaaacctggcgatagagtagaagctgatgaggctattgcacaaattgaaactgacaaggttacaatagatattgctagcccagcaagtggtgtgatccaagagtttctagtcaaggaaggagatactgttgaaccaggaaacaaggttgcaagaatttctacatctgcggatgctgtgtctcatgtggcaccctcagaaaaggcaccagagaaacctgctcccaagccttctcctcctgctgagaagcccaaagttgaaagtaccaaagttgcagagaaacccaaggcaccatcaccgccacctccaccgccatccaaacagtcagctaaagaaccgcagcttccacctaaggatagggaaagacgggttcctatgacaagacttcgcaaacgggtggcaactaggttgaaagactctcagaacacttttgcgttgctgacaactttcaatgaagttgatatgactaatctgatgaagctccgatctcagtacaaggatgcttttcttgaaaagcacggagtgaagttggggcttatgtctggtttcattaaggctgctgttagtgccctccagcaccaacctgtagtaaatgcagttatcgatggagatgatatcatttacagagactacgtggatatcagtatcgctgttggtacctctaagggtcttgtagttccagtcataagagatgctgacaaaatgaactttgctgacatagagaaaacaataaacggtctcgctaagaaggctactgaaggaaccatatcaatcgatgagatggcaggaggatcattcacagtatcaaatggtggtgtctatggaagtcttataagcactcctatcatcaaccctcctcagtctgctattcttggaatgcattcaattgtgcaacgtccaatggttgtgggaggaagcgtagttccgaggccaatgatgtatgtcgcgctgacttacgatcataggctaattgatggaagagaggctgtgtatttcttgcgccgtattaaggatgttgtggaagatcctcagaggcttcttctcgacatatgataaagatccaagacagaagagatcataagtttctgtctttttaccagtttcctttcaggtaaaaccattacggatactgcaatctgcaaatgatgctttgaaaaaagaacgaaactttttttttggagttttcttaatagttttaagagtttttgccgggcgaggaaagcatcggtgtattgagttttcttttattttataatattcatacagtttgaacaaaatgttacaattttgactttcaaaaaataatgccactgataattattggtt

SEQ ID NO: 101795 - protein, 464 aa, Arabidopsis thaliana
  peptide (1)..(464): Ceres Seq. ID no. 13608702
MMLRAVFRRASIRGSSSASGLGKSLQSSRVAVSAQFHSVSATETLVPRGNHAHSFHHRSCPGCPDCSRTIINGYQGTALQRWVRPFSSDSGDVVEAVVPHMGESITDGTLAAFLKKPGDRVEADEAIAQIETDKVTIDIASPASGVIQEFLVKEGDTVEPGNKVARISTSADAVSHVAPSEKAPEKPAPKPSPPAEKPKVESTKVAEKPKAPSPPPPPPSKQSAKEPQLPPKDRERRVPMTRLRKRVATRLKDSQNTFALLTTFNEVDMTNLMKLRSQYKDAFLEKHGVKLGLMSGFIKAAVSALQHQPVVNAVIDGDDIIYRDYVDISIAVGTSKGLVVPVIRDADKMNFADIEKTINGLAKKATEGTISIDEMAGGSFTVSNGGVYGSLISTPIINPPQSAILGMHSIVQRPMVVGGSVVPRPMMYVALTYDHRLIDGREAVYFLRRIKDVVEDPQRLLLDI

SEQ ID NO: 101796 - protein, 463 aa, Arabidopsis thaliana
  peptide (1)..(463): Ceres Seq. ID no. 13608703
MLRAVFRRASIRGSSSASGLGKSLQSSRVAVSAQFHSVSATETLVPRGNHAHSFHHRSCPGCPDCSRTIINGYQGTALQRWVRPFSSDSGDVVEAVVPHMGESITDGTLAAFLKKPGDRVEADEAIAQIETDKVTIDIASPASGVIQEFLVKEGDTVEPGNKVARISTSADAVSHVAPSEKAPEKPAPKPSPPAEKPKVESTKVAEKPKAPSPPPPPPSKQSAKEPQLPPKDRERRVPMTRLRKRVATRLKDSQNTFALLTTFNEVDMTNLMKLRSQYKDAFLEKHGVKLGLMSGFIKAAVSALQHQPVVNAVIDGDDIIYRDYVDISIAVGTSKGLVVPVIRDADKMNFADIEKTINGLAKKATEGTISIDEMAGGSFTVSNGGVYGSLISTPIINPPQSAILGMHSIVQRPMVVGGSVVPRPMMYVALTYDHRLIDGREAVYFLRRIKDVVEDPQRLLLDI

SEQ ID NO: 101797 - protein, 364 aa, Arabidopsis thaliana
  peptide (1)..(364): Ceres Seq. ID no. 13608704
MGESITDGTLAAFLKKPGDRVEADEAIAQIETDKVTIDIASPASGVIQEFLVKEGDTVEPGNKVARISTSADAVSHVAPSEKAPEKPAPKPSPPAEKPKVESTKVAEKPKAPSPPPPPPSKQSAKEPQLPPKDRERRVPMTRLRKRVATRLKDSQNTFALLTTFNEVDMTNLMKLRSQYKDAFLEKHGVKLGLMSGFIKAAVSALQHQPVVNAVIDGDDIIYRDYVDISIAVGTSKGLVVPVIRDADKMNFADIEKTINGLAKKATEGTISIDEMAGGSFTVSNGGVYGSLISTPIINPPQSAILGMHSIVQRPMVVGGSVVPRPMMYVALTYDHRLIDGREAVYFLRRIKDVVEDPQRLLLDI

SEQ ID NO: 101798 - DNA, 2342 bp, Arabidopsis thaliana
  misc_feature (1)..(2342): Ceres Seq. ID no. 13608705
  misc_feature (1)..(2342): Ortholog of  Ceres SEQ ID NO 14314144 as cited in SEQ ID NO 54403
  misc_feature (1)..(2342): Ortholog of  Ceres SEQ ID NO 13656177 as cited in SEQ ID NO 64997
atggtaaaaattaagaagactaagggaatgaggaagcagattcgtctcaacgaagtcgaagaaataaatcttctgaagcagtggatcgaatcacagaaaccggattcaggattcaatccactttcattgcgtcctcttcctaaagattcgaagatcggaaagtccgaagacggcaaaaacggcaccgttttctctcggtatgcaggtgtgaggaagtttgctcagttacctatatcggataaaacgaaaagaggattgaaagatgcgaaatacgttgatatgactgatgttcagagtgctgctattcctcatgctttatgtggaagagatattcttggtgctgctagaactgggtctggcaaaactctggcttttgttattccgattctggagaagttacatagggagagatggagtcctgaagatggtgtgggatgtataattatatctccaacaagggaattggcagcccagacattcggtgttttgaataaagtaggaaagtttcataagtttagtgcggggctcttaattggtggtcgtgaaggagttgatgttgagaaggagagagttcatgagatgaatattttggtgtgtgctcctggtaggcttcttcagcacatggatgagactccaaacttcgaatgtccacagcttcagattctgattttagatgaggccgaccgtgtccttgattctgcgttcaaggggcagttggatcctataatctcacagttgcctaagcacagacaaactttgcttttctctgcaactcaaactaagaaagtcaaggatctagcaagactcagtttgagagatcctgagtacattagtgtacatgcagaggcggttacagctactccaacttccttgatgcagactgtgatgattgtcccagttgaaaagaaattagacatgttatggagtttcatcaaaactcaccttaattccaggattcttgttttcctctccaccaagaaacaggtcaaatttgtgcatgaagcattcaacaagctccggcctggaatacctttgaagagtcttcatggaaaaatgagtcaggaaaaaaggatgggagtgtactctcagttcattgagagacaatcagttctgttctgtactgatgttcttgctagaggtcttgattttgataaggctgtggactgggttgttcaggtggattgtcctgaagatgtagcttcttatattcaccgggttgggcgtacagctcgtttctatactcaagggaagtcgctcctctttctgacaccttcagaggaaaaaatgattgagaaattacaagaagctaaagtgcctataaaactcatcaaggcaaacaaccaaaagttgcaggaggtttctaggctcttggctgctttgttagtcaagtatccagatcttcaaggtgttgctcagagagccttcatcacatatttgaggtccatccacaaaagaagggacaaagagatttttgatgtgtcaaagctgtcgattgaaaacttttctgcttcacttggtctgccaatgactcccagaatccgattcacaaaccttaaaacgaagaaaaagggggtatatgagagttctatcgctatggagattgagaatgcacaggaatatgaagcacctctggttgtcaaaaaagatcttcttggtgaagatttagaagaagaggattttgctctcaagccacgtaaagagggcaaagtagtagaaaaatcaaccaaggaagaagaagttctcataccaggaaatcgtgttttgaaaaacaagaagctgaagatcaatctacacagaccatttgggtcgagggttgtgcttgatgaggaaggcaattctttggctcccttagcaagtgtagctgctgaagcagggactgaagtagcccttgatgaagagagaatgaatgattactataagaaagtgggagcggaaatgaggaaagctgatatagaggacaagaaagtagacaaggaaaggaggagggaaaagagaatgaaacagaagattaagaggaagagaggagccatggaggatgaagaagaagaagaagaagaagaccatgatggttctggatcatcagatgatgaaactggaagaaacagcaaaagagcaaagaaaatcgtctctgacaatgaagaaaatggaggaaaaatcaatacagattctctttccgtagctgatcttgaagaaatggctctcaaattcataacgcaatgataagatcttaattcgtgtagttaatttacatcagttctgtggaaaattttgtgatttgtttccacctaacgattgcacgtttgttaccgtcttactatgaggaaaagaaggatttgcatttt

SEQ ID NO: 101799 - protein, 739 aa, Arabidopsis thaliana
  peptide (1)..(739): Ceres Seq. ID no. 13608706
MVKIKKTKGMRKQIRLNEVEEINLLKQWIESQKPDSGFNPLSLRPLPKDSKIGKSEDGKNGTVFSRYAGVRKFAQLPISDKTKRGLKDAKYVDMTDVQSAAIPHALCGRDILGAARTGSGKTLAFVIPILEKLHRERWSPEDGVGCIIISPTRELAAQTFGVLNKVGKFHKFSAGLLIGGREGVDVEKERVHEMNILVCAPGRLLQHMDETPNFECPQLQILILDEADRVLDSAFKGQLDPIISQLPKHRQTLLFSATQTKKVKDLARLSLRDPEYISVHAEAVTATPTSLMQTVMIVPVEKKLDMLWSFIKTHLNSRILVFLSTKKQVKFVHEAFNKLRPGIPLKSLHGKMSQEKRMGVYSQFIERQSVLFCTDVLARGLDFDKAVDWVVQVDCPEDVASYIHRVGRTARFYTQGKSLLFLTPSEEKMIEKLQEAKVPIKLIKANNQKLQEVSRLLAALLVKYPDLQGVAQRAFITYLRSIHKRRDKEIFDVSKLSIENFSASLGLPMTPRIRFTNLKTKKKGVYESSIAMEIENAQEYEAPLVVKKDLLGEDLEEEDFALKPRKEGKVVEKSTKEEEVLIPGNRVLKNKKLKINLHRPFGSRVVLDEEGNSLAPLASVAAEAGTEVALDEERMNDYYKKVGAEMRKADIEDKKVDKERRREKRMKQKIKRKRGAMEDEEEEEEEDHDGSGSSDDETGRNSKRAKKIVSDNEENGGKINTDSLSVADLEEMALKFITQ

SEQ ID NO: 101800 - protein, 730 aa, Arabidopsis thaliana
  peptide (1)..(730): Ceres Seq. ID no. 13608707
MRKQIRLNEVEEINLLKQWIESQKPDSGFNPLSLRPLPKDSKIGKSEDGKNGTVFSRYAGVRKFAQLPISDKTKRGLKDAKYVDMTDVQSAAIPHALCGRDILGAARTGSGKTLAFVIPILEKLHRERWSPEDGVGCIIISPTRELAAQTFGVLNKVGKFHKFSAGLLIGGREGVDVEKERVHEMNILVCAPGRLLQHMDETPNFECPQLQILILDEADRVLDSAFKGQLDPIISQLPKHRQTLLFSATQTKKVKDLARLSLRDPEYISVHAEAVTATPTSLMQTVMIVPVEKKLDMLWSFIKTHLNSRILVFLSTKKQVKFVHEAFNKLRPGIPLKSLHGKMSQEKRMGVYSQFIERQSVLFCTDVLARGLDFDKAVDWVVQVDCPEDVASYIHRVGRTARFYTQGKSLLFLTPSEEKMIEKLQEAKVPIKLIKANNQKLQEVSRLLAALLVKYPDLQGVAQRAFITYLRSIHKRRDKEIFDVSKLSIENFSASLGLPMTPRIRFTNLKTKKKGVYESSIAMEIENAQEYEAPLVVKKDLLGEDLEEEDFALKPRKEGKVVEKSTKEEEVLIPGNRVLKNKKLKINLHRPFGSRVVLDEEGNSLAPLASVAAEAGTEVALDEERMNDYYKKVGAEMRKADIEDKKVDKERRREKRMKQKIKRKRGAMEDEEEEEEEDHDGSGSSDDETGRNSKRAKKIVSDNEENGGKINTDSLSVADLEEMALKFITQ

SEQ ID NO: 101801 - protein, 646 aa, Arabidopsis thaliana
  peptide (1)..(646): Ceres Seq. ID no. 13608708
MTDVQSAAIPHALCGRDILGAARTGSGKTLAFVIPILEKLHRERWSPEDGVGCIIISPTRELAAQTFGVLNKVGKFHKFSAGLLIGGREGVDVEKERVHEMNILVCAPGRLLQHMDETPNFECPQLQILILDEADRVLDSAFKGQLDPIISQLPKHRQTLLFSATQTKKVKDLARLSLRDPEYISVHAEAVTATPTSLMQTVMIVPVEKKLDMLWSFIKTHLNSRILVFLSTKKQVKFVHEAFNKLRPGIPLKSLHGKMSQEKRMGVYSQFIERQSVLFCTDVLARGLDFDKAVDWVVQVDCPEDVASYIHRVGRTARFYTQGKSLLFLTPSEEKMIEKLQEAKVPIKLIKANNQKLQEVSRLLAALLVKYPDLQGVAQRAFITYLRSIHKRRDKEIFDVSKLSIENFSASLGLPMTPRIRFTNLKTKKKGVYESSIAMEIENAQEYEAPLVVKKDLLGEDLEEEDFALKPRKEGKVVEKSTKEEEVLIPGNRVLKNKKLKINLHRPFGSRVVLDEEGNSLAPLASVAAEAGTEVALDEERMNDYYKKVGAEMRKADIEDKKVDKERRREKRMKQKIKRKRGAMEDEEEEEEEDHDGSGSSDDETGRNSKRAKKIVSDNEENGGKINTDSLSVADLEEMALKFITQ

SEQ ID NO: 101802 - DNA, 1479 bp, Arabidopsis thaliana
  misc_feature (1)..(1479): Ceres Seq. ID no. 13608728
  misc_feature (1)..(1479): Ortholog of  Ceres SEQ ID NO 14311136 as cited in SEQ ID NO 56694
tacaggcgtgctctctctcctctctccatctatctccctctcttcgccggagatcgcccttcaccaattccactatagtagcaaaaacaagtgaagcacaatggggatcatcgaaaggattaaagaaatcgaggccgagatggctcggactcagaagaataaagctacagagtatcatcttggtcagctcaaggcaaagattgcaaaactcaggacacaactgttggagcctccaaaaggtgctagtggaggcggggaaggttttgaagttaccaagtatggtcatggacgtgttgcacttataggatttcctagtgtcggaaagtccacgcttttgactatgttaactggaacacattctgaagcagcctcatatgaatttacaacacttacatgcatccctggtgtaattcactacaacgacacaaagattcagcttctcgatcttcctgggattattgaaggtgcttcggaaggaaaggggcgaggaaggcaggttattgctgttgcaaagtcttccgaccttgtattgatggttcttgatgcctcaaaaagcgaaggccacaggcaaatattgactaaggaacttgaggcagtgggcttgcgactaaacaaaactcctccgcagatatactttaaaaagaaaaagactggtggaatctctttcaacactacagcacccttgactcacattgatgagaagctctgttatcaaatcctgcatgaatacaagattcacaatgctgaggtgctatttcgtgagaatgccacagtggatgactttattgatgtcattgaaggcaaccgcaagtatattaagtgtgtttatgtctacaacaaaatagatgttgttggaattgatgatgtggatagactatcccggcagccaaattccattgttattagctgcaatcttaagcttaacttagacagactacttgcaaggatgtgggacgaaatgggccttgtgagagtttactcgaagccgcaaggccagcaaccagatttcgatgagccttttgtcctctcatctgatcgaggtggctgcacagtggaagacttctgtaaccacgtccacaggactctggtgaaggatatgaagtatgcactcgtttggggcacaagcacaaggcacaatccacagaattgtggtctttctcaacatcttgaagacgaagatgttgttcagatcgtcaagaaaaaggagagagacgaaggaggaagaggccggttcaagtcacactcaaacgcccctgctagaattgcagacagagagaaaaaagctcctcttaagcaataagcttttagctgataagtcatctccatacatccatctccaccatcatagtcgtggatggtttcacctgagtaagatttactatgttgtatctgaatccgttttgttgttttctctcacaatataagttttggaacaattttacttttttgagatacaaatggaagtacgagttcctattt

SEQ ID NO: 101803 - protein, 399 aa, Arabidopsis thaliana
  peptide (1)..(399): Ceres Seq. ID no. 13608729
MGIIERIKEIEAEMARTQKNKATEYHLGQLKAKIAKLRTQLLEPPKGASGGGEGFEVTKYGHGRVALIGFPSVGKSTLLTMLTGTHSEAASYEFTTLTCIPGVIHYNDTKIQLLDLPGIIEGASEGKGRGRQVIAVAKSSDLVLMVLDASKSEGHRQILTKELEAVGLRLNKTPPQIYFKKKKTGGISFNTTAPLTHIDEKLCYQILHEYKIHNAEVLFRENATVDDFIDVIEGNRKYIKCVYVYNKIDVVGIDDVDRLSRQPNSIVISCNLKLNLDRLLARMWDEMGLVRVYSKPQGQQPDFDEPFVLSSDRGGCTVEDFCNHVHRTLVKDMKYALVWGTSTRHNPQNCGLSQHLEDEDVVQIVKKKERDEGGRGRFKSHSNAPARIADREKKAPLKQ

SEQ ID NO: 101804 - protein, 386 aa, Arabidopsis thaliana
  peptide (1)..(386): Ceres Seq. ID no. 13608730
MARTQKNKATEYHLGQLKAKIAKLRTQLLEPPKGASGGGEGFEVTKYGHGRVALIGFPSVGKSTLLTMLTGTHSEAASYEFTTLTCIPGVIHYNDTKIQLLDLPGIIEGASEGKGRGRQVIAVAKSSDLVLMVLDASKSEGHRQILTKELEAVGLRLNKTPPQIYFKKKKTGGISFNTTAPLTHIDEKLCYQILHEYKIHNAEVLFRENATVDDFIDVIEGNRKYIKCVYVYNKIDVVGIDDVDRLSRQPNSIVISCNLKLNLDRLLARMWDEMGLVRVYSKPQGQQPDFDEPFVLSSDRGGCTVEDFCNHVHRTLVKDMKYALVWGTSTRHNPQNCGLSQHLEDEDVVQIVKKKERDEGGRGRFKSHSNAPARIADREKKAPLKQ

SEQ ID NO: 101805 - protein, 319 aa, Arabidopsis thaliana
  peptide (1)..(319): Ceres Seq. ID no. 13608731
MLTGTHSEAASYEFTTLTCIPGVIHYNDTKIQLLDLPGIIEGASEGKGRGRQVIAVAKSSDLVLMVLDASKSEGHRQILTKELEAVGLRLNKTPPQIYFKKKKTGGISFNTTAPLTHIDEKLCYQILHEYKIHNAEVLFRENATVDDFIDVIEGNRKYIKCVYVYNKIDVVGIDDVDRLSRQPNSIVISCNLKLNLDRLLARMWDEMGLVRVYSKPQGQQPDFDEPFVLSSDRGGCTVEDFCNHVHRTLVKDMKYALVWGTSTRHNPQNCGLSQHLEDEDVVQIVKKKERDEGGRGRFKSHSNAPARIADREKKAPLKQ

SEQ ID NO: 101806 - DNA, 1297 bp, Arabidopsis thaliana
  misc_feature (1)..(1297): Ceres Seq. ID no. 13608739
  misc_feature (1)..(1297): Ortholog of  Ceres SEQ ID NO 12613953 as cited in SEQ ID NO 68388
aatccatttttagtttctatcatataaatagcttcttgtgtttttcacgcccttcttctttgtatttccgcctcccccgagaaaacgaaaaccctagtttcagaggcatctccagacaccgaaaatggcggaaggactcgttttgaagggcaccatgcgtgcacacactgacatggtgacggcaatcgccaccccaatcgataacgcagacatcatcgtctcagcttcccgcgacaaatccatcattttgtggaaactcaccaaggacgacaaagcctacggtgtagctcagaggcgtctcactggtcactctcacttcgttgaggatgttgttctctcctccgatggacaattcgcgctttccggcagctgggacggcgagctccgtctttgggatcttgctgctggtgtctccactcgtagattcgttggacacaccaaggacgtgctctccgtcgccttctcactcgacaaccgtcagatcgtctctgcatctcgtgaccgtacgatcaagctgtggaacactcttggtgagtgcaagtacaccatttcagaaggtggtgagggacaccgtgattgggttagctgcgtcagattcagccctaacacgcttcagccgacgattgtatctgcttcgtgggacaagaccgtgaaagtgtggaacctttcgaactgcaagctcagatcgactcttgctggtcacaccggttacgtgagcactgtggctgtatcacctgatggttctctttgtgcaagtggaggcaaagacggtgttgttttgctgtgggatttggctgaggggaagaagctttactctcttgaagctaactctgtgatccatgctctttgcttcagtcccaacaggtactggctctgtgctgcaactgaacatggtattaagatttgggaccttgagagcaagagcattgttgaggatttgaaggttgatctcaaggctgaggctgaaaaggctgacaacagtggtcctgctgccaccaagaggaaggttatttactgcacaagccttaactggagcgctgatggaagcaccctcttcagtggttacaccgatggagtcattagagtttggggtattggtcgttactagtaatctcatcacttgtgctgtcgttgctctctgctatctgcttgttggttttatctatcacttatgtttttatcgacaactcatgaagtaccttgaggtttttggaaggatgtttgttttcttgtcaatctaggtttttgcttctttatcttatcgttcgagatcttggtttttagagttacttctccc

SEQ ID NO: 101807 - protein, 327 aa, Arabidopsis thaliana; identical to SEQ ID NO: 27691
  peptide (1)..(327): Ceres Seq. ID no. 13608740

SEQ ID NO: 101808 - protein, 317 aa, Arabidopsis thaliana; identical to SEQ ID NO: 27692
  peptide (1)..(317): Ceres Seq. ID no. 13608741

SEQ ID NO: 101809 - protein, 311 aa, Arabidopsis thaliana; identical to SEQ ID NO: 27693
  peptide (1)..(311): Ceres Seq. ID no. 13608742

SEQ ID NO: 101810 - DNA, 833 bp, Arabidopsis thaliana
  misc_feature (1)..(833): Ceres Seq. ID no. 13608743
  misc_feature (1)..(833): Ortholog of  Ceres SEQ ID NO 13660598 as cited in SEQ ID NO 67591
gctctttatctctctctccaactttacctttaacaaaaaaaaaatggcaagcgcgaatccagaaaccgccaaacccacgcctgcaacggtggacatggctaatccagaggagcttaagaaagttttcgaccagtttgactccaacggcgacggcaagatctcagtcctcgaactcggcggtgtgtttaaggctatggggacttcctacacagagacggaactcaaccgcgtgctcgaagaagtcgatacagatcgcgacggttacatcaacctcgacgaattctcaactctctgtcgctcgtcttcctccgccgcagagatccgtgacgctttcgatctctacgatcaggacaaaaacggactgatctccgcctctgagcttcaccaggtgcttaaccgtctcgggatgtcttgctctgttgaagactgtactcgtatgatcggacctgtggatgctgacggcgatgggaatgttaatttcgaagagtttcagaagatgatgacgtcgtcttctctcctcaacagcaatggatccgccgctcctccttcgacctagggagttttccagatttcagatctggatttcgggaataagaataactatggaaattaggtactcttttcttcttaaatgtgatcaatcatcatcagtctaacttcaatcggatctcttttcattcatacatggttgagatttagatctgaatatggatatatatcgtttgctctccttgttcaaaacaaatttggtttctaatttcttattctgcattctcgagttatgtatcagtttcgaactatatttgcatagaaacaaaaaccagattctctgc

SEQ ID NO: 101811 - protein, 184 aa, Arabidopsis thaliana; identical to SEQ ID NO: 30875
  peptide (1)..(184): Ceres Seq. ID no. 13608744

SEQ ID NO: 101812 - protein, 170 aa, Arabidopsis thaliana; identical to SEQ ID NO: 30876
  peptide (1)..(170): Ceres Seq. ID no. 13608745

SEQ ID NO: 101813 - protein, 153 aa, Arabidopsis thaliana; identical to SEQ ID NO: 30877
  peptide (1)..(153): Ceres Seq. ID no. 13608746

SEQ ID NO: 101814 - DNA, 1503 bp, Arabidopsis thaliana
  misc_feature (1)..(1503): Ceres Seq. ID no. 13608747
  misc_feature (1)..(1503): Ortholog of  Ceres SEQ ID NO 14315193 as cited in SEQ ID NO 57743
attatacaaaaactgtatcatcatcatcatcaagcttgaaatcactctctttcatccttccccgcgcactgtgtctcgctctctctctcccacatttccattatctcctttactttctttctttgagaatgtcttctacaacaatcggcgagcacatcagactccgacgagctagaaaccaaacaatccgtcatctccacgccgccgacgatgatccgccgctaagccacgtcgttcttccgatttcacaacctaatcgcttctgtaactccgcaatgtcttccttctttcccctcccgacttcctcctccaacgaaagcacgaggaagaaaccgtaccaaacgtcgtcgtttcgagggatgggttgctatgccgcagcagcagcagcagctcaagaggtttctgttccctccgtcattcgctactccgcggatttggatgccagaattagaaaagataagaagaagaagaagcataagcataagaaaaagaaaaagaagaataaaggaagctacgaagatggttcgattaggattttaagcgaagaagctagagacgttattgatgtttggtgcagacctggattaggcttctccacggatgctgtaattggtcgatcggttgatcctcctcggggaaggaatattccgtcgtctcgtcgcaaaattgatgtggataacaacaattataatcacacactgggttcttctgttcttcccattcggtttctcaatcaagaaactcattctcatgatatcttcaactctgattctacttttgtgacatcatcacgcgctgaaccaacgatgttgtcaagtagatgtcgtggccatcttccacgctcttaccctgatgatcttaccgagatgaggatgctccagaatggttttgtaatgggaagaataacagattcccgtgataactaccacgaattgaggctcgatgttgatagcatgtcatacgagcaacttcttgagcttggtgatagaattggttatgtgaatactggactaaaagaaagcgagatacatcgttgtcttgggaaaatcaaaccatccgtatcacatactcttgttgatagaaaatgtagcatctgtcaggatgagtatgagagagaggatgaggttggggaattgaactgtggacacagctttcatgtccattgcgtgaaacaatggctttcgaggaagaatgcttgtccggtctgtaagaaggcagcatatggcaagccttaaaagacttttgtatctcgtcgggtttctgatagctcaagatctttcaagccaccttgctgtatagagatctgtatcatctgatacttgattcatatttgttgtttttgcatttagcaatcacaattttttttttttaagatcttatattctttgttgggtctatttatgtgattgaaatcaagagtttgaaatctatgttttctgttgcctaggtagatttaagacaggtagagagtaatttagcatatagcatacacgcacgtaacta

SEQ ID NO: 101815 - protein, 410 aa, Arabidopsis thaliana; identical to SEQ ID NO: 36979
  peptide (1)..(410): Ceres Seq. ID no. 13608748

SEQ ID NO: 101816 - protein, 368 aa, Arabidopsis thaliana; identical to SEQ ID NO: 36980
  peptide (1)..(368): Ceres Seq. ID no. 13608749

SEQ ID NO: 101817 - protein, 319 aa, Arabidopsis thaliana; identical to SEQ ID NO: 36981
  peptide (1)..(319): Ceres Seq. ID no. 13608750

SEQ ID NO: 101818 - DNA, 1587 bp, Arabidopsis thaliana
  misc_feature (1)..(1587): Ceres Seq. ID no. 13608763
  misc_feature (1)..(1587): Ortholog of  Ceres SEQ ID NO 13585587 as cited in SEQ ID NO 65515
atggagaaggacgatttcttgaggagtggtcatggaagagaagaaagccatgatgagatgagaaaacttgattcatctcacgatgattctcatcaagaacacgaccatattataagatccaagttggactcaactaaagtcgaaatggatgaggctaaagaggaaaatcgaagactaaagtcatcattgagtaaaatcaagaaagattttgacatccttcaaacacaatacaaccaattaatggccaaacataacgaaccaaccaagttccaatcaaaagggcatcatcaagacaaaggcgaagatgaagacagagaaaaagttaacgaacgtgaagaacttgtctcgttgagcctaggcagacggttaaattcagaggttccaagtggttcgaataaagaagaaaaaaataaagatgttgaagaagcggaaggtgacagaaattatgatgataatgaaaaaagcagtattcaagggttgagtatggggattgaatacaaggctttgagtaatcctaatgagaagttagagattgatcataatcaagaaaccatgtcgttggagattagtaacaataataagatcagatcacaaaatagttttgggtttaagaatgatggagatgatcatgaagatgaagatgagattttgcctcaaaaccttgttaagaaaactagggtttcggtgagatcaagatgtgagacaccaacgatgaacgacggatgtcaatggaggaaatatggccagaaaatagctaaaggcaatccatgtccccgagcttactatcgttgcaccattgcagcttcttgtccagtaagaaaacaggtgcaaagatgttcagaagatatgtctatacttatctcaacgtacgaaggaacacataaccatccacttcccatgtcagcaactgccatggcctctgccacttccgctgccgcctccatgcttctctccggcgcctcctcctcctcatccgccgcagctgatcttcatggccttaacttctctctttccggcaacaacatcactccaaaacctaaaactcatttcctccaatccccttcttcttctggccatccgaccgtcactctcgacctcacaacctcctcctcgtcgcagcaaccgttcttatcaatgctcaatagattcagctctcctccaagtaatgtctcacgatctaatagttatccttcaaccaatctcaacttttcaaacaacaccaacacattgatgaattggggtggtggtggtaatcccagtgatcaataccgtgcagcttacggcaacattaacacccatcagcaatcaccttaccacaaaatcattcaaacccgaaccgccgggtcatctttcgatccgtttggaagatcatcttcatcacattctccacaaataaatcttgatcatatcggaatcaagaacatcatcagtcaccaagtgccatctttaccggctgaaacaatcaaggcaatcacgacagatccaagtttccaatcggctttggcgacagctctatcttccatcatgggcggcgatttaaagattgatcacaatgtgactagaaatgaagctgagaagagcccttaa

SEQ ID NO: 101819 - protein, 528 aa, Arabidopsis thaliana
  peptide (1)..(528): Ceres Seq. ID no. 13608764
MEKDDFLRSGHGREESHDEMRKLDSSHDDSHQEHDHIIRSKLDSTKVEMDEAKEENRRLKSSLSKIKKDFDILQTQYNQLMAKHNEPTKFQSKGHHQDKGEDEDREKVNEREELVSLSLGRRLNSEVPSGSNKEEKNKDVEEAEGDRNYDDNEKSSIQGLSMGIEYKALSNPNEKLEIDHNQETMSLEISNNNKIRSQNSFGFKNDGDDHEDEDEILPQNLVKKTRVSVRSRCETPTMNDGCQWRKYGQKIAKGNPCPRAYYRCTIAASCPVRKQVQRCSEDMSILISTYEGTHNHPLPMSATAMASATSAAASMLLSGASSSSSAAADLHGLNFSLSGNNITPKPKTHFLQSPSSSGHPTVTLDLTTSSSSQQPFLSMLNRFSSPPSNVSRSNSYPSTNLNFSNNTNTLMNWGGGGNPSDQYRAAYGNINTHQQSPYHKIIQTRTAGSSFDPFGRSSSSHSPQINLDHIGIKNIISHQVPSLPAETIKAITTDPSFQSALATALSSIMGGDLKIDHNVTRNEAEKSP

SEQ ID NO: 101820 - protein, 509 aa, Arabidopsis thaliana
  peptide (1)..(509): Ceres Seq. ID no. 13608765
MRKLDSSHDDSHQEHDHIIRSKLDSTKVEMDEAKEENRRLKSSLSKIKKDFDILQTQYNQLMAKHNEPTKFQSKGHHQDKGEDEDREKVNEREELVSLSLGRRLNSEVPSGSNKEEKNKDVEEAEGDRNYDDNEKSSIQGLSMGIEYKALSNPNEKLEIDHNQETMSLEISNNNKIRSQNSFGFKNDGDDHEDEDEILPQNLVKKTRVSVRSRCETPTMNDGCQWRKYGQKIAKGNPCPRAYYRCTIAASCPVRKQVQRCSEDMSILISTYEGTHNHPLPMSATAMASATSAAASMLLSGASSSSSAAADLHGLNFSLSGNNITPKPKTHFLQSPSSSGHPTVTLDLTTSSSSQQPFLSMLNRFSSPPSNVSRSNSYPSTNLNFSNNTNTLMNWGGGGNPSDQYRAAYGNINTHQQSPYHKIIQTRTAGSSFDPFGRSSSSHSPQINLDHIGIKNIISHQVPSLPAETIKAITTDPSFQSALATALSSIMGGDLKIDHNVTRNEAEKSP

SEQ ID NO: 101821 - protein, 480 aa, Arabidopsis thaliana
  peptide (1)..(480): Ceres Seq. ID no. 13608766
MDEAKEENRRLKSSLSKIKKDFDILQTQYNQLMAKHNEPTKFQSKGHHQDKGEDEDREKVNEREELVSLSLGRRLNSEVPSGSNKEEKNKDVEEAEGDRNYDDNEKSSIQGLSMGIEYKALSNPNEKLEIDHNQETMSLEISNNNKIRSQNSFGFKNDGDDHEDEDEILPQNLVKKTRVSVRSRCETPTMNDGCQWRKYGQKIAKGNPCPRAYYRCTIAASCPVRKQVQRCSEDMSILISTYEGTHNHPLPMSATAMASATSAAASMLLSGASSSSSAAADLHGLNFSLSGNNITPKPKTHFLQSPSSSGHPTVTLDLTTSSSSQQPFLSMLNRFSSPPSNVSRSNSYPSTNLNFSNNTNTLMNWGGGGNPSDQYRAAYGNINTHQQSPYHKIIQTRTAGSSFDPFGRSSSSHSPQINLDHIGIKNIISHQVPSLPAETIKAITTDPSFQSALATALSSIMGGDLKIDHNVTRNEAEKSP

SEQ ID NO: 101822 - DNA, 1868 bp, Arabidopsis thaliana
  misc_feature (1)..(1868): Ceres Seq. ID no. 13608767
  misc_feature (1)..(1868): Ortholog of  Ceres SEQ ID NO 13659971 as cited in SEQ ID NO 67565
  misc_feature (1)..(1868): Ortholog of  Ceres SEQ ID NO 13500385 as cited in SEQ ID NO 67583
atgggtaactgtaacgcctgtgtaaggccagactcaaaagaatcaaaaccatcttcaaagccgaaaaaacccaatcgagatcggaaattaaacccattcgccggagatttcaccagatccccagctccaatacgtgttctcaaagatgtaatccctatgagcaatcaaactcagatcagcgacaaatacatcttaggtcgtgaattaggtcgaggcgaattcggaatcacttacctctgtactgatcgtgaaacccacgaagctttagcttgcaaatcgatttcaaagcgaaagcttcgaacagctgtcgatatcgaagacgttcgtcgtgaggtagcgattatgtctactttacctgagcatccaaacgtagttaagcttaaggctagttatgaggataacgagaacgtgcatctggttatggagctttgtgaaggaggtgagctttttgatcggattgttgctagaggacattacacggagcgtgctgctgcagctgttgcgagaacgattgctgaggttgtgatgatgtgtcactctaatggagttatgcatcgagatttgaaacctgagaatttcttgtttgctaataaaaaggagaattctccactaaaggctattgattttggcttgtctgtgttcttcaaacctggagataagtttacagagattgtaggaagtccgtattatatggctccagaagtgttgaagagagattatggaccaggggttgatgtgtggagtgccggagttattatctatatcttgctctgtggtgttcctccgttttgggctgagactgaacaaggtgttgctcttgcgatcttgcggggagttcttgattttaagagagacccttggcctcagatatcagagagtgccaagagccttgtgaagcagatgttggatcctgatccgactaagcggttaactgctcagcaagtgttagctcacccatggatacagaatgcaaagaaagctcccaatgttcctttaggagatatagtcagatctaggttgaagcagttctctatgatgaacagattcaaaaagaaagttcttcgtgtaattgcggagcacttgtctattcaagaggttgaagtgataaagaacatgttctcactgatggatgatgacaaggatggtaaaataacttacccggaactcaaagctgggcttcagaaggtcggttcacaacttggtgaaccagagatcaaaatgttgatggaagtggcggatgtcgatggaaatgggtttctggattatggagagtttgtagctgtgataattcacttgcagaagatagagaatgatgaacttttcaaactagcttttatgtttttcgacaaagatggaagtacatacattgaacttgatgagctacgggaagctttagcggatgagttaggcgagccagacgccagtgttctaagcgacatcatgcgtgaagttgacactgacaaggacggacgtataaactatgatgagtttgtgacgatgatgaaagctggaactgactggagaaaggcatcgagacaatattcaagagagaggttcaaaagcttaagcattaacttgatgaaagatgggtcattgcatctccatgacgctctcactggacaaactgttcctgtttaaatttattcgttatcaccaaaaacagagcaatgctccgttttttccccatttcataaattgggaattttccgggcttgttctttgagggatgggaattttacggaagctatggttctttacatatataaacattttacattgtattttgtatgtaatgttttgttcaaaggttgtatttttattgtctcaaagcccctaaaccaaagagtcaaaggaaagatctttattac

SEQ ID NO: 101823 - protein, 545 aa, Arabidopsis thaliana
  peptide (1)..(545): Ceres Seq. ID no. 13608768
MGNCNACVRPDSKESKPSSKPKKPNRDRKLNPFAGDFTRSPAPIRVLKDVIPMSNQTQISDKYILGRELGRGEFGITYLCTDRETHEALACKSISKRKLRTAVDIEDVRREVAIMSTLPEHPNVVKLKASYEDNENVHLVMELCEGGELFDRIVARGHYTERAAAAVARTIAEVVMMCHSNGVMHRDLKPENFLFANKKENSPLKAIDFGLSVFFKPGDKFTEIVGSPYYMAPEVLKRDYGPGVDVWSAGVIIYILLCGVPPFWAETEQGVALAILRGVLDFKRDPWPQISESAKSLVKQMLDPDPTKRLTAQQVLAHPWIQNAKKAPNVPLGDIVRSRLKQFSMMNRFKKKVLRVIAEHLSIQEVEVIKNMFSLMDDDKDGKITYPELKAGLQKVGSQLGEPEIKMLMEVADVDGNGFLDYGEFVAVIIHLQKIENDELFKLAFMFFDKDGSTYIELDELREALADELGEPDASVLSDIMREVDTDKDGRINYDEFVTMMKAGTDWRKASRQYSRERFKSLSINLMKDGSLHLHDALTGQTVPV

SEQ ID NO: 101824 - protein, 493 aa, Arabidopsis thaliana
  peptide (1)..(493): Ceres Seq. ID no. 13608769
MSNQTQISDKYILGRELGRGEFGITYLCTDRETHEALACKSISKRKLRTAVDIEDVRREVAIMSTLPEHPNVVKLKASYEDNENVHLVMELCEGGELFDRIVARGHYTERAAAAVARTIAEVVMMCHSNGVMHRDLKPENFLFANKKENSPLKAIDFGLSVFFKPGDKFTEIVGSPYYMAPEVLKRDYGPGVDVWSAGVIIYILLCGVPPFWAETEQGVALAILRGVLDFKRDPWPQISESAKSLVKQMLDPDPTKRLTAQQVLAHPWIQNAKKAPNVPLGDIVRSRLKQFSMMNRFKKKVLRVIAEHLSIQEVEVIKNMFSLMDDDKDGKITYPELKAGLQKVGSQLGEPEIKMLMEVADVDGNGFLDYGEFVAVIIHLQKIENDELFKLAFMFFDKDGSTYIELDELREALADELGEPDASVLSDIMREVDTDKDGRINYDEFVTMMKAGTDWRKASRQYSRERFKSLSINLMKDGSLHLHDALTGQTVPV

SEQ ID NO: 101825 - protein, 431 aa, Arabidopsis thaliana
  peptide (1)..(431): Ceres Seq. ID no. 13608770
MSTLPEHPNVVKLKASYEDNENVHLVMELCEGGELFDRIVARGHYTERAAAAVARTIAEVVMMCHSNGVMHRDLKPENFLFANKKENSPLKAIDFGLSVFFKPGDKFTEIVGSPYYMAPEVLKRDYGPGVDVWSAGVIIYILLCGVPPFWAETEQGVALAILRGVLDFKRDPWPQISESAKSLVKQMLDPDPTKRLTAQQVLAHPWIQNAKKAPNVPLGDIVRSRLKQFSMMNRFKKKVLRVIAEHLSIQEVEVIKNMFSLMDDDKDGKITYPELKAGLQKVGSQLGEPEIKMLMEVADVDGNGFLDYGEFVAVIIHLQKIENDELFKLAFMFFDKDGSTYIELDELREALADELGEPDASVLSDIMREVDTDKDGRINYDEFVTMMKAGTDWRKASRQYSRERFKSLSINLMKDGSLHLHDALTGQTVPV

SEQ ID NO: 101826 - DNA, 999 bp, Arabidopsis thaliana
  misc_feature (1)..(999): Ceres Seq. ID no. 13608771
  misc_feature (1)..(999): Ortholog of  Ceres SEQ ID NO 15178847 as cited in SEQ ID NO 1145
  misc_feature (1)..(999): Ortholog of  Ceres SEQ ID NO 14311253 as cited in SEQ ID NO 56483
  misc_feature (1)..(999): Ortholog of  Ceres SEQ ID NO 13597435 as cited in SEQ ID NO 64073
  misc_feature (1)..(999): Ortholog of  Ceres SEQ ID NO 13656209 as cited in SEQ ID NO 64393
aatattctgaaaatatctttctctcgatgaaacttgtctcctccggccaaccttaacccttaagcgaacggtgttcctttgcggattgcgatcgttccgtcgatcccttcatcgcccgatctaaatctctaatcgtgtcggagattaaaagcagaggttttgtggtgaatcatgtctgatgtcccttcttgttctagcggtaatgatacaaacaacaatgattcgagtaacttcgaatgtaacatctgcttagacttggctcaagatcctattgtcactctctgtggtcacttgttctgttggccttgtttatacaaatggctccatctccattctcaatctaaggactgtcctgtttgcaaagccgtgatcgaagaagacagattggttcctttgtacggtagaggtaaatcgtctgctgaccctcggtccaagtccattccgggtctcgaagtgcctaaccgtccatcgggacagagacccgaaactgcacaacctcctgatcctaaccatggttttgctcatcatcatgggtttggagggttcatgggaggttttgctgctccgatggcgagtgcgcggttcgggaatgttacattgtctgcagcgtttggcggtttgattccttctttgttcaacctccatttccatggtttccctgatgcagccatgtatggagctgctgcttctggcggcttccctcacggtttctcgaatccgtttcatggaggacactcgcatatgcatagttaccagcggcacacgggtcgacaaggacaacaagaccatcacttgaggatattgttactcattgttttcgtcgttgttgtgttttctctcttcttgagctagtgaggaaatcgatttagctaactgtatttcgctttttattctagattttattgcataaaaacatgggaaaatatgtgctgtgagttggcttgtaaactgctactttagcaaattgttcatatattaataaaacctgtcggattctct

SEQ ID NO: 101827 - protein, 226 aa, Arabidopsis thaliana; identical to SEQ ID NO: 26013
  peptide (1)..(226): Ceres Seq. ID no. 13608772

SEQ ID NO: 101828 - DNA, 1205 bp, Arabidopsis thaliana
  misc_feature (1)..(1205): Ceres Seq. ID no. 13608777
  misc_feature (1)..(1205): Ortholog of  Ceres SEQ ID NO 14307351 as cited in SEQ ID NO 54892
atctctcttcttctctctctgcttcttcttgtgggacaaaccctaattattttacttcgatatctctccacttttcccgctcaatcatctgatctttccctctctcagcaatgcatgatcttcgattttctatcagtgttcaaagctgaaaaaaatcgaactgggtctgttgatttcttcaggtctaaaatcagattagattagagaagaagaagaagaatgctggaagctgtagatagctcaggagtggtgaatggaggattcccgcagattcagagcttttacggcgattgcagtagtgaagaagagttatcggtattgccacgtcatacaaaagtggtggtcaccggaaacaaccggacgaaatcggtgcttgttggtcttcaaggtgttgtcaaaaaagctgtcggtctcggtggttggcattggctggttttgacaaatggaatagaagtaaagttgcagaggaatgcgcttagtgtccttgaacctcctactggaaacgaagaagacgatgatcttgatttcgaaaacacacagaggaatggctctgatatgacatctgaggacacactgaagcctcataagtcgaagctaagagggcagagatcatctcggtcatctcacaagacgatgagcaggtctctatcatctgactcgcaatcaaaaagttcgggttttactcctcctgaaaacatgaaggttgatcttagcaaattggaaatgcctgctttactgaattattggcgacattttaaccttgtggatgcaattccaaatccatcaaaggagcaactaattgacattgttcaaaggcacttcatgtctcagcaaatggatgagcttcaggttattgtggggtttgtccaagctgcaaagagaatgaagaaggcttgcaagtttcaatccaaagaatccagaaacactgatcttaactgcatcagctaaagaaaagccctgactcttaacaaatcctgtatgtacggtacatcaacttgtttaaccatttgtggcttgctaagtttagttcttctagtgatgtttggctaaagggtagatgttgtttcttctttgcttctgttgtttagccaatgtaagtaccatcaaaaaaaccaaataactctctaaagctccctattggaaactatcttgtctgatacgatctggagtgaccggtatgttgttagaatgtaaatatgtttggt

SEQ ID NO: 101829 - protein, 242 aa, Arabidopsis thaliana; identical to SEQ ID NO: 24833
  peptide (1)..(242): Ceres Seq. ID no. 13608778

SEQ ID NO: 101830 - protein, 130 aa, Arabidopsis thaliana; identical to SEQ ID NO: 24834
  peptide (1)..(130): Ceres Seq. ID no. 13608779

SEQ ID NO: 101831 - DNA, 777 bp, Arabidopsis thaliana
  misc_feature (1)..(777): Ceres Seq. ID no. 13608780
  misc_feature (1)..(777): Ortholog of  Ceres SEQ ID NO 14304941 as cited in SEQ ID NO 53358
  misc_feature (1)..(777): Ortholog of  Ceres SEQ ID NO 15176197 as cited in SEQ ID NO 58416
atgagagtgaagaggcagaagaaaaacaggagaaccgtgagattcttcacggtctgttacggattccgtcaaccctacaaagtcctttgcgacggcactttcgtccaccatcttgtcactaatgagatcactcccgccgacactgctgtctctgaactcctcggaggtcccgtcaagctcttcaccaccagatgtgtgattgcggagttggagaaactgggtaaagattttgcggaatctctcgaagctgcccagacgcttaatacagcaacatgtgagcacgaggaggcaaaaacagcagacgagtgtttgtcagaggtaataggggtacaaaatactgagcatttcttccttggtactcaggacgcggagtttaggagaaagcttcagcaggagtctatagttcctcttgtgtttggtctaaggaacatactgctgattgatcaaccttctgatttccaacgtcagagtgccaaagactctgaaaataagcgcttaactatgaccgatacggaaaaaaagttgttggtgaaacggactgcgaaaatcatagcttctaatagaaaagaagcaacaattgcaaatgaagaatggggaatgcctcgagtagtttctacaaaaaatggacttggtgtgaaggatagacctcagttcaagcgaaatagagccaagggtccaaacccactttcatgcatgaagaaaaagaaggagaatcctcaatccaaatccaaagccgattctaactctaatgcacaaaagcaaagacgacccgtgtaa

SEQ ID NO: 101832 - protein, 258 aa, Arabidopsis thaliana
  peptide (1)..(258): Ceres Seq. ID no. 13608781
MRVKRQKKNRRTVRFFTVCYGFRQPYKVLCDGTFVHHLVTNEITPADTAVSELLGGPVKLFTTRCVIAELEKLGKDFAESLEAAQTLNTATCEHEEAKTADECLSEVIGVQNTEHFFLGTQDAEFRRKLQQESIVPLVFGLRNILLIDQPSDFQRQSAKDSENKRLTMTDTEKKLLVKRTAKIIASNRKEATIANEEWGMPRVVSTKNGLGVKDRPQFKRNRAKGPNPLSCMKKKKENPQSKSKADSNSNAQKQRRPV

SEQ ID NO: 101833 - DNA, 1333 bp, Arabidopsis thaliana
  misc_feature (1)..(1333): Ceres Seq. ID no. 13608790
  misc_feature (1)..(1333): Ortholog of  Ceres SEQ ID NO 12612330 as cited in SEQ ID NO 56418
aaatttcgtgtgattttctaagacttgagtaatcttgttttccgaaattttctcaccaagctcgaacacaaagatcggccatggctacgctcttcaccgtcgctcgtccttcttcactcctctatgtttcctccataaatccaagcaagaccttctctccttctatctccctaaaacttaactctctctctttctcttttggttatcgtcccaagccactccggttttctaaaatccgatcttctctgccctcggaatctgaatcggaatccgacctagatgcgtctgcagttacagatgaatggggtgagaaacctggagatgcaaatgagcccgactctcagccagataatgtgaccgtgaatgtgattacggacgaatggggcgagaaatccggacccgaacttgaggaatccgggacccggtttatggaatcggatcctccaaggaacgaagacgagtggggaggagaaattggaggagaaactgaagccgacgctggaaatggaagtgcggtgtctgacccgacttgggagctgaaaaggtgtttggcggattcggtgtacggaactgaattaggtttcaaagctgggtcagaagtccgagcggaggttttggagcttgtgaatcaactggaagctctgaatcctactccggctccgttagagaatccagaacttctcgacggcaactgggttttgctgtacactgctttctctgagttgattcctctactagctgcgggttcgacacctttgttgaaagttaaaagcataagtcagtcaatagacacaaacaatctcattatcgacaactccactacactctccagcccttttgcagacttctccttcagtgctactgcttcatttgaagttcgaagcccttcaagaattgaggtttctttcaaagaaggcacgctaaaacccccggtgatcaaatcaagtgtagatctcccagagagtgtgggcgtctttgggcagcagattagcctttcgttgttaaagcagtctttgaaccccttacaagatgtggcagcaaacatttcacgggcactctctggtcagccacctctcaagcttccgtttccaggaaaccgaggcagctcttggctcttgaccacttatctcgacaaggatctcaggatttctagaggagatggtggccttttcgtgcttgccagagaaggaagctctctgcttgagctctgaaatatttgataaagtatatatatagcaggcttcatgtaaaaaccgtaaccactacagtagagacatcttcagaataatgctgaatgcagattattgggcctaatcttaaattttaattatgt

SEQ ID NO: 101834 - protein, 376 aa, Arabidopsis thaliana; identical to SEQ ID NO: 24573
  peptide (1)..(376): Ceres Seq. ID no. 13608791

SEQ ID NO: 101835 - protein, 260 aa, Arabidopsis thaliana; identical to SEQ ID NO: 24574
  peptide (1)..(260): Ceres Seq. ID no. 13608792

SEQ ID NO: 101836 - DNA, 801 bp, Arabidopsis thaliana
  misc_feature (1)..(801): Ceres Seq. ID no. 13608793
  misc_feature (1)..(801): Ortholog of  Ceres SEQ ID NO 15172885 as cited in SEQ ID NO 51883
  misc_feature (1)..(801): Ortholog of  Ceres SEQ ID NO 13594663 as cited in SEQ ID NO 51894
  misc_feature (1)..(801): Ortholog of  Ceres SEQ ID NO 15226128 as cited in SEQ ID NO 60215
  misc_feature (1)..(801): Ortholog of  Ceres SEQ ID NO 14302271 as cited in SEQ ID NO 68360
  misc_feature (1)..(801): Ortholog of  Ceres SEQ ID NO 12635134 as cited in SEQ ID NO 0
  misc_feature (1)..(801): Ortholog of  Ceres SEQ ID NO 13623037 as cited in SEQ ID NO 0
  misc_feature (1)..(801): Ortholog of  Ceres SEQ ID NO 15175141 as cited in SEQ ID NO 0
aatttctgccttacatatcaaaagatagaacacacacacaaataaagcaaagaaacagaatatctttgagatctcctctttatttggagaagacaaaacacagaacaagaattagaaagaagggagagaaagcaaaaatggcactaagaatgtgggcttcttctacagcaaacgctctcaagctttcttcttctgtttccaagtctcatctctctcctttctccttctctagatgcttctccacagttttggagggtttgaagtatgcaaattcacatgagtgggttaaacatgaaggctctgttgccaccattggcatcactgcccatgctcaggaccatttaggtgaagtggtgtttgttgaactgccagaggacaatacttcagtgagcaaagagaaaagctttggagcagtggagagtgtgaaggcaacaagtgagatcttatcaccaatctcaggtgaaatcattgaggttaacaagaagctcacagaatcacctggcttgatcaactcaagcccctatgaagatggttggatgatcaaagtgaaaccaagtagccccgcggagttggaatctttgatgggtccaaaggaatacaccaagttctgcgaggaggaagatgctgctcactaggagggtttctctctgtcttttatgttccaagttctatcaattctcatgcttgttttctaaatttgcatacactctatgaccaacttcacaaaataagagttcaagaagatgaaacagagacctaacaaacacattaagattttttctttcatatatcttgttatcc

SEQ ID NO: 101837 - protein, 210 aa, Arabidopsis thaliana; identical to SEQ ID NO: 35626
  peptide (1)..(210): Ceres Seq. ID no. 13608794

SEQ ID NO: 101838 - protein, 165 aa, Arabidopsis thaliana; identical to SEQ ID NO: 35627
  peptide (1)..(165): Ceres Seq. ID no. 13608795

SEQ ID NO: 101839 - protein, 161 aa, Arabidopsis thaliana; identical to SEQ ID NO: 35628
  peptide (1)..(161): Ceres Seq. ID no. 13608796

SEQ ID NO: 101840 - DNA, 1424 bp, Arabidopsis thaliana
  misc_feature (1)..(1424): Ceres Seq. ID no. 13608797
  misc_feature (1)..(1424): Ortholog of  Ceres SEQ ID NO 15176294 as cited in SEQ ID NO 60388
acaactctgttccaagtcttatcctttcatcatcatcatcacttaccttcttcacagagagagagcttcatcatcatatgtaatgtgagatgtctcttgaacaatgcaacaagaagctctctctttcctctcgtcctctctcccttcccttcaccacaattttccctctctttctcgcctccgcttcaacaattttcccgcactttccttcaaaccaaacacttcatcatcatcttcatcattcttcaaatccccagatataccctctctctcctccaccacaacaacaacaacaaccaccgaaaccctagaatcctcaatccacgagaaactcatttacctcgattcactcggaatcgatttcctaaccctaatcaaccgtcatccacctctcctctccaccgctctctccgccgttgaatcagtcgtcgattacatgaccactccaccaataaacttcactttacaagactttcgccgcctcgtctcaatgtgtccagagcttctcacttcacctttaacctcacacacaatcccagtcatcactttcctcctccgtgaagtcggcgttgactctatctttgacctccgtcaagctttacgacgtcgtcctcgtcttctcgcttgtagcgtcgatcaccagcttagaccaacgctttactttctccagagaatcggaatcttagatccgcataaacatacgtatcttctctcttgtagcgttgacaataaactcgtaccacggattgattacttcgagaagttaggattctcgcggcggagcgccaccgcgatgtttaagagattcccgcagctgtttaattacagtattgctgagaattatgagccgaagttgaagtatttgatggtggagatggggagagatgttagagaggttcttgagtttcctcagtatttctcgtttagtttggagaatcggattaaaccgagacatgaagcttgtgctgcgaaaggtgtgaggtttccattgccggtgatgttgaagactaatgaagctggttttagagatacattggaggtacatttttgtaatgaatgatgatgaagaactcaatgaatgaagaaaccagcctctgcctacattttgagacacacacagggatggtgagttaaatcttgataagagaaagaatgttcatttacaattcacgattccgatgtatttcggtctagttattgttagtgaacgagaaatcaagtgtatgtaagtccagaaaccgtgtagagttgcgatttgcagagaattgtgattctacaattggaggcaagatgatgaatgtgtgaactgattagcgtaacggtttagttattggtcttaagtcttaacagggagaattggttctagagcttttagtccctttgatggttcgtgaaatgccagtggtctatgatcggattctctg

SEQ ID NO: 101841 - protein, 318 aa, Arabidopsis thaliana
  peptide (1)..(318): Ceres Seq. ID no. 13608798
MQQEALSFLSSSLPSLHHNFPSLSRLRFNNFPALSFKPNTSSSSSSFFKSPDIPSLSSTTTTTTTTETLESSIHEKLIYLDSLGIDFLTLINRHPPLLSTALSAVESVVDYMTTPPINFTLQDFRRLVSMCPELLTSPLTSHTIPVITFLLREVGVDSIFDLRQALRRRPRLLACSVDHQLRPTLYFLQRIGILDPHKHTYLLSCSVDNKLVPRIDYFEKLGFSRRSATAMFKRFPQLFNYSIAENYEPKLKYLMVEMGRDVREVLEFPQYFSFSLENRIKPRHEACAAKGVRFPLPVMLKTNEAGFRDTLEVHFCNE

SEQ ID NO: 101842 - protein, 207 aa, Arabidopsis thaliana
  peptide (1)..(207): Ceres Seq. ID no. 13608799
MTTPPINFTLQDFRRLVSMCPELLTSPLTSHTIPVITFLLREVGVDSIFDLRQALRRRPRLLACSVDHQLRPTLYFLQRIGILDPHKHTYLLSCSVDNKLVPRIDYFEKLGFSRRSATAMFKRFPQLFNYSIAENYEPKLKYLMVEMGRDVREVLEFPQYFSFSLENRIKPRHEACAAKGVRFPLPVMLKTNEAGFRDTLEVHFCNE

SEQ ID NO: 101843 - protein, 189 aa, Arabidopsis thaliana; identical to SEQ ID NO: 41769
  peptide (1)..(189): Ceres Seq. ID no. 13608800

SEQ ID NO: 101844 - DNA, 1605 bp, Arabidopsis thaliana
  misc_feature (1)..(1605): Ceres Seq. ID no. 13608809
  misc_feature (1)..(1605): Ortholog of  Ceres SEQ ID NO 13657677 as cited in SEQ ID NO 66119
gacaaacagagagtgatgcgatggaacaagaagaacgttatcagtctcgtctcaaagtctcatcatcttccggcgccgattacgccaccgttacctgagatttaccgaatacctaatcctccaccaaagcttccggagatctcaattcctccgacacttacgctctctccatctcccaaacactccaatttcgtcaatttcctcgagaacaatctccctcaccatcaaacactaacgccacaaactcttcttggattcctccgttccaagatccgtaaccatccgctctacgctcattatgacttcgccgtctttaattgggcagctacactcgacactttccgtcatgatcacgattctttcctctggatgtcgagatcactcgccgccacgcaccggtttgacgatctttatcgtcttctctcttttgtagctgcgaatccatgtccttgttcctcaggtatattctcttgtccagagcttgaacctattttccgatccgccattgatgcgtattgtagagctaggaaaatggattatgctttgttagcgtttgatactatgaagagattgatcgatggtaaaccaaatgttggagtttataacactgttgtgaatggatatgtgaaatctggagatatggataaggctttaaggttttaccagaggatgggaaaggaaagagcaaagccagatgtatgcacgtttaacattctcatcaatggttattgtagaagctctaagtttgatttggcattggatttgttcagggagatgaaggagaaaggttgtgaaccgaatgtggttagcttcaacactcttattagagggtttttgagcagtggtaaaatcgaggaaggtgttaaaatggcttatgagatgattgagctaggttgtagattctcagaagctacttgtgagattcttgttgatgggttgtgtagagaaggtcgggttgacgatgcttgtggattggtgctcgatcttttgaacaagagggttttacctagtgagtttgattatggtagtttggttgagaaactctgcggagaaaacaaggcggttagagcaatggagatgatggaggagctgtggaagaaaggccaaaccccatgtttcattgcttgtactacactcgtcgaagggttgaggaaatcaggaagaacagagaaagcgtcagggtttatggagaagatgatgaatgcaggaattcttcccgatagtgtgacatttaacttgcttcttcgggatctctgcagttctgatcattctactgatgcaaacagattgagacttttggcatcaagcaaaggatatgaacccgatgagacaacgtaccatgttttggtttcggggttcacgaaagaagggagaagaaaggaaggagaagttctagtgaacgagatgttggataaagatatgttgcctgatatctttacatataatagattgatggatggcttgtcctgcactggaaaattctcaaggaaacaagtccggatgttgtaacctgtgtttgatctgtgtaaactagacccaagctatatctatgtatcaacaaattttattttgaacatatgaaatggaaaccaagttggttctttg

SEQ ID NO: 101845 - protein, 502 aa, Arabidopsis thaliana
  peptide (1)..(502): Ceres Seq. ID no. 13608810
DKQRVMRWNKKNVISLVSKSHHLPAPITPPLPEIYRIPNPPPKLPEISIPPTLTLSPSPKHSNFVNFLENNLPHHQTLTPQTLLGFLRSKIRNHPLYAHYDFAVFNWAATLDTFRHDHDSFLWMSRSLAATHRFDDLYRLLSFVAANPCPCSSGIFSCPELEPIFRSAIDAYCRARKMDYALLAFDTMKRLIDGKPNVGVYNTVVNGYVKSGDMDKALRFYQRMGKERAKPDVCTFNILINGYCRSSKFDLALDLFREMKEKGCEPNVVSFNTLIRGFLSSGKIEEGVKMAYEMIELGCRFSEATCEILVDGLCREGRVDDACGLVLDLLNKRVLPSEFDYGSLVEKLCGENKAVRAMEMMEELWKKGQTPCFIACTTLVEGLRKSGRTEKASGFMEKMMNAGILPDSVTFNLLLRDLCSSDHSTDANRLRLLASSKGYEPDETTYHVLVSGFTKEGRRKEGEVLVNEMLDKDMLPDIFTYNRLMDGLSCTGKFSRKQVRML

SEQ ID NO: 101846 - protein, 497 aa, Arabidopsis thaliana
  peptide (1)..(497): Ceres Seq. ID no. 13608811
MRWNKKNVISLVSKSHHLPAPITPPLPEIYRIPNPPPKLPEISIPPTLTLSPSPKHSNFVNFLENNLPHHQTLTPQTLLGFLRSKIRNHPLYAHYDFAVFNWAATLDTFRHDHDSFLWMSRSLAATHRFDDLYRLLSFVAANPCPCSSGIFSCPELEPIFRSAIDAYCRARKMDYALLAFDTMKRLIDGKPNVGVYNTVVNGYVKSGDMDKALRFYQRMGKERAKPDVCTFNILINGYCRSSKFDLALDLFREMKEKGCEPNVVSFNTLIRGFLSSGKIEEGVKMAYEMIELGCRFSEATCEILVDGLCREGRVDDACGLVLDLLNKRVLPSEFDYGSLVEKLCGENKAVRAMEMMEELWKKGQTPCFIACTTLVEGLRKSGRTEKASGFMEKMMNAGILPDSVTFNLLLRDLCSSDHSTDANRLRLLASSKGYEPDETTYHVLVSGFTKEGRRKEGEVLVNEMLDKDMLPDIFTYNRLMDGLSCTGKFSRKQVRML

SEQ ID NO: 101847 - protein, 379 aa, Arabidopsis thaliana
  peptide (1)..(379): Ceres Seq. ID no. 13608812
MSRSLAATHRFDDLYRLLSFVAANPCPCSSGIFSCPELEPIFRSAIDAYCRARKMDYALLAFDTMKRLIDGKPNVGVYNTVVNGYVKSGDMDKALRFYQRMGKERAKPDVCTFNILINGYCRSSKFDLALDLFREMKEKGCEPNVVSFNTLIRGFLSSGKIEEGVKMAYEMIELGCRFSEATCEILVDGLCREGRVDDACGLVLDLLNKRVLPSEFDYGSLVEKLCGENKAVRAMEMMEELWKKGQTPCFIACTTLVEGLRKSGRTEKASGFMEKMMNAGILPDSVTFNLLLRDLCSSDHSTDANRLRLLASSKGYEPDETTYHVLVSGFTKEGRRKEGEVLVNEMLDKDMLPDIFTYNRLMDGLSCTGKFSRKQVRML

SEQ ID NO: 101848 - DNA, 1149 bp, Arabidopsis thaliana
  misc_feature (1)..(1149): Ceres Seq. ID no. 13608817
  misc_feature (1)..(1149): Ortholog of  Ceres SEQ ID NO 13594298 as cited in SEQ ID NO 57803
  misc_feature (1)..(1149): Ortholog of  Ceres SEQ ID NO 13503476 as cited in SEQ ID NO 61978
  misc_feature (1)..(1149): Ortholog of  Ceres SEQ ID NO 12578438 as cited in SEQ ID NO 62201
  misc_feature (1)..(1149): Ortholog of  Ceres SEQ ID NO 12617675 as cited in SEQ ID NO 64656
cacacaaaagaagaaaaagagagaaatgggtaactctttgatctctcttctctcaatcttccacttgctggtgttatggggatcctcagtgaatgcctattggccaccatcacctggttattggccaagctccaaggttggttccctcaacttctacaaaggttttaggaatctttggggtcctcagcatcagagaatggaccaaaatgccctcaccatctggcttgatagaacctcaggaagtggattcaagtcagtgaagccattcagatcaggctactttggagcaaacatcaaactccaacctggctacactgctggagtcatcacatctctctatctatcaaataatgaggcacatccagggttccatgatgaggtagacatagaatttttggggacaacatttgggaagccttacacacttcagacaaatgtgtatattagaggaagtggtgatgggaaaatcattggccgtgagatgaagtttcgcttgtggtttgatccaactaaagattttcaccattatgctattctttggagccctagagaaatcatatttttggtggatgatattcccataagaagatacccaaagaagagtgcgtctacatttcctttaagaccaatgtggctttatggttccatatgggatgcttcttcttgggcaacggaagacggtaaatacaaagccgactataaatatcaacctttcactgctaaatacaccaattttaaagcgctcggctgcaccgcctactcgtcagctcggtgctatccgttgtcggcttcgccataccgttctggcggattaacccgacaacaacaccaagccatgagatgggttcaaacacatagtatggtatacaattattgcaaagattataagcgagaccattctttaacgccggaatgttggcgttaggaaatattcgatgaaagtcccaaagtttgagagttttaatcacatcaaagttaataccagaaagagcttggtacaattttgggatttttttcattactattattatgtggttggttgtttcacgaaaataaattttcttttttttttgacttatcatcttttcttatgtaaatgtatccagtacggtaccatattgttttgtcaatcgtctgtgactgtgtctc

SEQ ID NO: 101849 - protein, 307 aa, Arabidopsis thaliana; identical to SEQ ID NO: 27892
  peptide (1)..(307): Ceres Seq. ID no. 13608818

SEQ ID NO: 101850 - protein, 299 aa, Arabidopsis thaliana; identical to SEQ ID NO: 27893
  peptide (1)..(299): Ceres Seq. ID no. 13608819

SEQ ID NO: 101851 - protein, 242 aa, Arabidopsis thaliana; identical to SEQ ID NO: 27894
  peptide (1)..(242): Ceres Seq. ID no. 13608820

SEQ ID NO: 101852 - DNA, 1304 bp, Arabidopsis thaliana
  misc_feature (1)..(1304): Ceres Seq. ID no. 13608825
  misc_feature (1)..(1304): Ortholog of  Ceres SEQ ID NO 14315518 as cited in SEQ ID NO 60467
  misc_feature (1)..(1304): Ortholog of  Ceres SEQ ID NO 12585444 as cited in SEQ ID NO 62814
aagctcaaagctcaagccgcttctatctctctacatttctctttctgcaatggcgagattagtgcgtgtggctagatcctcctccctctttggctttggtaaccgtttctactctacttcagccgaagctagccacgcgtcgtcgccttcgccgtttcttcacggcggcggagctagcagggttgctccgaaagatagaaatgttcagtgggtgtttttgggatgtcctggtgttggaaaaggaacttacgctagtagactatcaacccttctcggcgttcctcacatcgccaccggcgatctcgtccgtgaagagcttgcatcttctggacctctctctcaaaagctatcggagattgtaaatcagggaaaattggtttctgatgagatcattgtagacttattgtccaaaagacttgaggctggtgaagctagaggtgaatcagggtttatccttgatggctttcctcgtaccatgagacaagctgaaatactgggagatgtaactgacatcgatttggtggtgaatttgaagcttcctgaggaagttttggttgacaaatgccttggaaggagaacatgtagtcaatgtggcaagggttttaatgtagctcacatcaacttaaagggtgagaatggaagacctggaattagtatggatccacttctccctccacatcaatgtatgtcaaagcttgtcactcgagctgatgatactgaagaggtggtgaaagcaaggcttcgtatatacaatgaaacgagccagcctcttgaagaatactaccgtaccaagggaaagcttatggagtttgacttacctggaggcatcccagagtcatggccaaggctattggaagctttaaggcttgacgattacgaggagaaacagtctgtcgcagcataagttcactatcaaatcccggtatttaaaattctttgcatgtggaatacatatgcgtaatcaattttgtgttggaaataaaagtaaaaagaaaaccttagattgtttttcacctcaatagaaataatcatacacacttgcgcaaactattatttttccaccagccggggattttggctccatgagagaaatatgatgtatcatgattgtttgagattgctagtgacattacaggaatgtatcaatacttctacaccacttgttatgcattgagtttaatcgttatgctcttgtgatatgttttttttggaaaatgtgatgaatgatgatattgcggctggccgagctggctggttaaagaactcaaccagacagtaaagtaaaacagccgcatagattaaac

SEQ ID NO: 101853 - protein, 300 aa, Arabidopsis thaliana; identical to SEQ ID NO: 29922
  peptide (1)..(300): Ceres Seq. ID no. 13608826

SEQ ID NO: 101854 - protein, 284 aa, Arabidopsis thaliana; identical to SEQ ID NO: 29923
  peptide (1)..(284): Ceres Seq. ID no. 13608827

SEQ ID NO: 101855 - DNA, 1026 bp, Arabidopsis thaliana
  misc_feature (1)..(1026): Ceres Seq. ID no. 13608828
  misc_feature (1)..(1026): Ortholog of  Ceres SEQ ID NO 13656050 as cited in SEQ ID NO 64724
acctcttatcaaacaccaaaccacaccagaacagaactcagccatggcttcttcttcttcttctcttctaatcctagccgttgcttgtttcgtctcgctaatctcaccggcgatttcacaacaggcttgcaaatcacagaacttgaactccgccggtccgttcgatagttgcgaagaccttccggtactcaattcctacctccattacacctacaattcctcaaattcatctctctccgtcgctttcgtcgccactccatctcaagccaacggtggctgggtcgcttgggctattaaccctacggggactaagatggctggttctcaagccttcctcgcttacagatccggcggtggtgcggctccggtcgtgaagacgtacaacattagcagctacagcagtctcgtcgaaggtaaacttgcttttgatttttggaatctacgcgccgagtcgttaagcggcggtaggatcgccattttcacgacggttaaggttccggcgggagctgatagtgtgaatcaggtatggcagatcggcggcaatgttaccaacggtcgtcccggtgtacatcctttcggtcctgataatttgggctcccaccgtgtgttgagtttcacagaagatgcagcaccgggctctgctccttcgccgggatctgctccggcgccgggcaccagtggctcgactaccccaggaacagcggcgggaggtccagggaacgcggggtcattgacgaggaacgtaaattttggggtcaatttgggaattttggttttgttgggttctatttttattttctgaatggggatctctctctagtctctcttctcttcttgagtctctctctatttttttttttttttggtttgttcgaacaataatggtgccccatacttttgtactgttttagtcttagggccatttactttgtttcaccacattacttagagttattggattgtatggaccattactatcatgagattgagatcatcttatcttcttaaaatatctatttgccatcc

SEQ ID NO: 101856 - protein, 266 aa, Arabidopsis thaliana
  peptide (1)..(266): Ceres Seq. ID no. 13608829
PLIKHQTTPEQNSAMASSSSSLLILAVACFVSLISPAISQQACKSQNLNSAGPFDSCEDLPVLNSYLHYTYNSSNSSLSVAFVATPSQANGGWVAWAINPTGTKMAGSQAFLAYRSGGGAAPVVKTYNISSYSSLVEGKLAFDFWNLRAESLSGGRIAIFTTVKVPAGADSVNQVWQIGGNVTNGRPGVHPFGPDNLGSHRVLSFTEDAAPGSAPSPGSAPAPGTSGSTTPGTAAGGPGNAGSLTRNVNFGVNLGILVLLGSIFIF

SEQ ID NO: 101857 - protein, 252 aa, Arabidopsis thaliana
  peptide (1)..(252): Ceres Seq. ID no. 13608830
MASSSSSLLILAVACFVSLISPAISQQACKSQNLNSAGPFDSCEDLPVLNSYLHYTYNSSNSSLSVAFVATPSQANGGWVAWAINPTGTKMAGSQAFLAYRSGGGAAPVVKTYNISSYSSLVEGKLAFDFWNLRAESLSGGRIAIFTTVKVPAGADSVNQVWQIGGNVTNGRPGVHPFGPDNLGSHRVLSFTEDAAPGSAPSPGSAPAPGTSGSTTPGTAAGGPGNAGSLTRNVNFGVNLGILVLLGSIFIF

SEQ ID NO: 101858 - protein, 162 aa, Arabidopsis thaliana
  peptide (1)..(162): Ceres Seq. ID no. 13608831
MAGSQAFLAYRSGGGAAPVVKTYNISSYSSLVEGKLAFDFWNLRAESLSGGRIAIFTTVKVPAGADSVNQVWQIGGNVTNGRPGVHPFGPDNLGSHRVLSFTEDAAPGSAPSPGSAPAPGTSGSTTPGTAAGGPGNAGSLTRNVNFGVNLGILVLLGSIFIF

SEQ ID NO: 101859 - DNA, 824 bp, Arabidopsis thaliana
  misc_feature (1)..(824): Ceres Seq. ID no. 13608844
  misc_feature (1)..(824): Ortholog of  Ceres SEQ ID NO 12608429 as cited in SEQ ID NO 60231
agactctctcttctcatctctctctctctctctctcttcaaaccctaaaaattcacgcattttggcacagttaagttcgctgaatcccgttcctcttcctctgtctctctccccaagaaaatcactcagatcaaagctcaaatttcggatctcacagctgtcgcttcggtagaggaaaggatgaccagagaacatcctcccgagcctcttgatttcttcatctggactgttgaggatgttgggtcttggctcgaggagataaaccttgggggctaccgccagattttcaaagaaaatggtgtcaatggagaatatctagaaagcatgtctgtgtttactaccgagcagatccttcacttcataaggaggcatcacatgaagtggggagacttcatcaccctctgtaaagaactcagaaggattaaagtggcttgcttgaaaggtgagcagagagttagacggccatggtgggcaccgtcttgtctatccgtagtctttgttaaggcagccaaacgcaaccgacagtctcgtgttgtatctctcaagcttgaatcttgacattacactttggctgtttatgtacgtacttgtctctcttctcttctcttgttttcttttcctttttttttttttttggtttgggtttgtttgtggcacatgcactaggaagaaacaaactcaagtcaaaaaagctgtttggcttggtgaaatcttgcaagcgggaaaaaaattatgcgttttgtactttggtggtgtatacaaagcttgctctcagatgtttaatatatggcttgtgcaatctttatgtgacagataatagtgtg

SEQ ID NO: 101860 - protein, 125 aa, Arabidopsis thaliana; identical to SEQ ID NO: 27736
  peptide (1)..(125): Ceres Seq. ID no. 13608845

SEQ ID NO: 101861 - protein, 79 aa, Arabidopsis thaliana
  peptide (1)..(79): Ceres Seq. ID no. 13608846
MYVLVSLLFSCFLFLFFFFWFGFVCGTCTRKKQTQVKKAVWLGEILQAGKKLCVLYFGGVYKACSQMFNIWLVQSLCDR

SEQ ID NO: 101862 - protein, 77 aa, Arabidopsis thaliana; identical to SEQ ID NO: 27737
  peptide (1)..(77): Ceres Seq. ID no. 13608847

SEQ ID NO: 101863 - DNA, 2143 bp, Arabidopsis thaliana
  misc_feature (1)..(2143): Ceres Seq. ID no. 13608852
  misc_feature (1)..(2143): Ortholog of  Ceres SEQ ID NO 14303201 as cited in SEQ ID NO 67304
acattttcatgacgtctcgtttgatctacacatattgtttgacctctctctatctctaagtttacatattcgctaatgcgttgagctcaaagcatccacgacaagataagtagaaaaaaaaagacatccttttttggttcttcttcttcttcttcttcggacaaaaaggaagaaggtgttgactgattcttaagatgggtttgtgttaagtttgtgagtatagttgaaagtttcagttcaatttcaatggagcctccaataggatttcgagcttctttattccaattcttactcttccttccttatttcattggattgctatttctgggtttcatcaaaggtattgttttgtgcccactcgtatgcctcgttgtgactataggcaactccgcggtcatactgagtcttctaccagtccacatcgtttggactttctattcaatcgtgagtgccaaacaagtaggaccaatcttgaagatctttctatgcttatgtcttcctgctgccatcattctctggcctattgttggtattttaggaagtgttttgggaggagctttatatggtttcttctccccaattttcgccacctttgatgctgttggtgaaggcaagccttaccagtttttccattgcttttatgatggaacttggagcaccatgcaacgcagcttcaccgttgttcgggattttaaagatgtttgctttcattcatacttctcacttatggatgagctgaaacaaagctgtccggatcgaaaatattatgaaataaggctacttcaacttccaggggctttagtagtttcagttctcgggatacttgttgatcctccggttatctcacttgtagccatatgcaaaagcccttatatgttgttcaaaggatggcaccgtttgtttcacgacttgattggacgggaaggtccattcttggagacaatgtgtgtccccatagcaggcctcgcgatcttactctggcctttggctgtcacgggcgcggttattggatcagttatctctagtatcttccttggtgcttatgcaggagtagtctcatatcaagaatcatctttttactatggactctgctatatagttgcctctgtctccatttacgacgagtatagcaccgatatacttgacttgcctgaaggttcttgttttccaaggccgaaatatcgaagaaaggacgaggaaccaacgcctttttctggtcctgtaccaagactaggctctgtcaagaacgcgtcatcgatgagaggaggatcagtcagagtccctatgattgatattaagcctctcgatctgttgaatgagctctttgtggaatgtagaagatatggagaagttttagcgacaaaaggactgataaactcgaaagatatcgaagaagcgagatctagtaaaggcagccaagtgatcagcgttggtttaccggcttatggacttctttacgagattcttcgctcagtcaaagccaattcttccggcttgttactaagtgacggtgtaactgaaataactaccatgaaccgcccaaaagacgtcttctttgattggtttctgaatccgtttttgatactaaaggagcaaatgaaagctacaaacttgtctgaggaagaagaagagtacctcggaagattagttttgctatttggagatccagagaggctaaagagctcgaatgccatttccgcgtctcctcctctcaccgaacgtaaaagagccgaactcgatgcctttgctcgcaggatgcaagggctaacgaaaacggtatcaagatatccaacatttcgtcgacattttgtggcattagtgaagaaactatcggaagatttggacttgaaagacaacaattcggctaaggacgaatcgataacagaaccgccagctccggttaagatcatttcgcggatattcagtcagagatcgttcagaagaaaaggaagtgtcaatggatctgatcaagaatcgcaaaagggtgtctcaaggaatgtagatatagtttaaacatggaacgtgtggtgtggatatttgaaacttaaaacgcatttagttctttgctttataaactttgtcattccttgtaaagatttttcagacgtttttatttatttatagaacagtgtatgttttcgtt

SEQ ID NO: 101864 - protein, 588 aa, Arabidopsis thaliana
  peptide (1)..(588): Ceres Seq. ID no. 13608853
MEPPIGFRASLFQFLLFLPYFIGLLFLGFIKGIVLCPLVCLVVTIGNSAVILSLLPVHIVWTFYSIVSAKQVGPILKIFLCLCLPAAIILWPIVGILGSVLGGALYGFFSPIFATFDAVGEGKPYQFFHCFYDGTWSTMQRSFTVVRDFKDVCFHSYFSLMDELKQSCPDRKYYEIRLLQLPGALVVSVLGILVDPPVISLVAICKSPYMLFKGWHRLFHDLIGREGPFLETMCVPIAGLAILLWPLAVTGAVIGSVISSIFLGAYAGVVSYQESSFYYGLCYIVASVSIYDEYSTDILDLPEGSCFPRPKYRRKDEEPTPFSGPVPRLGSVKNASSMRGGSVRVPMIDIKPLDLLNELFVECRRYGEVLATKGLINSKDIEEARSSKGSQVISVGLPAYGLLYEILRSVKANSSGLLLSDGVTEITTMNRPKDVFFDWFLNPFLILKEQMKATNLSEEEEEYLGRLVLLFGDPERLKSSNAISASPPLTERKRAELDAFARRMQGLTKTVSRYPTFRRHFVALVKKLSEDLDLKDNNSAKDESITEPPAPVKIISRIFSQRSFRRKGSVNGSDQESQKGVSRNVDIV

SEQ ID NO: 101865 - protein, 450 aa, Arabidopsis thaliana
  peptide (1)..(450): Ceres Seq. ID no. 13608854
MQRSFTVVRDFKDVCFHSYFSLMDELKQSCPDRKYYEIRLLQLPGALVVSVLGILVDPPVISLVAICKSPYMLFKGWHRLFHDLIGREGPFLETMCVPIAGLAILLWPLAVTGAVIGSVISSIFLGAYAGVVSYQESSFYYGLCYIVASVSIYDEYSTDILDLPEGSCFPRPKYRRKDEEPTPFSGPVPRLGSVKNASSMRGGSVRVPMIDIKPLDLLNELFVECRRYGEVLATKGLINSKDIEEARSSKGSQVISVGLPAYGLLYEILRSVKANSSGLLLSDGVTEITTMNRPKDVFFDWFLNPFLILKEQMKATNLSEEEEEYLGRLVLLFGDPERLKSSNAISASPPLTERKRAELDAFARRMQGLTKTVSRYPTFRRHFVALVKKLSEDLDLKDNNSAKDESITEPPAPVKIISRIFSQRSFRRKGSVNGSDQESQKGVSRNVDIV

SEQ ID NO: 101866 - protein, 428 aa, Arabidopsis thaliana
  peptide (1)..(428): Ceres Seq. ID no. 13608855
MDELKQSCPDRKYYEIRLLQLPGALVVSVLGILVDPPVISLVAICKSPYMLFKGWHRLFHDLIGREGPFLETMCVPIAGLAILLWPLAVTGAVIGSVISSIFLGAYAGVVSYQESSFYYGLCYIVASVSIYDEYSTDILDLPEGSCFPRPKYRRKDEEPTPFSGPVPRLGSVKNASSMRGGSVRVPMIDIKPLDLLNELFVECRRYGEVLATKGLINSKDIEEARSSKGSQVISVGLPAYGLLYEILRSVKANSSGLLLSDGVTEITTMNRPKDVFFDWFLNPFLILKEQMKATNLSEEEEEYLGRLVLLFGDPERLKSSNAISASPPLTERKRAELDAFARRMQGLTKTVSRYPTFRRHFVALVKKLSEDLDLKDNNSAKDESITEPPAPVKIISRIFSQRSFRRKGSVNGSDQESQKGVSRNVDIV

SEQ ID NO: 101867 - DNA, 669 bp, Arabidopsis thaliana
  misc_feature (1)..(669): Ceres Seq. ID no. 13608856
  misc_feature (1)..(669): Ortholog of  Ceres SEQ ID NO 12589876 as cited in SEQ ID NO 0
  misc_feature (1)..(669): Ortholog of  Ceres SEQ ID NO 15179249 as cited in SEQ ID NO 0
aaaaataactcttttcttctttttaatcttttttagcactaatcataaaccacaaaaatacataattaatcaccacaaaagcaattcacattcaccacaaaatgacaatgacacttaaactcctatctctcgccgtggctgccttggccatcaccgccgtcttggccgccgatcctccaacaccggcaaacgcaccgaaagccaacggcgaaaagaactctacctctccttctcccgccgccgcagcatccccaaaatcacccacggcctccgccccaacctcaccgcctacagctgctccaaccatggccaagaaaaattccaccggaactccaagcccttccccatcttccccatctccaaagtcatcatcagccaaaactccggcttcaagccctgactcaagctccggtgattcttccgaaggtcctaccagctcctctgacgcacctaccgcctcctctccgccagctccgactccagaaatgtctccatcttccgatgacggaactggcgccagtgacggccctgaagcttcggctcctgcggcaggagcctcatcgcttgtgatctctgtctcgggctctgttctcgcagccgttgcatggcttttcttcatatgattgaatattactagtattttcttggagatttcatactacatttaag

SEQ ID NO: 101868 - protein, 173 aa, Arabidopsis thaliana
  peptide (1)..(173): Ceres Seq. ID no. 13608857
MTMTLKLLSLAVAALAITAVLAADPPTPANAPKANGEKNSTSPSPAAAASPKSPTASAPTSPPTAAPTMAKKNSTGTPSPSPSSPSPKSSSAKTPASSPDSSSGDSSEGPTSSSDAPTASSPPAPTPEMSPSSDDGTGASDGPEASAPAAGASSLVISVSGSVLAAVAWLFFI

SEQ ID NO: 101869 - protein, 171 aa, Arabidopsis thaliana
  peptide (1)..(171): Ceres Seq. ID no. 13608858
MTLKLLSLAVAALAITAVLAADPPTPANAPKANGEKNSTSPSPAAAASPKSPTASAPTSPPTAAPTMAKKNSTGTPSPSPSSPSPKSSSAKTPASSPDSSSGDSSEGPTSSSDAPTASSPPAPTPEMSPSSDDGTGASDGPEASAPAAGASSLVISVSGSVLAAVAWLFFI

SEQ ID NO: 101870 - protein, 105 aa, Arabidopsis thaliana
  peptide (1)..(105): Ceres Seq. ID no. 13608859
MAKKNSTGTPSPSPSSPSPKSSSAKTPASSPDSSSGDSSEGPTSSSDAPTASSPPAPTPEMSPSSDDGTGASDGPEASAPAAGASSLVISVSGSVLAAVAWLFFI

SEQ ID NO: 101871 - DNA, 1889 bp, Arabidopsis thaliana
  misc_feature (1)..(1889): Ceres Seq. ID no. 13608879
  misc_feature (1)..(1889): Ortholog of  Ceres SEQ ID NO 14315146 as cited in SEQ ID NO 52929
  misc_feature (1)..(1889): Ortholog of  Ceres SEQ ID NO 14302263 as cited in SEQ ID NO 64701
  misc_feature (1)..(1889): Ortholog of  Ceres SEQ ID NO 13584538 as cited in SEQ ID NO 64739
  misc_feature (1)..(1889): Ortholog of  Ceres SEQ ID NO 15169643 as cited in SEQ ID NO 64826
  misc_feature (1)..(1889): Ortholog of  Ceres SEQ ID NO 15169647 as cited in SEQ ID NO 64930
aactcataaatctctcattctttctcagattctctctctctgttttccttgttctccaagccagatctctctccataaatctctcttcatctctctctttccaccaaacatccgcgatcctcgattctcaattccgtgtctgttttttttcttcacttagcgatggcgatgatagagcaaaggccgaagacgaagatcgtttgtactctaggtccagcttccagatctgttccgatggtcgagaagcttcttagggctggtatgaacgttgctcgtttcaatttctctcatggatctcatgaataccatcaagagactctcgataatcttcatcaagctatgcttaacactgggattctctgtgccgtcatgctcgacaccaagggtccagaaatccgaaccgggttcttgaaagatgggaaaccaatccagctgaaacaaggacaagagatcactatttcgactgactatgacttgaagggtgacgagaacacgatttgcatgagctacaaaaagttggctgttgatgtgaacccaggaatggtcattctttgtgctgatggtacaatctccttactggttctctcttgtgacaaagagaacggtacagtccgttgccggtgtgagaactctgcgatgctcggtgagagaaagaacgttaatctcccaggtgttgttgtggatctcccaactctaactgagaaagacaaagaagacatcatgcaatggggagtcccgaatcaaatcgacatgattgctctgtcttttgtcaggaaaggttcagacttggttcaagtccggaaacttctaggaaagcacgccaaaaacattcttctcatgtctaaggtcgagaaccaagaaggtgtggcaaattttgatgacattttggtcaattcagacgctttcatgattgctagaggagatctgggcatggaaatcccgattgagaagatcttcttagctcagaaggtgatgatctacaaatgcaacatccagggaaaacctgtggtcacagcaactcagatgctcgagtccatgatcaaatctcctagacccacaagagccgaagctacggatgtagcaaacgcagtccttgatggtacagactgtgtcatgctcagtggtgaaactgcagctggagcataccctgaactagccgtccgtacaatggctaagatctgcgtggaagccgagagcacccttgactacggtgatgtcttcaagaggatcatgctgtactctccagttccaatgagtccactcgagtcacttgcatcttcagctgtcagaactgctaactcagctagagccactctcatcatggtcctaaccagaggaggaagcacagcaagacttgtggctaagtacagaccaggaatgcctattctatccgtcgttgttcctgagatcaaaaccgacttctttgactggtcttgcagcgatgaatcccccgcgagacacagccttatcttccgtggtctgatcccagtgctctacgctggatccgcaagagcctcacacgatgaatcaacagaagaagctatcgagtttgctactcagtacgggaaagagaaagagctatgcaagactggagattccgttgttgctctactccgagtcggtaatgcttccgtgatcaagatcttgaccgtcaagtgatgattccactcaaaaattcacgtttttggcgtttggggaacgctactttaaacgttttattatgaaactattcaagattgtgattaaaatcttgagatagaaaactcaagttctattttttgcttattaccacaactactgtgaccggtgaatccacttaacagctccttttgggatattttggttgtattgaaacctattggatcattcatacacgtatcaattatcat

SEQ ID NO: 101872 - protein, 498 aa, Arabidopsis thaliana; identical to SEQ ID NO: 21788
  peptide (1)..(498): Ceres Seq. ID no. 13608880

SEQ ID NO: 101873 - protein, 496 aa, Arabidopsis thaliana; identical to SEQ ID NO: 21789
  peptide (1)..(496): Ceres Seq. ID no. 13608881

SEQ ID NO: 101874 - protein, 474 aa, Arabidopsis thaliana; identical to SEQ ID NO: 21790
  peptide (1)..(474): Ceres Seq. ID no. 13608882

SEQ ID NO: 101875 - DNA, 1227 bp, Arabidopsis thaliana
  misc_feature (1)..(1227): Ceres Seq. ID no. 13608883
  misc_feature (1)..(1227): Ortholog of  Ceres SEQ ID NO 14303355 as cited in SEQ ID NO 59746
  misc_feature (1)..(1227): Ortholog of  Ceres SEQ ID NO 14302415 as cited in SEQ ID NO 62781
atcttttcgtagacattctctctcgatctttagttttcataactcatcttcttttttactttgtttttttttggaagatgaatatctccgtcgaaaaccctgtttttgtacatgaggactcgacaacgcagaagaccggagagttacgattggacagcgacataccaatgtcgaagatatcatccgatgatgaagtgtttttggctcctgagatgaacgcatttggtcgtcaattcagagactacacggatacaaacagcgagaggcaaaagagcgtcgaacatttctatgcaacacaacacactaaccaaactttagactttgtacagaaaatgagaagtgagtatggaaaattggacaagatggtgatgaacatttgggaatgttgtgaactttcaaaagaagtggtggacgagagtgatcccgacctcgacgaaccacaaattcaacatttgcttcaatctgcggaagcaatccgtaaagattatcctaacgaagattggcttcatctcactgcgcttatccatgatcttgggaaggttcttaccctaccacagtttggagggcttcctcaatgggctgttgttggtgacacatttcctgttgggtgtgcatttgatgaatctaacgtacaccacaagtattttatggaaaaccctgattttaacaaccctaagtacaataccaaagctggaatttattctgaaggctgtggacttgaaaatgttcttatgtcatggggacatgatgactacatgtatctggtggccaaggagaatggaagcaccttaccatccccgggactattcatcatccgataccattccttttatccattgcacaaggctggagcttacactcaccttatgaacgaggaagacaaggagaatctcaaatggcttcatgtttttaacaagtatgacttatacagcaagagcaaagtacacgtcaatgtcgagaaggttaagccgtactacatgtctcttatcaagaaatatttcccggaaaatctgaggtggtgaaaacggcatcgaggccgtccaaaaaaagtctactattagaaagataaaatggtgtgtgtgtttgattacttgtcgtttaagcatattattgcccagttaataaagttgtattgttacattagctaatgttaatgctaatgttgatacaaacggtaattgtatctcgtctgtcctattataaactaaaatgatattttcttctttc

SEQ ID NO: 101876 - protein, 339 aa, Arabidopsis thaliana
  peptide (1)..(339): Ceres Seq. ID no. 13608884
LFVDILSRSLVFITHLLFYFVFFWKMNISVENPVFVHEDSTTQKTGELRLDSDIPMSKISSDDEVFLAPEMNAFGRQFRDYTDTNSERQKSVEHFYATQHTNQTLDFVQKMRSEYGKLDKMVMNIWECCELSKEVVDESDPDLDEPQIQHLLQSAEAIRKDYPNEDWLHLTALIHDLGKVLTLPQFGGLPQWAVVGDTFPVGCAFDESNVHHKYFMENPDFNNPKYNTKAGIYSEGCGLENVLMSWGHDDYMYLVAKENGSTLPSPGLFIIRYHSFYPLHKAGAYTHLMNEEDKENLKWLHVFNKYDLYSKSKVHVNVEKVKPYYMSLIKKYFPENLRW

SEQ ID NO: 101877 - protein, 314 aa, Arabidopsis thaliana
  peptide (1)..(314): Ceres Seq. ID no. 13608885
MNISVENPVFVHEDSTTQKTGELRLDSDIPMSKISSDDEVFLAPEMNAFGRQFRDYTDTNSERQKSVEHFYATQHTNQTLDFVQKMRSEYGKLDKMVMNIWECCELSKEVVDESDPDLDEPQIQHLLQSAEAIRKDYPNEDWLHLTALIHDLGKVLTLPQFGGLPQWAVVGDTFPVGCAFDESNVHHKYFMENPDFNNPKYNTKAGIYSEGCGLENVLMSWGHDDYMYLVAKENGSTLPSPGLFIIRYHSFYPLHKAGAYTHLMNEEDKENLKWLHVFNKYDLYSKSKVHVNVEKVKPYYMSLIKKYFPENLRW

SEQ ID NO: 101878 - protein, 284 aa, Arabidopsis thaliana
  peptide (1)..(284): Ceres Seq. ID no. 13608886
MSKISSDDEVFLAPEMNAFGRQFRDYTDTNSERQKSVEHFYATQHTNQTLDFVQKMRSEYGKLDKMVMNIWECCELSKEVVDESDPDLDEPQIQHLLQSAEAIRKDYPNEDWLHLTALIHDLGKVLTLPQFGGLPQWAVVGDTFPVGCAFDESNVHHKYFMENPDFNNPKYNTKAGIYSEGCGLENVLMSWGHDDYMYLVAKENGSTLPSPGLFIIRYHSFYPLHKAGAYTHLMNEEDKENLKWLHVFNKYDLYSKSKVHVNVEKVKPYYMSLIKKYFPENLRW

SEQ ID NO: 101879 - DNA, 887 bp, Arabidopsis thaliana
  misc_feature (1)..(887): Ceres Seq. ID no. 13608897
  misc_feature (1)..(887): Ortholog of  Ceres SEQ ID NO 12611474 as cited in SEQ ID NO 56549
aaacgaactagagacagtttgattcgaaaatcttgtcggaaaatggaggatatcgtcgaccaagaattaagcaattactgggaacctagctccttcctccaaaacgaagacttcgaatacgacagctggcctttggaagaagccatttctgggtcgtatgattcgagttcgccggatggagctgcttcgtcgccggcttctaagaatattgtgtcggagagaaacagaagacagaaacttaaccagagactcttcgctcttcgatcagttgttcccaatatcactaagatggataaagcctcaataatcaaagatgctattagttacatagaaggattacaatatgaagaaaagaagctcgaagctgagatcagagaacttgaatctacaccaaagagtagccttagtttcagcaaagattttgatcgtgatttacttgttcctgtcacatccaagaagatgaagcagcttgattctggttcttccacttctctcatcgaagttctcgaattgaaggtaacattcatgggagagaggacaatggtggtgagtgtaacatgtaataagaggacagatacaatggtgaaactgtgtgaagtctttgagtcattgaatctcaaaatcctcacttccaatctcacctctttctctggcatgatcttccacactgtctttattgaggcggatgaagaagaacaagaggtgttgcggttaaaaatagaaacaggaataggagcttataatgaaactcaaagccctactttgagcatcgactctctttactaataatactttttttcttccttttttggttcattttggcttctctctttacaataatgtatgtctctcttttcatttttatgatctcctacgtttgtttgtcc

SEQ ID NO: 101880 - protein, 261 aa, Arabidopsis thaliana
  peptide (1)..(261): Ceres Seq. ID no. 13608898
KRTRDSLIRKSCRKMEDIVDQELSNYWEPSSFLQNEDFEYDSWPLEEAISGSYDSSSPDGAASSPASKNIVSERNRRQKLNQRLFALRSVVPNITKMDKASIIKDAISYIEGLQYEEKKLEAEIRELESTPKSSLSFSKDFDRDLLVPVTSKKMKQLDSGSSTSLIEVLELKVTFMGERTMVVSVTCNKRTDTMVKLCEVFESLNLKILTSNLTSFSGMIFHTVFIEADEEEQEVLRLKIETGIGAYNETQSPTLSIDSLY

SEQ ID NO: 101881 - protein, 247 aa, Arabidopsis thaliana
  peptide (1)..(247): Ceres Seq. ID no. 13608899
MEDIVDQELSNYWEPSSFLQNEDFEYDSWPLEEAISGSYDSSSPDGAASSPASKNIVSERNRRQKLNQRLFALRSVVPNITKMDKASIIKDAISYIEGLQYEEKKLEAEIRELESTPKSSLSFSKDFDRDLLVPVTSKKMKQLDSGSSTSLIEVLELKVTFMGERTMVVSVTCNKRTDTMVKLCEVFESLNLKILTSNLTSFSGMIFHTVFIEADEEEQEVLRLKIETGIGAYNETQSPTLSIDSLY

SEQ ID NO: 101882 - protein, 165 aa, Arabidopsis thaliana; identical to SEQ ID NO: 37145
  peptide (1)..(165): Ceres Seq. ID no. 13608900

SEQ ID NO: 101883 - DNA, 857 bp, Arabidopsis thaliana
  misc_feature (1)..(857): Ceres Seq. ID no. 13608909
  misc_feature (1)..(857): Ortholog of  Ceres SEQ ID NO 13661939 as cited in SEQ ID NO 61170
  misc_feature (1)..(857): Ortholog of  Ceres SEQ ID NO 14309041 as cited in SEQ ID NO 0
  misc_feature (1)..(857): Ortholog of  Ceres SEQ ID NO 14309611 as cited in SEQ ID NO 0
acgtgtttctgtttttctctaatttttctcttgttgttctcgattaacgaaaaagacttgtcgttctcaattcttatcgatttaagaacaaatcatctaacgaagattacttccgaagatcagaaacaaacacaaactgtgaatcgttgtttgttaattctctttaaaatcgccagaagaaagagatctccgttttctacagaagaaaagcaagagagtaagaatgggatcggaacaaaacgatagcacaagcttcacgcaatcgcaagcttcagagccaaagctatgtgttaaaggatgtggtttctttggatcaccatcaaacatggatctctgttctaaatgttacagaggcatttgtgctgaggaagctcaaacagcagttgctaaagctgctgttgaaaaatctttcaagccttctcctcctcgtagtctcttcatagcagaacctcctgctgttgttgtggaacccaaacccgaaaaggcggcagttgttgttgtctcggccgagccatcttcctcggcggttcctgaggcgaacgagccatcgagacctgcacgaaccaaccggtgtttgtgttgtaacaagaaggttgggatcatggggtttaagtgcaaatgcgggagcactttctgcggcgaacatcggtacccggagactcatgattgcagctttgatttcaaagaagttggacgtggagagattgccaaagctaatcctgtggttaaggctgataaaattcaaaggttctgaaatatggaagttttttctaagtattttggtggtaattactcatttgtatttgaaccgatttgggggttgtcttggatggttttaatggattgtttccaaaggg

SEQ ID NO: 101884 - protein, 176 aa, Arabidopsis thaliana
  peptide (1)..(176): Ceres Seq. ID no. 13608910
MGSEQNDSTSFTQSQASEPKLCVKGCGFFGSPSNMDLCSKCYRGICAEEAQTAVAKAAVEKSFKPSPPRSLFIAEPPAVVVEPKPEKAAVVVVSAEPSSSAVPEANEPSRPARTNRCLCCNKKVGIMGFKCKCGSTFCGEHRYPETHDCSFDFKEVGRGEIAKANPVVKADKIQRF

SEQ ID NO: 101885 - protein, 142 aa, Arabidopsis thaliana
  peptide (1)..(142): Ceres Seq. ID no. 13608911
MDLCSKCYRGICAEEAQTAVAKAAVEKSFKPSPPRSLFIAEPPAVVVEPKPEKAAVVVVSAEPSSSAVPEANEPSRPARTNRCLCCNKKVGIMGFKCKCGSTFCGEHRYPETHDCSFDFKEVGRGEIAKANPVVKADKIQRF

SEQ ID NO: 101886 - DNA, 1302 bp, Arabidopsis thaliana
  misc_feature (1)..(1302): Ceres Seq. ID no. 13608912
  misc_feature (1)..(1302): Ortholog of  Ceres SEQ ID NO 15170617 as cited in SEQ ID NO 52614
aagaaccaactcaatacgcatcacaaagaaccctaaattcctggaagatctcaaaaggaaaattcaaaaccaaagcttcaagcaatcatcaagcaaaggaaaagctcaaattttgggtcttttatatatttatttcttaaagttacaatctttttgattgtggtttcagtgtacgaacacgcaagaactcgcgtgaaaaaattgtatccaagcttcgtgaaaggagtctctctgtatttagtggcgttttgttctgttgttatttctgaaatattgaagcttttgatttgggtttcaagagagcagagatgtgtagtttgtcggcgattatgttgttaccaacgaagctgaaaccagcttattcagacaaacggagtaacagtagcagcagcagctcactcttcttcaacaatagaagatccaagaagaagaaccaatcgattgttcccgttgcaaggttgtttggaccggcgattttcgaatcatccaaattgaaagtactcttcttaggggttgatgagaagaagcatccttcaacgctccctaggacttacacactcactcacagtgacattacagctaaactaaccttagctatttctcaatccataaacaactctcagttgcaaggatgggcaaataggctataccgggatgaagttgtggcagaatggaagaaagtgaaagggaaaatgtcgcttcacgttcattgtcacataagcggtggccatttccttttagatctctttgcaaagtttcgatatttcatcttttgcaaagaactacctgtggtgttgaaggcttttgtgcatggagatgggaacttgttgaacaactatcctgagctacaagaagctcttgtttgggtctatttccattctaatgtcaatgagttcaacaaagtcgagtgttggggtccgctttgggaagctgtttcgcctgatggtcacaagactgagactcttcccgaggctcggtgtgcggacgagtgtagttgttgttttccaaccgttagctcgattccatggtctcatagtcttagtaatgaaggtgtaaatggttactctgggactcagactgagggaattgctactccaaatccggagaaactctagtgactaaatatcaaattacaagtttttcttttggtagtttgtacaaagtgaaaaggaaatggcaggactttccttttggtggatctaaatattggtttggtttggtgtacataatgtggtataggaaaataatgattatttgtaggttaaatacagattttaaagtttcaaatggtattttgtgtct

SEQ ID NO: 101887 - protein, 268 aa, Arabidopsis thaliana; identical to SEQ ID NO: 21256
  peptide (1)..(268): Ceres Seq. ID no. 13608913

SEQ ID NO: 101888 - protein, 261 aa, Arabidopsis thaliana; identical to SEQ ID NO: 21257
  peptide (1)..(261): Ceres Seq. ID no. 13608914

SEQ ID NO: 101889 - protein, 140 aa, Arabidopsis thaliana; identical to SEQ ID NO: 21258
  peptide (1)..(140): Ceres Seq. ID no. 13608915

SEQ ID NO: 101890 - DNA, 558 bp, Arabidopsis thaliana
  misc_feature (1)..(558): Ceres Seq. ID no. 13608924
  misc_feature (1)..(558): Ortholog of  Ceres SEQ ID NO 15170337 as cited in SEQ ID NO 57970
atggaagggtcgtcttcttcgatgcagtcaaagtacaaaggagtgaggaagaggaaatggggaaaatgggtttcagagatcagacttcccaacagcagagaacgtatttggttgggctcttacgatactcctgagaaggcggcgcgtgctttcgacgcggctctttattgtctccgtggcaacaacgcaaagttcaatttccctgataatcctccggtgatctccggcggacgtaacttgtcgcgatctgagataagagaagctgctgcgaggttcgctaattcggcggaggatgattcaagtggcggagcaggatacgagatacggcaagaatctgcttcaacatcgatggacgttgattcggagtttttgagtatgcttccgacggttggttcgggtaacttcgcttcggagtttgggttattccctgggtttgatgatttctccgatgaatactccggtgatcgtttcagagagcagctttcgcctacacaagattattatcagcttggagaagagacttacgccgatggttccatgtttctttggaatttttga

SEQ ID NO: 101891 - protein, 185 aa, Arabidopsis thaliana
  peptide (1)..(185): Ceres Seq. ID no. 13608925
MEGSSSSMQSKYKGVRKRKWGKWVSEIRLPNSRERIWLGSYDTPEKAARAFDAALYCLRGNNAKFNFPDNPPVISGGRNLSRSEIREAAARFANSAEDDSSGGAGYEIRQESASTSMDVDSEFLSMLPTVGSGNFASEFGLFPGFDDFSDEYSGDRFREQLSPTQDYYQLGEETYADGSMFLWNF

SEQ ID NO: 101892 - protein, 178 aa, Arabidopsis thaliana; identical to SEQ ID NO: 91672
  peptide (1)..(178): Ceres Seq. ID no. 13608926

SEQ ID NO: 101893 - DNA, 905 bp, Arabidopsis thaliana
  misc_feature (1)..(905): Ceres Seq. ID no. 13608935
  misc_feature (1)..(905): Ortholog of  Ceres SEQ ID NO 13584593 as cited in SEQ ID NO 65340
aaaaatggcccactggtgggtggagaatggtaataattcagtttaaaagctaagccttctcactgattaactcaatcattcatccgtctctgcaaacaaaggaagaagaatcaagatggctctggaaatctgtgtgaaagctgctgttggtgctcctgatcatctcggcgactgtccgttcagccaacgggctcttctcacactcgaggagaagagtcttacctacaaaatccatctgattaacctctctgacaaaccccagtggttcttggacattagtcctcaagggaaagtaccagtgcttaagatcgacgacaagtgggtgactgattccgacgtcatcgttggtatactcgaggagaagtatcctgatccaccactcaagactcctgctgaatttgcctctgttggatccaacatttttggtacttttgggacattcttgaagagcaaagactccaatgacggatctgaacatgccttgcttgttgagctagaagctttggaaaaccatcttaagagtcacgatggcccttttatcgccggagaaagagtttccgcagtggatctaagcttagcaccaaagctttaccaccttcaagttgctcttggccatttcaaaagctggtctgtccctgagagctttccccatgtccataactacatgaagactctgttctcgctcgactcttttgagaaaactaagaccgaggaaaagtatgtgatctctggatgggctcccaaggttaacccttgaaactatgcaccgttatgagatcgttggtgtggtaatgttgttcaaggtctctctcttatatcagtcaaataatgtacttggacctttttatgtaatgtactgtatcaatcaaataagaagcctattttgaaataagatttgcctccat

SEQ ID NO: 101894 - protein, 213 aa, Arabidopsis thaliana; identical to SEQ ID NO: 29716
  peptide (1)..(213): Ceres Seq. ID no. 13608936

SEQ ID NO: 101895 - DNA, 1271 bp, Arabidopsis thaliana
  misc_feature (1)..(1271): Ceres Seq. ID no. 13608953
  misc_feature (1)..(1271): Ortholog of  Ceres SEQ ID NO 12598859 as cited in SEQ ID NO 62872
  misc_feature (1)..(1271): Ortholog of  Ceres SEQ ID NO 12617350 as cited in SEQ ID NO 63777
  misc_feature (1)..(1271): Ortholog of  Ceres SEQ ID NO 13598749 as cited in SEQ ID NO 64341
  misc_feature (1)..(1271): Ortholog of  Ceres SEQ ID NO 15176153 as cited in SEQ ID NO 0
  misc_feature (1)..(1271): Ortholog of  Ceres SEQ ID NO 15179157 as cited in SEQ ID NO 0
cttcagacaagtcggtccactaattcaaattttctccattctctcgttccaattattatttacttttttcacccaataaaaaaaaaaccatgcattcacttccggtgaatctcgtcctcaccgtacttacggtgttcctaacatcaccggcgcaagttatcggataccgtccatatccaccaaaaaccaacggctccgatcaaatcttcgacgcttcaaaaaaattcgaaggctcatcgaatctcgtccgcctccgttaccacatgggtccagtcttaaccaacaacatcaccgttcacccaatctggtacggcacgtggcaaaaatcccagaagaaaatcatccgtgagttcattaactcaatctcagccgttggatctaaacacccttcagtctccggttggtggaaaaccgtacagctttacactgaccaaactggatctaacattaccggtacggttcgtctcggtgaagagaaaaacgaccggttttattctcatggtaaatcacttacccggttatcgattcaatccgtgataaaatccgccgtcacttctaggtctcgcccgttgccggttaatcccaaaagcggtttatatcttctcctcaccgccgatgatgtctacgtgcaagatttttgcggccaggtttgtggatttcactatttcacgtttccgtcgattgttggattcacgttaccgtacgcttgggttggaaactcggcgaagctttgtcccggagtttgtgcttatccgttcgccgtaccggcgtttataccgggattaaaaccggttaaatcgcctaacggagatgttggagtagatgggatgataagtgtgatagctcacgagattgctgagctggcgacgaatccgttggttaatgcttggtacgcaggacccgacccggtagctccggttgagatagcggatctttgtgagggtatttatggaacaggaggtggtggttcgtacacaggacagatgttgaacgatcatagtggtgccacgtataatgttaatgggatccgacggcggtatttgatccagtggttatggagccacgttgttagttactgtaccggacccaatgcgcttgattagtgaatgaatggtatggtttgtgtttaaatttgggaagggtaattttgtcttttggaatttgagctcgacattgtggaattattatgatcaagaatgggtttgttgtgtcgatgcataattaaaattagttaatgatagttatgaggaaagtcacgtatgttgcttatc

SEQ ID NO: 101896 - protein, 337 aa, Arabidopsis thaliana; identical to SEQ ID NO: 22402
  peptide (1)..(337): Ceres Seq. ID no. 13608954

SEQ ID NO: 101897 - protein, 279 aa, Arabidopsis thaliana; identical to SEQ ID NO: 22403
  peptide (1)..(279): Ceres Seq. ID no. 13608955

SEQ ID NO: 101898 - DNA, 774 bp, Arabidopsis thaliana
  misc_feature (1)..(774): Ceres Seq. ID no. 13608976
  misc_feature (1)..(774): Ortholog of  Ceres SEQ ID NO 13599287 as cited in SEQ ID NO 338
  misc_feature (1)..(774): Ortholog of  Ceres SEQ ID NO 14314817 as cited in SEQ ID NO 52571
aaccatatatatacacacaaaatatttgttaacaaaaagatttatatttcttctcttctttgttcataactaagaactcagaaagagaccaacgacactgcaaatggcggatgaatctccaaagtctatctacgacttcaccgtcaaggatatcggaggtaacgatgtgagtttggaccaatacaaaggcaaaactcttttggttgtaaacgttgcttccaaatgtggtctgacggatgcgaactacaaggaactgaatgttctgtacgagaaatacaaggagcaagggttggagatattagcattcccgtgtaatcagttcttaggacaagaaccaggaaacaatgaagagattcaacaaactgtctgcaccaggttcaaagctgaattccccatctttgacaaggtggatgtgaacggtaagaacacggcaccattatacaagtacttgaaagcagagaaaggaggtttgctcattgatgctatcaaatggaacttcaccaaattcttggtttctcctgatggcaaggtcttacagagatattctcccagaacctctcctcttcaattcgagaaggacattcaaactgcgttgggacaggcctcttcttaatcaccagaagaagaagtttcaagaactttcgtttggtccaaattatgatcttagaatcatcaacattgcaaacttattttctttgaattctatcattcttgttttaaataattgatgtattcgatgtcttttcatgggatgatatatcatatattatcatg

SEQ ID NO: 101899 - protein, 169 aa, Arabidopsis thaliana; identical to SEQ ID NO: 35932
  peptide (1)..(169): Ceres Seq. ID no. 13608977

SEQ ID NO: 101900 - DNA, 1839 bp, Arabidopsis thaliana
  misc_feature (1)..(1839): Ceres Seq. ID no. 13608997
  misc_feature (1)..(1839): Ortholog of  Ceres SEQ ID NO 14311882 as cited in SEQ ID NO 51638
  misc_feature (1)..(1839): Ortholog of  Ceres SEQ ID NO 14314567 as cited in SEQ ID NO 52335
  misc_feature (1)..(1839): Ortholog of  Ceres SEQ ID NO 13595437 as cited in SEQ ID NO 56562
agatctaaaaaaatccacaattttgttcaaatcttggagttaaatgctgaattttaggccttgttgcttagatttatggcttaaagtttcaaacttttcattggatatggtacaaatcttgtagttaaacactgaattgtgtccctcgtgggcgttgttgctttgatttatggccaaaagtttcaaacttggatatggtacaatcttgtagttatacactgcattgtctctcttgggtgttgttgttgctttgatttatggcttaaagtttcaaactttttcttggagatggttcaatcttgttgttgaaagttgaaacactgaattgtctctcttgtgcgtgttgttgcttagatttatggctaaaagtttcaaactttcttcacttcagagcttcttgaatggaaactatggttttgtggttttggttaatcttctgctaacactttttgccctgttttggtttgggaaagtgagaagaaaatgtcaggatctgagacgggtttaatggcggcgaccagagaatcaatgcaatttacaatggctctccaccagcagcagcaacacagtcaagctcaacctcagcagtctcagaacaggccattgtcattcggtggagacgacggaactgctctttacaagcagccgatgagatcagtatcaccaccgcagcagtaccaacccaactcagctggtgagaattctgtcttgaacatgaacttgcccggaggtgagtctggaggcatgactggaactggaagtgagccagtgaaaaagaggagaggtagaccgaggaaatatgggcctgatagtggtgaaatgtcacttggtttgaatcctggagctccttctttcactgtcagccaacctagtagcggcggcgatggaggagagaagaagagaggaagacctcctggttcttctagcaaaaggctcaagcttcaagctttaggctcgactggaatcggatttacgcctcatgtacttaccgtgctggctggagaggatgtatcatccaagataatggcgttaactcataatggaccccgtgctgtgtgtgtcttgtctgcaaatggagccatctccaatgtgactctccgccagtctgccacatccggtggaactgttacatatgaggggagatttgagattctgtctttatcgggatctttccatttgctggagaacaatggtcaaagaagcaggacgggaggtctaagcgtgtcattatcaagtccggatggtaatgtcctcggtggcagtgtagctggtcttcttatagcagcatcacctgttcagattgttgttgggagtttcttaccagacggagaaaaagaaccaaaacagcatgtgggacaaatgggactgtcgtcacccgtattaccgcgtgtggccccaacgcaggtgctgatgactccaagtagcccacaatctcgaggcacaatgagtgagtcatcttgtggaggaggacatggaagccctattcatcagagcactggaggaccttacaataacaccattaacatgccctggaagtagccaagtgatctgtgtcggcttaaaaccaacaacttcccgttattagagtgatttatttctacatttggtttagactttctagttctgatggttatttctacagttggtttagactttctagttctgttcagacaaaaggagtttgataaattgaccgacctattttgtgtgtttgaggtactttcagaaccataggtgttcagaaattagaatgttctgtttaaggtagatcttttattttatgttgaggtactttcggaaccataagttgttcagaaattggaatatcctgattaatgt

SEQ ID NO: 101901 - protein, 351 aa, Arabidopsis thaliana; identical to SEQ ID NO: 77688
  peptide (1)..(351): Ceres Seq. ID no. 13608998

SEQ ID NO: 101902 - protein, 343 aa, Arabidopsis thaliana; identical to SEQ ID NO: 77689
  peptide (1)..(343): Ceres Seq. ID no. 13608999

SEQ ID NO: 101903 - protein, 336 aa, Arabidopsis thaliana; identical to SEQ ID NO: 77690
  peptide (1)..(336): Ceres Seq. ID no. 13609000

SEQ ID NO: 101904 - DNA, 835 bp, Arabidopsis thaliana
  misc_feature (1)..(835): Ceres Seq. ID no. 13609005
  misc_feature (1)..(835): Ortholog of  Ceres SEQ ID NO 12623521 as cited in SEQ ID NO 61505
ccacgcgtccgtacacagtgatggcttcgtctctcaccactagattatcggcggtaatcggatctcgacggagttttccgatcgtcggagcgttttgcgttctgtcaactctctcaatctcttctctttcttcttcatctcccttcaaatcgggttgtgcacagtctttctctgttgttcctctcttaaggtctaagtttagcagtaaggctttttcttcgtcgatcagaatggaggagagcagcaaaactgtgcccagcattgttgtctatgtcactgttcctaacagagaagcagggaagaagttggctaacagcattgtccaggaaaagcttgcagcgtgtgtgaacattgtgcctggcattgaatcggtgtacgagtgggaggggaaggttcagagtgattcagaggagctcctgataatcaaaacaaggcaatcccttctagaacctctaaccgagcatgtcaatgcaaatcacgaatacgagtaagcattgttctatgacgtattctgcatataaaaacatgagtaatgcgagtgtcttgccttttctttagcaatcacacaagctaagttaataaatatggtttacttgttacctttagtgtgccagaagtaattgcgttgcccatcactggtgggagcgacaagtatttagaatggttgaaaaacagtacaaggaactgagatctcgacatctcgtagctgcccatcgtcaatggctttctagtattagtttcttttacatttcagtaacctctgtattaaagataaaacgtgtgaagtgtaatactggaccagttcgtcaaatgaaataaacaatgacattgttcc

SEQ ID NO: 101905 - protein, 162 aa, Arabidopsis thaliana
  peptide (1)..(162): Ceres Seq. ID no. 13609006
TRPYTVMASSLTTRLSAVIGSRRSFPIVGAFCVLSTLSISSLSSSSPFKSGCAQSFSVVPLLRSKFSSKAFSSSIRMEESSKTVPSIVVYVTVPNREAGKKLANSIVQEKLAACVNIVPGIESVYEWEGKVQSDSEELLIIKTRQSLLEPLTEHVNANHEYE

SEQ ID NO: 101906 - protein, 156 aa, Arabidopsis thaliana
  peptide (1)..(156): Ceres Seq. ID no. 13609007
MASSLTTRLSAVIGSRRSFPIVGAFCVLSTLSISSLSSSSPFKSGCAQSFSVVPLLRSKFSSKAFSSSIRMEESSKTVPSIVVYVTVPNREAGKKLANSIVQEKLAACVNIVPGIESVYEWEGKVQSDSEELLIIKTRQSLLEPLTEHVNANHEYE

SEQ ID NO: 101907 - protein, 86 aa, Arabidopsis thaliana
  peptide (1)..(86): Ceres Seq. ID no. 13609008
MEESSKTVPSIVVYVTVPNREAGKKLANSIVQEKLAACVNIVPGIESVYEWEGKVQSDSEELLIIKTRQSLLEPLTEHVNANHEYE

SEQ ID NO: 101908 - DNA, 1293 bp, Arabidopsis thaliana
  misc_feature (1)..(1293): Ceres Seq. ID no. 13609019
  misc_feature (1)..(1293): Ortholog of  Ceres SEQ ID NO 13596519 as cited in SEQ ID NO 62572
  misc_feature (1)..(1293): Ortholog of  Ceres SEQ ID NO 12625108 as cited in SEQ ID NO 68102
aactcattttgacaatttttctttggtccaactcttacatattaacattcaccttcctttttgattttcgtcggttctacatgttaaacccttcaaaaattaaattataataagtatagtgaagaccaataagcagttgcatggaccctgattgattcattaccgctaaaactttgtctgaatccttcttcctatttataccactctcttcttcttctccagtttcatcacaccaaacttctcacatctcctcattctgtattttgacaaaaaaaaaacaccctttgttttttctctcctttgcatgttgtgattgtttttgcttcacaacatgggagttttagtaatctcgcttctcgtggttcatctcctagctttttccgtctgcgttcagggcggctaccgtcgtggcggacaccatcccggcggtcacatgggaccttggatcaacgctcatgccactttttacggcggcggtgatgcttccggcactatgggtggagcatgcgggtacggcaatctgtatagccaaggttatggactggagacggcagcgctgagcacagcgttattcgaccaaggacttagttgtggcgcatgttttgagctgatgtgtgtcaacgatcctcaatggtgcataaaaggccgatccattgtggtcactgccactaacttttgtcctcctggtggtgcatgcgaccctcccaaccaccatttcgatctttctcagccgatctacgagaaaattgctctctacaaatccggtatcattcccgttatgtatagaagggttcggtgcaagagaagtggtgggataaggttcacgatcaacggccactcatactttaacttggtgttggtcacaaacgtgggtggagccggggacgtacactcggtctcaatgaaagggtcgaggacaaaatggcaattaatgtcgagaaattgggggcaaaattggcaaagcaactcttatctcaatggtcaaagtctgtcgtttgttgttaccacaagtgatcgtcgaagtgtcgtctcttttaatgttgcaccacccacttggtcctttggccagacctacaccggagggcagtttcggtattaattatatataatcggttcggtttgttattgtgctttttttttttttttcggttccaagttggggactcttttttggtaaccaattgagattgggactgatagtgatatgtagcgaatatatgtgtgggaacgagaaaaagagaagttttattaattctcgttttataatataagaaaatgaaagtgatgttatgt

SEQ ID NO: 101909 - protein, 255 aa, Arabidopsis thaliana; identical to SEQ ID NO: 34839
  peptide (1)..(255): Ceres Seq. ID no. 13609020

SEQ ID NO: 101910 - protein, 221 aa, Arabidopsis thaliana; identical to SEQ ID NO: 34840
  peptide (1)..(221): Ceres Seq. ID no. 13609021

SEQ ID NO: 101911 - protein, 201 aa, Arabidopsis thaliana; identical to SEQ ID NO: 34841
  peptide (1)..(201): Ceres Seq. ID no. 13609022

SEQ ID NO: 101912 - DNA, 2729 bp, Arabidopsis thaliana
  misc_feature (1)..(2729): Ceres Seq. ID no. 13609035
  misc_feature (1)..(2729): Ortholog of  Ceres SEQ ID NO 13598668 as cited in SEQ ID NO 60784
  misc_feature (1)..(2729): Ortholog of  Ceres SEQ ID NO 13659835 as cited in SEQ ID NO 60791
aacacggaccaaggagtctgacatgtgtgcgagtcaacgggtgagtaaacccgtaaggcgcaaggaagctgattggcgggatccctcgcgggtgcaccgccgaccgaccttgatcttctgagaagggttcgagtgtgagcatgcctgtcgggacccgaaagatggtgaactatgcctgagcggggtaaagccagaggaaactctggtggaagcccgcagcgatactgacgtgcaaatcgttcgtctgacttgggtataggggcgaaagactaatcgaaccatctagtagctggttccctccgaagtttccctcaggatagctggagctcggacgcgagttctatcgggtaaagccaatgattagaggcattgggggcgcaacgccctcgacctattctcaaactttaaataggtaggacgtgtcggctgctttgttgagccgtcacacggaatcgagagctccaagtgggccatttttggtaagcagaactggcgatgcgggatgaaccggaagccgggttacggtgcccaactgcgcgctaacctagaacccacaaagggtgttggtcgattaagacagcaggacggtggtcatggaagtcgaaatccgctaaggagtgtgtaacaactcacctgccgaatcaactagccccgaaaatggatggcgcttaagcgcgcgacctatacccggccgtcggggcaagagccaggcctcgatgagtaggagggcgcggcggtcgctgcaaaacctagggcgcgagcccgggcggagcggccgtcggtgcagatcttggtggtagtagcaaatattcaaatgagaactttgaaggccgaagaggggaaaggttccatgtgaacggcacttgcacatgggttagtcgatcctaagagtcgggggaaacccgtctgatagcgcttaagcgcgaacttcgaaaggggatccggttaaaattccggaaccgggacgtggcggttgacggcaacgttagggagtccggagacgtcggcgggggcctcgggaagagttatcttttctgtttaacagcctgcccaccctggaaacggctcagccggaggtagggtccagcggctggaagagcaccgcacgtcgcgtggtgtccggtgcgcccccggcggcccttgaaaatccggaggaccgagtgccgctcacgcccggtcgtactcataaccgcatcaggtctccaaggtgaacagcctctggtcgatggaacaatgtaggcaagggaagtcggcaaaatggatccgtaacttcgggaaaaggattggctctgagggctgggctcgggggtcccagttccgaacccgtcggctgtcagcggactgctcgagctgcttccgcggcgagagcgggtcgccgcgtgccggccgggggacggactgggaacggctctctcgggagctttccccgggcgtcgaacagtcagctcagaactggtacggacaaggggaatccgactgtttaattaaaacaaagcattgcgatggtccctgcggatgctaacgcaatgtgatttctgcccagtgctctgaatgtcaaagtgaagaaattcaaccaagcgcgggtaaacggcgggagtaactatgactctcttaaggtagccaaatgcctcgtcatctaattagtgacgcgcatgaatggattaacgagattcccactgtccctgtctactatccagcgaaaccacagccaagggaacgggcttggcagaatcagcggggaaagaagaccctgttgagcttgactctagtccgactttgtgaaatgacttgagaggtgtaggataagtgggagcttcggcgcaagtgaaataccactacttttaacgttattttacttactccgtgaatcggaggcggggtacaacccctgtttttggtcccaaggctcgcttcggcgggtcgatccgggcggaggacattgtcaggtggggagtttggctggggcggcacatctgttaaaagataacgcaggtgtcctaagatgagctcaacgagaacagaaatctcgtgtggaacaaaagggtaaaagctcgtttgattctgattttcagtacgaatacgaaccgtgaaagcgtggcctatcgatcctttagaccttcggaatttgaagctagaggtgtcagaaaagttaccacagggataactggcttgtggcagccaagcgttcatagcgacgttgctttttgatccttcgatgtcggctcttcctatcattgtgaagcagaattcaccaagtgttggattgttcacccaccaatagggaacgtgagctgggtttagaccgtcgtgagacaggttagttttaccctactgatgcccgcgtcgcgatagtaattcaacctagtacgagaggaaccgttgattcgcacaattggtcatcgcgcttggttgaaaagccagtggcgcgaagctaccgtgcgctggattatgactgaacgcctctaagtcagaatccgggctagaagcgacgcatgcgcccgccgcccgattgccgaccctcagtaggagcttaggctcccaaaggcacgtgtcgttggctaagtccgttcggcggaagcgtcgttcggaccgccttgaattataattaccaccgagcggcgggtagaatcctttgcagacgacttaaatacgcgacggggtattgtaagtggcagagtggccttgctgccacgatccactgagattcagccctttgtcgctaagattcg

SEQ ID NO: 101913 - protein, 98 aa, Arabidopsis thaliana
  peptide (1)..(98): Ceres Seq. ID no. 13609036
MEQCRQGKSAKWIRNFGKRIGSEGWARGSQFRTRRLSADCSSCFRGESGSPRAGRGTDWERLSRELSPGVEQSAQNWYGQGESDCLIKTKHCDGPCGC

SEQ ID NO: 101914 - protein, 55 aa, Arabidopsis thaliana; identical to SEQ ID NO: 45608
  peptide (1)..(55): Ceres Seq. ID no. 13609037

SEQ ID NO: 101915 - DNA, 925 bp, Arabidopsis thaliana
  misc_feature (1)..(925): Ceres Seq. ID no. 13609062
  misc_feature (1)..(925): Ortholog of  Ceres SEQ ID NO 14314461 as cited in SEQ ID NO 52355
  misc_feature (1)..(925): Ortholog of  Ceres SEQ ID NO 14306812 as cited in SEQ ID NO 56361
  misc_feature (1)..(925): Ortholog of  Ceres SEQ ID NO 15168461 as cited in SEQ ID NO 57068
atcatctctctgtttttccgaagaactaacacatgtcgggacctcagtgctgtgaaaacccgccaactcttaacccggtttccgggtcgggtcatgtcgagaagctgggtgggcttgatgcctacgtctccggctctgccgagtccaagctctgcgtcctcctcatttctgatatttttggttttgaagctccaaacttaagggcgcttgcggacaaggttgcagcttctggattctatgttgtggttcctgattactttggtggagatccttataatccctctaaccaggacagacccatccctgtctggatcaaagaccatggctgtgataagggctttgaaaacacgaaaccagtacttgaaaccataaagaacaaaggcataactgccattggagccgcagggatgtgttggggtgcaaaagtagtggtggaactgtctaaagaagagcttattcaagcagctgtgttgcttcatccttcttttgtcaatgttgatgatatcaaaggtgggaaggctccaattgctatattaggagctgaaattgatcaaatgtccccaccagcactcttgaagcaatttgaggagattctatcttccaaacccgaggtgaatagttacgtgaagatacacccgaaagtgtcacacggatggacagttagatacaacatcgatgaaccagaggcggttaaagcagcagaagaagctcacaaggagatgcttgattggtttgtgacctacatcaaatgatttgagaaagaaagaaaggtattgtctattacttcatatatgcaaagaataaaaattaaagagagacaaagcaaaactcttggttggtgtttcaatttctactttctatagtcttttgaagcattctctgagattctgtgataccttttgttaatcattgttttatgattttt

SEQ ID NO: 101916 - protein, 239 aa, Arabidopsis thaliana; identical to SEQ ID NO: 28662
  peptide (1)..(239): Ceres Seq. ID no. 13609063

SEQ ID NO: 101917 - DNA, 1521 bp, Arabidopsis thaliana
  misc_feature (1)..(1521): Ceres Seq. ID no. 13609069
  misc_feature (1)..(1521): Ortholog of  Ceres SEQ ID NO 13662301 as cited in SEQ ID NO 68114
attcgtctcctccattaaacatctctcgtctgataacaccgatccatctctttctttctctctccgtcgactctcgttcttaaagatgaaagctttctacgtattcgttgttgctcttcttctcaccttgaattataggggagaagcaagtggttctgttttcttcattgatggatccaacaatcaatatcttcgtccacgatcatccagtgaggcacttcccatgtcgcctgttgaaatatctgcagcagtgtctgccttgttgggttttgcaccttcagcaactttgacagctgatggctcatccaagttgaacaagattctaaaacctaatccatttgagaggcctcgcgctgcttttgtgctagaaatcgctggagctgatgatatgcttttggaaacctcccctagtcattctttcttgggcaatgccataaggagcagtattaagtctgattcgtacaaagctgatactgaacttccagacaatgaagtggttgttgtgtctgtcaatgaaccctcctctgatgtgactgacaaggacattaatgattttgcatcttggttgggtggatcatatgttgctggagctgaaccatcgtctggattgttgagtatccctctggctgggggtgctaatgtggagttcaatttggaaaaggaagcagagaggaaatttgcattgaaccttttgggtctatatcagaatatcagacaggcagtcagcgtttatgacgatttatctcatggtattgacagaactgccgaattaacggttggacgctttggtggtatcgatgctttagcacaggagtatggacaaggtatggctaagcaagggatggatgtattactttccacattatcaaagctattcaatctgttggagacatctcataaaggccaaattgttggggttatcgtccttgatgagagagtaaaccaagaatcagaaaatcttttgaactttgggtcttcccgttcatctgcacgctcaatggtggaagtggagggaattccaagtgcagccattatcgctgaggttatacttgttaggctgactcttgcatggttgactggaatcattcttctcattgcaactatccttggggtatacttccttatgaacatgcctttgacgaaggatactcttctatattcaaatgtaaagctcgactaagaaatgaaacagagcttcaaaacggcaaaaggacactgattttctctacaggtcgttcgtttacatatttttgtgtgtatcaagccgtgtttctcaactggccgcctttgaaaccggtgtcatttgaatgtttaaagagaaggatgaaacttttggtggtcagagcagttgatgtgttatgtgtatattgccatattggttgcattctcgacttataattattttctttcttacatacattttgagtctcagtcctaataataaaagaccactttggacacttgatgtgtatcttctgtctctgtaagagcttttgatcatgaatctgaatatattattgc

SEQ ID NO: 101918 - protein, 392 aa, Arabidopsis thaliana
  peptide (1)..(392): Ceres Seq. ID no. 13609070
FVSSIKHLSSDNTDPSLSFSLRRLSFLKMKAFYVFVVALLLTLNYRGEASGSVFFIDGSNNQYLRPRSSSEALPMSPVEISAAVSALLGFAPSATLTADGSSKLNKILKPNPFERPRAAFVLEIAGADDMLLETSPSHSFLGNAIRSSIKSDSYKADTELPDNEVVVVSVNEPSSDVTDKDINDFASWLGGSYVAGAEPSSGLLSIPLAGGANVEFNLEKEAERKFALNLLGLYQNIRQAVSVYDDLSHGIDRTAELTVGRFGGIDALAQEYGQGMAKQGMDVLLSTLSKLFNLLETSHKGQIVGVIVLDERVNQESENLLNFGSSRSSARSMVEVEGIPSAAIIAEVILVRLTLAWLTGIILLIATILGVYFLMNMPLTKDTLLYSNVKLD

SEQ ID NO: 101919 - protein, 364 aa, Arabidopsis thaliana; identical to SEQ ID NO: 28942
  peptide (1)..(364): Ceres Seq. ID no. 13609071

SEQ ID NO: 101920 - protein, 318 aa, Arabidopsis thaliana; identical to SEQ ID NO: 28943
  peptide (1)..(318): Ceres Seq. ID no. 13609072

SEQ ID NO: 101921 - DNA, 1275 bp, Arabidopsis thaliana
  misc_feature (1)..(1275): Ceres Seq. ID no. 13609073
  misc_feature (1)..(1275): Ortholog of  Ceres SEQ ID NO 14308095 as cited in SEQ ID NO 55286
aaagaagttcctcattcaaaaaagatttctcagccatcaaaattctctttctcttcatccaacaaaaaaaaagcatacctctttttcttccatatagataagttaattaagaaaacgaattatcaggttttgtttcggctgatctgaggaagttcatctatggatacggctcagtggccacaggagattgtagtgaagcccttggaagaaatagtaacaaacacatgcccaaagccgcaaccgcaaccgcttcaaccgcagcagccaccgtcggtgggtggagagaggaaggcaaggccagaaaaggatcaagctgtaaactgtccgagatgtaactcaaccaacacaaagttttgttactacaacaattatagtttgacgcagccaagatacttctgcaaaggttgtagaaggtattggaccgaaggcggttcgcttaggaacattcctgttggcggtggctcaagaaagaacaagagatctcactcttcttcttctgatattagtaacaatcactcggattctacacaaccagctacaaagaagcatctctctgatcatcaccaccacctcatgagcatgtctcaacaaggtttgaccggtcaaaaccctaaattccttgagacgacccaacaagatctcaatttaggtttttcaccacatgggatgattaggaccaacttcactgacctcatccacaacattggcaacaacaccaacaagagcaacaacaataacaatccattgattgtttcttcatgttctgccatggctacttcttctctggatctcataagaaacaatagtaacaatgggaattcttcaaattcttccttcatgggatttccagttcataatcaagatccagcatcaggagggttttcaatgcaagatcattacaagccttgcaacacaaacaccacactgctagggttttcattagatcatcatcataataatggatttcatggagggtttcaaggaggagaagaaggtggagaaggtggtgatgatgtgaatggaaggcacttgtttccttttgaggatttgaaattgccagtttcttcttcatcagcaacaattaatgtcgacattaatgaacatcagaagcgaggaagcggtagtgatgcagctgctacgtctggtgggtattggactgggatgttgagtggaggatcatggtgctaattaatttctcggtttggttgatgaagatagtactattagtggttaattattgctatttatttaattaatcaatatgttcttaatttc

SEQ ID NO: 101922 - protein, 342 aa, Arabidopsis thaliana
  peptide (1)..(342): Ceres Seq. ID no. 13609074
MDTAQWPQEIVVKPLEEIVTNTCPKPQPQPLQPQQPPSVGGERKARPEKDQAVNCPRCNSTNTKFCYYNNYSLTQPRYFCKGCRRYWTEGGSLRNIPVGGGSRKNKRSHSSSSDISNNHSDSTQPATKKHLSDHHHHLMSMSQQGLTGQNPKFLETTQQDLNLGFSPHGMIRTNFTDLIHNIGNNTNKSNNNNNPLIVSSCSAMATSSLDLIRNNSNNGNSSNSSFMGFPVHNQDPASGGFSMQDHYKPCNTNTTLLGFSLDHHHNNGFHGGFQGGEEGGEGGDDVNGRHLFPFEDLKLPVSSSSATINVDINEHQKRGSGSDAAATSGGYWTGMLSGGSWC

SEQ ID NO: 101923 - protein, 204 aa, Arabidopsis thaliana; identical to SEQ ID NO: 84981
  peptide (1)..(204): Ceres Seq. ID no. 13609075

SEQ ID NO: 101924 - protein, 202 aa, Arabidopsis thaliana; identical to SEQ ID NO: 84982
  peptide (1)..(202): Ceres Seq. ID no. 13609076

SEQ ID NO: 101925 - DNA, 1469 bp, Arabidopsis thaliana
  misc_feature (1)..(1469): Ceres Seq. ID no. 13609077
  misc_feature (1)..(1469): Ortholog of  Ceres SEQ ID NO 13658778 as cited in SEQ ID NO 66511
atcaatagttcaatactaagaaaccggcctatatatatatatttgtggtcactaatttctccaaaaaccagttgccttccgtaaaaagatggaacctcagagaaaacactcgacagccctccacacgtgtcatccctgccggcgaaccattccatacagaatctacgccgtatttcacacgtgtggcatcatagctctcatgtatcaccatgtacactcaattgtcaacgcaaacaacactctaataacatgtcttcttctcctctccgatattgttctcgccttcatgtgggcaaccacaacttccctccggttaaacccgattcatcggaccgagtaccctgaaaaatatgctgctaaaccggaggactttccaaagctggacgtttttatatgcacggctgatccgtacaaggagcctccgatgatggtggttaacaccgctttatcggtgatggcttacgagtatccgtctcataagatctcagtgtacgtatcggacgatggaggatcttccttgactttgtttgctcttatggaggctgccaagttctctaagcattggttgcccttttgcaagaataacaatgttcaagatcgctctcctgaagtttatttttcttcaaagtcacattcttcgagtgatgaagctgaaaatcttaagatgatgtacgaagacatgaagagtagagtcgaacatgtggtcgagagcggaaaagttgagactgcgtttatcgcatgcgatcaatttagttgtgtgttcgatctgtggacagataaattcactcgtcatgaccatcctaccattattatggtgctacaacataacgaaacagagatgatgccaaaccttatatatgtttcaagagaaaagagtaaagtttcaccacatcatttcaaagccggtgctcttaatactttgttacgtgtatctgccgtgatgacaaactcaccaatcattctaacactagattgtgacatgtactcaaacaatcctacaacaccacttcatgctctgtgctatttgtcagaccctaaaatcaattttgatttaggatttgtgcaatttcctcaaaaatttcaaggagtaaacaaaaatgatatttatgcatccgagctcaaacgcccatttgacatcaacacggttgggtttgatggacttatgggaccagttcatatgggaactgggtgtttcttcaatcgacgggcgttttatgggcctccgactactttgattttgcctgagatagaaacatttgggccaaatcggattgccgataagcccattaaagcccaagatattttggcgttggcacacgatgtagcaggatgtaactacgagtgcaacaccaattggggatccaaggtaagattaaaatgaactttagctttcttttatgtatgttgattttttggttatgtttacagattttgtttcttttacatcaactagtcttctcaaaatccat

SEQ ID NO: 101926 - protein, 430 aa, Arabidopsis thaliana; identical to SEQ ID NO: 40164
  peptide (1)..(430): Ceres Seq. ID no. 13609078

SEQ ID NO: 101927 - protein, 393 aa, Arabidopsis thaliana; identical to SEQ ID NO: 40165
  peptide (1)..(393): Ceres Seq. ID no. 13609079

SEQ ID NO: 101928 - protein, 364 aa, Arabidopsis thaliana; identical to SEQ ID NO: 40166
  peptide (1)..(364): Ceres Seq. ID no. 13609080

SEQ ID NO: 101929 - DNA, 1017 bp, Arabidopsis thaliana
  misc_feature (1)..(1017): Ceres Seq. ID no. 13609088
  misc_feature (1)..(1017): Ortholog of  Ceres SEQ ID NO 13596944 as cited in SEQ ID NO 68910
atggcttccatggatcacaatcattttctttttcctctcctcttcatcatcatcatctcttccttgcacgttttgcgtgcttcgaccacaccttcacactcacacaaactaaaatccgccactaccattagaaaaatcaaccgtagaggaccttacattggccttgtgacggtctttgagaccgaagaagatgcttttctcggcagtgttgatttcagactcgatcctacgcatcctttcctcgatctctctggaagacgttttcgtatagggaagattcatggaaagaaggttgtgtatgtcagatgtgggataggaatggtgaacgcagcagcagcaacacaacaaatgatagatgtgttcagtgtgaaagggattgtgcattttgggattgctggaaatataaacaactcgatgtccataggagatgtgagcatccctaagcaaatcacgaatgctggcttgtgggattggctgaatccaggcaaagcaaaaggaaatgaggatgtagcgtacttagatgtcgggaactataatgttccacaaggaaacaataagttaggaactattggatacagttacgaggaattatattcagtcagtggtcacatcaattcaccaaagaaagtgttttggattaatacaactcaagagtggcttcatcttgcagctgatcttgagaagatggagctattgcagtgtgtgaatgcaagtctgtgtcttccaaataaacccaaagtagtagttggattaaaagcagccactgctgacatatttgtggataatgcagcctatagaaatttcttatacgatacttttggagtttcctcctcagacatggagagttctgctgtggccatgacttgcgtgtcaaatgggtatcccctaattgtgataagaggattatcagatttagcaggagtaggagataacactgttcgaaagtttggatctttggctgccactaacactgccaaagctgttttagagttcattaaaaagctcccaccgtcataa

SEQ ID NO: 101930 - protein, 338 aa, Arabidopsis thaliana
  peptide (1)..(338): Ceres Seq. ID no. 13609089
MASMDHNHFLFPLLFIIIISSLHVLRASTTPSHSHKLKSATTIRKINRRGPYIGLVTVFETEEDAFLGSVDFRLDPTHPFLDLSGRRFRIGKIHGKKVVYVRCGIGMVNAAAATQQMIDVFSVKGIVHFGIAGNINNSMSIGDVSIPKQITNAGLWDWLNPGKAKGNEDVAYLDVGNYNVPQGNNKLGTIGYSYEELYSVSGHINSPKKVFWINTTQEWLHLAADLEKMELLQCVNASLCLPNKPKVVVGLKAATADIFVDNAAYRNFLYDTFGVSSSDMESSAVAMTCVSNGYPLIVIRGLSDLAGVGDNTVRKFGSLAATNTAKAVLEFIKKLPPS

SEQ ID NO: 101931 - protein, 335 aa, Arabidopsis thaliana; identical to SEQ ID NO: 87862
  peptide (1)..(335): Ceres Seq. ID no. 13609090

SEQ ID NO: 101932 - protein, 232 aa, Arabidopsis thaliana; identical to SEQ ID NO: 87863
  peptide (1)..(232): Ceres Seq. ID no. 13609091

SEQ ID NO: 101933 - DNA, 1457 bp, Arabidopsis thaliana
  misc_feature (1)..(1457): Ceres Seq. ID no. 13609096
  misc_feature (1)..(1457): Ortholog of  Ceres SEQ ID NO 15177336 as cited in SEQ ID NO 51374
atggagattgccgagcaaaaacctatggtggaggacccgattcctcttccaaacgcttccatggaggtctcttaccaaaaccccattgaagcagcgactattccagtgcaaatagccgtcgctgagccagtcgctacacccaatcctcctccttgcctccacgagaacaaattcctcgtatctgtggaggtctgcttaaagccttcaagcacggctcgtctagaggatgtccagagagctgtagaacggatgctggaaaataggagcatgagctatgcagatggactggttttgattcctgcagacgacttgttcctagttgataatgtgcaaaggatatgcatttgtgatacagaggaatgggtgaaaaataatgatgttctcttgttctggcaagtgaagccagttgtgcacacctttcagctcattgaagaaggaccatgtgaggacttgtgtgcagatggacaacctgctagctttaacgaatggattctacccgcaaaggagtttgatggcttatgggaaagcctaatatatgaatctggacttaagcaaaggttactacgttatgctgcgagtgcattgctgttcacccagaagggtgttaacccaaatctcgtttcatggaacaggattattcttttgcacggaccaccagggactggcaaaacatccctttgcaaagcgttggctcaaaagctttcaatccggtgcaactccagatatccacattgccaattgattgaagtcaatgctcactctctatttagtaaatggttctctgaaagtggcaagctggttgccaagcttttccaaaaaatccaagagatggtggaggaagatggaaatctggtatttgttttgatcgatgaagtagaaagtcttgctgctgctcgaaaagctgcattgtctggctcagaaccgtcagattctatccgggttgtgaatgcactactcacccaaatggacaaattgaaatcagcaccgaatgtgataatccttacaacatcaaacataactactgctattgatgttgctttcgtggatcgagctgacataaaagcttatgttggccctccaactcttcatgttcgttatgaaatattaaggtcttgtgttgaggaattaataagtaaagggatcatatcaagtttccagggctgtgatggactctctattccaagcttttcaagtttgaaagaaaagttaagtgaaagtgaggttcatgatacaaatacagttccttggttctgcaaacagttgatagaagctgcaaaagggtgcgagggtttaagtgggagatcattgaggaagcttccgtttttagcgcacgcagcacttgcagatccatatagccatgatccaagtaatttcttgtgtacaatgatagaaacagctaagagagagaagtctgaacaacctgaatgaccatttttgtgaggtcataaacaaataac

SEQ ID NO: 101934 - protein, 475 aa, Arabidopsis thaliana
  peptide (1)..(475): Ceres Seq. ID no. 13609097
MEIAEQKPMVEDPIPLPNASMEVSYQNPIEAATIPVQIAVAEPVATPNPPPCLHENKFLVSVEVCLKPSSTARLEDVQRAVERMLENRSMSYADGLVLIPADDLFLVDNVQRICICDTEEWVKNNDVLLFWQVKPVVHTFQLIEEGPCEDLCADGQPASFNEWILPAKEFDGLWESLIYESGLKQRLLRYAASALLFTQKGVNPNLVSWNRIILLHGPPGTGKTSLCKALAQKLSIRCNSRYPHCQLIEVNAHSLFSKWFSESGKLVAKLFQKIQEMVEEDGNLVFVLIDEVESLAAARKAALSGSEPSDSIRVVNALLTQMDKLKSAPNVIILTTSNITTAIDVAFVDRADIKAYVGPPTLHVRYEILRSCVEELISKGIISSFQGCDGLSIPSFSSLKEKLSESEVHDTNTVPWFCKQLIEAAKGCEGLSGRSLRKLPFLAHAALADPYSHDPSNFLCTMIETAKREKSEQPE

SEQ ID NO: 101935 - protein, 467 aa, Arabidopsis thaliana
  peptide (1)..(467): Ceres Seq. ID no. 13609098
MVEDPIPLPNASMEVSYQNPIEAATIPVQIAVAEPVATPNPPPCLHENKFLVSVEVCLKPSSTARLEDVQRAVERMLENRSMSYADGLVLIPADDLFLVDNVQRICICDTEEWVKNNDVLLFWQVKPVVHTFQLIEEGPCEDLCADGQPASFNEWILPAKEFDGLWESLIYESGLKQRLLRYAASALLFTQKGVNPNLVSWNRIILLHGPPGTGKTSLCKALAQKLSIRCNSRYPHCQLIEVNAHSLFSKWFSESGKLVAKLFQKIQEMVEEDGNLVFVLIDEVESLAAARKAALSGSEPSDSIRVVNALLTQMDKLKSAPNVIILTTSNITTAIDVAFVDRADIKAYVGPPTLHVRYEILRSCVEELISKGIISSFQGCDGLSIPSFSSLKEKLSESEVHDTNTVPWFCKQLIEAAKGCEGLSGRSLRKLPFLAHAALADPYSHDPSNFLCTMIETAKREKSEQPE

SEQ ID NO: 101936 - protein, 455 aa, Arabidopsis thaliana
  peptide (1)..(455): Ceres Seq. ID no. 13609099
MEVSYQNPIEAATIPVQIAVAEPVATPNPPPCLHENKFLVSVEVCLKPSSTARLEDVQRAVERMLENRSMSYADGLVLIPADDLFLVDNVQRICICDTEEWVKNNDVLLFWQVKPVVHTFQLIEEGPCEDLCADGQPASFNEWILPAKEFDGLWESLIYESGLKQRLLRYAASALLFTQKGVNPNLVSWNRIILLHGPPGTGKTSLCKALAQKLSIRCNSRYPHCQLIEVNAHSLFSKWFSESGKLVAKLFQKIQEMVEEDGNLVFVLIDEVESLAAARKAALSGSEPSDSIRVVNALLTQMDKLKSAPNVIILTTSNITTAIDVAFVDRADIKAYVGPPTLHVRYEILRSCVEELISKGIISSFQGCDGLSIPSFSSLKEKLSESEVHDTNTVPWFCKQLIEAAKGCEGLSGRSLRKLPFLAHAALADPYSHDPSNFLCTMIETAKREKSEQPE

SEQ ID NO: 101937 - DNA, 830 bp, Arabidopsis thaliana
  misc_feature (1)..(830): Ceres Seq. ID no. 13609100
  misc_feature (1)..(830): Ortholog of  Ceres SEQ ID NO 12626248 as cited in SEQ ID NO 65768
acagttctcagataaatactaaactcactgttaaaactttctcaacaaagcttcctgtttctctacaaatggcatctgctctcgctcttaagagactcctatcatcctccatcgctccacgttcccgtagtgttcttcgtccagctgtttcctctcgcctcttcaacaccaacgccgttaggagctacgacgacgacggcgaaaatggagacggcgttgatttatatcgccgctctgttcctcgccgccgtggtgatttcttctcagatgtgtttgatccgttttcgccgacgaggagcgttagtcaagtgctgaatctgatggaccagttcatggagaatcctctgttatcagctactcgtggcatgggagcttcaggagctcgtcgtggttgggatataaaagagaaagacgatgctctgtacctgagaatcgacatgcctgggctgagcagagaggatgtgaagctggctttggagcaggacactctggtgattagaggagaaggaaaaaacgaggaagatggtggcgaggaaggagagagcggtaatcggagattcacaagcaggattggattaccggataagatttacaagatcgatgagattaaggcggagatgaagaacggagtgttgaaagttgtgatcccgaagatgaaagaacaagagagaaatgatgttcgtcagatcgagatcaactaaaaacgtcgacgtttttttctgttctagttttgttgataggtctttgaataagaagtgtgtgtagtttggcacggtcgatgttgagtcatgtagtctctaaagactaaaaggttatatgtttctttcttg

SEQ ID NO: 101938 - protein, 232 aa, Arabidopsis thaliana
  peptide (1)..(232): Ceres Seq. ID no. 13609101
SSQINTKLTVKTFSTKLPVSLQMASALALKRLLSSSIAPRSRSVLRPAVSSRLFNTNAVRSYDDDGENGDGVDLYRRSVPRRRGDFFSDVFDPFSPTRSVSQVLNLMDQFMENPLLSATRGMGASGARRGWDIKEKDDALYLRIDMPGLSREDVKLALEQDTLVIRGEGKNEEDGGEEGESGNRRFTSRIGLPDKIYKIDEIKAEMKNGVLKVVIPKMKEQERNDVRQIEIN

SEQ ID NO: 101939 - protein, 210 aa, Arabidopsis thaliana; identical to SEQ ID NO: 37125
  peptide (1)..(210): Ceres Seq. ID no. 13609102

SEQ ID NO: 101940 - protein, 126 aa, Arabidopsis thaliana; identical to SEQ ID NO: 37126
  peptide (1)..(126): Ceres Seq. ID no. 13609103

SEQ ID NO: 101941 - DNA, 1111 bp, Arabidopsis thaliana
  misc_feature (1)..(1111): Ceres Seq. ID no. 13609112
  misc_feature (1)..(1111): Ortholog of  Ceres SEQ ID NO 14316300 as cited in SEQ ID NO 59995
  misc_feature (1)..(1111): Ortholog of  Ceres SEQ ID NO 13662758 as cited in SEQ ID NO 64912
  misc_feature (1)..(1111): Ortholog of  Ceres SEQ ID NO 13595881 as cited in SEQ ID NO 67709
tcagtaaaaccctcatttctgtttctcttttcacttttaaggaaaaccctagaatcctcagaaatggcgttgagcaccgtgtttcgtcgagcttcgtcaacagtagccaatcttgctttccgtgcgggtagatctccggttagcttccgcagtggcgctgtctccgtcgagaggctgattcgtggtagccaccagatcaggcgtggatcggttagttcattctcagtctcgagcttttcgacggaaagtgcgatctctaaaacaaccgccgacgagaatcttgttagcgttatcgaatctgaaatcgaatgcgccgtcgcagaggaggctcctcatgacactgacttcttggaagataagccagaagggtttccatttgaaatcattgataattcaggggagagaactgtgttgctgacaaggaaatttgaggatgaaaccatccaagtggaagttgactctgttgcttcttatgatgatgaagatgaagaagaggaagcagaaccaaacaatgaagaagacgatgaagatcaagagagctcgggtaaagtccgggttccgatggttgttagtgtgcagaaaggtgatggtgtgtgtcttgagtttggagtcagcgcatacccggatgagattgtgattgatagtttatcgatcaaacaaccgcaaggatctgataatgaccttgcttacgaaggacctgactttgatgacttggatgagaatttgcagaaggctttccacaggtacttggagatcagaggtattaaaccaagcttcactacctttctggcagattatgtggccaacaaagatagcagagagtatcttcaatggctcaaggatctcaagtcttttgtcgagaagtgaaactgaactttgttcagagaataagagcgagatttctttttgctttaaacttttgagtttatcttagatgaacttgatatcaccatgagcaatcgttgaaagtgaggtcatgtgttatgcttgttaacaatattgctacatgtttttaatgggtttttaggtactttgctagatataagatgcaactctttcgagtgtcagttggaaaaaatgttacgacctcaataaagtataattcttttgc

SEQ ID NO: 101942 - protein, 288 aa, Arabidopsis thaliana
  peptide (1)..(288): Ceres Seq. ID no. 13609113
SVKPSFLFLFSLLRKTLESSEMALSTVFRRASSTVANLAFRAGRSPVSFRSGAVSVERLIRGSHQIRRGSVSSFSVSSFSTESAISKTTADENLVSVIESEIECAVAEEAPHDTDFLEDKPEGFPFEIIDNSGERTVLLTRKFEDETIQVEVDSVASYDDEDEEEEAEPNNEEDDEDQESSGKVRVPMVVSVQKGDGVCLEFGVSAYPDEIVIDSLSIKQPQGSDNDLAYEGPDFDDLDENLQKAFHRYLEIRGIKPSFTTFLADYVANKDSREYLQWLKDLKSFVEK

SEQ ID NO: 101943 - protein, 267 aa, Arabidopsis thaliana
  peptide (1)..(267): Ceres Seq. ID no. 13609114
MALSTVFRRASSTVANLAFRAGRSPVSFRSGAVSVERLIRGSHQIRRGSVSSFSVSSFSTESAISKTTADENLVSVIESEIECAVAEEAPHDTDFLEDKPEGFPFEIIDNSGERTVLLTRKFEDETIQVEVDSVASYDDEDEEEEAEPNNEEDDEDQESSGKVRVPMVVSVQKGDGVCLEFGVSAYPDEIVIDSLSIKQPQGSDNDLAYEGPDFDDLDENLQKAFHRYLEIRGIKPSFTTFLADYVANKDSREYLQWLKDLKSFVEK

SEQ ID NO: 101944 - DNA, 817 bp, Arabidopsis thaliana
  misc_feature (1)..(817): Ceres Seq. ID no. 13609115
  misc_feature (1)..(817): Ortholog of  Ceres SEQ ID NO 13582538 as cited in SEQ ID NO 57724
aaaagaaaactgaagaaccccaaaaatcccaagtgaaaacgttatccacttcgagagagtgacacgtcacgaagcaaatccaaattcaaaacctttccataaaaatcaaatcacttcttcttattacttcccccaaatcgaaatcagtcacttaaaaccctaaattatgacgatcgcaccggcattgcagacgacgttcgtgtcatcaaccaacttcctgaaacattcttcttcgtggggatcaccatcaccgaacaatgtgattcttcccaaaaacaagagatcttcttcctccgtagttgtcgccgccgtcggtgatgtctcttctgacggaacaatctacttaatcggcggagccatcgccgttgcactcgtcggaactgcattcccgatcctcttcaaacgcaaaggacccgtgtccggaatgtgacggagcaggatttgtgaggaaaggaggagtgactctgagagccaacgccgcacggaaggatcttcctcagatcgtttgtgctaactgcaatggactcggaaagcttaaccagattgataaatcataagtcttcttcatatatatgtaaaaagctccatttctcattcctcttcttctctacaatatacctctgcaaaagtagatagcttggaatgatcaatggttgcttggagatgggtggatatatatatatatatatatatatacaattgcttttttatgtgtaagtttctttgctttcttgttctgtaagaaattgtctgagtattattgtaagtttttaagcagttatagacgaaggtgctcagctaccaaaataaaacgaac

SEQ ID NO: 101945 - protein, 87 aa, Arabidopsis thaliana
  peptide (1)..(87): Ceres Seq. ID no. 13609116
MTIAPALQTTFVSSTNFLKHSSSWGSPSPNNVILPKNKRSSSSVVVAAVGDVSSDGTIYLIGGAIAVALVGTAFPILFKRKGPVSGM

SEQ ID NO: 101946 - DNA, 644 bp, Arabidopsis thaliana
  misc_feature (1)..(644): Ceres Seq. ID no. 13609140
  misc_feature (1)..(644): Ortholog of  Ceres SEQ ID NO 13584968 as cited in SEQ ID NO 64327
ctcattctcttatccatcaatcgttacttcgtttcttctctatcaccaggaaaaaagaagaagatagctcctgaagacaaaaatggcggtttctctcccgaactcgtttcttcagattagcccatgtgttccttctctgcaattaagaaagccggtgatggcggcagtgaaaggaggaaaacaatcggtgagaagaagcagcaatacggtggttcagataacgtgtcgtaagaaggaattgcatcctgaattccacgaagacgcaaaggtttactgcaatggagagctggtgatgactacaggaggaacaaagaaagagtatgtggttgatgtatggtcaggtaaccatccgttttacctcgggaatcgttcggctttgatggttgatgctgatcaagttgagaagtttcgtaagaggttcgctgggctttctgagattatggagattcctgtgcttaaaggagaaatcattatgcctactaagaaaagtaaaggtcccaaagggaagaagaaatgatgagtcttttctggtaaagcttatgtctttgaatttgttgtcttttcaattgaagtcgagatactgcttaggctgttaaaaattgtatgtgaattttcttctgaatgctattggttatgctttcttt

SEQ ID NO: 101947 - protein, 144 aa, Arabidopsis thaliana; identical to SEQ ID NO: 24197
  peptide (1)..(144): Ceres Seq. ID no. 13609141

SEQ ID NO: 101948 - protein, 119 aa, Arabidopsis thaliana; identical to SEQ ID NO: 24198
  peptide (1)..(119): Ceres Seq. ID no. 13609142

SEQ ID NO: 101949 - protein, 74 aa, Arabidopsis thaliana; identical to SEQ ID NO: 24199
  peptide (1)..(74): Ceres Seq. ID no. 13609143

SEQ ID NO: 101950 - DNA, 739 bp, Arabidopsis thaliana
  misc_feature (1)..(739): Ceres Seq. ID no. 13609144
  misc_feature (1)..(739): Ortholog of  Ceres SEQ ID NO 13595613 as cited in SEQ ID NO 59866
aaatctgaacccttcgattttcgattcttcctcgagccttccttccttccttcttcttctccaagaggattttgattgtctcctttactctctccatgtcaagttctggtgctccttcacgcaagactctgagtaagatcgcgactaatcgtcttcagaaagagcttgtggaatggcagatgaatccacctactggtttcaaacacaaagtcactgataatctccaaagatggataattgaagttattggagctccaggaactctatatgccaacgatacttatcagcttcaagttgattttccagaacattatcctatggaatcgccacaagtgatttttcttcatccagctcctctgcatcctcacatttacagcaatgggcatatttgtctagatattttgtatgattcgtggtctccagccatgacggtgagttctatctgcattagcatcctctccatgctctcaagctcgactgaaaagcaacgaccaaccgataatgaccgatatgtgaagaattgtaagaacggaagatctccaaaggagacccgatggtggttccacgacgataaagtataaacctcgatcaaccaaaaaaaatgtaaaatagtccaaaacagtctttgaggtttgttgtctatttttaatttaattgggtttaagctgtcccaaacccatttccaaaatccgtgatgtataaaaacaacacaataaatttgactaattttgaatcttct

SEQ ID NO: 101951 - protein, 161 aa, Arabidopsis thaliana; identical to SEQ ID NO: 20789
  peptide (1)..(161): Ceres Seq. ID no. 13609145

SEQ ID NO: 101952 - protein, 133 aa, Arabidopsis thaliana; identical to SEQ ID NO: 20790
  peptide (1)..(133): Ceres Seq. ID no. 13609146

SEQ ID NO: 101953 - protein, 87 aa, Arabidopsis thaliana; identical to SEQ ID NO: 20791
  peptide (1)..(87): Ceres Seq. ID no. 13609147

SEQ ID NO: 101954 - DNA, 631 bp, Arabidopsis thaliana
  misc_feature (1)..(631): Ceres Seq. ID no. 13609148
  misc_feature (1)..(631): Ortholog of  Ceres SEQ ID NO 12322366 as cited in SEQ ID NO 20549
acaacaactaaaaccacatttatcattacagtctgatttgagctaagttctctcatcataaactctccttggagaatcatggctatttcaaaagctcttatcgcttctcttctcatatctcttcttgttctccaactcgtccaggctgatgtcgaaaactcacagaagaaaaatggttacgcaaagaagatcgattgtgggagtgcgtgtgtagcacggtgcaggctttcgaggaggccgaggctgtgtcacagagcgtgcgggacttgctgctacaggtgcaactgtgtgcctccgggtacgtacggaaactacgacaagtgccagtgctacgctagcctcaccacccacggtggacgccgcaagtgcccataagaagaaacaaagctcttaattgctgcggataatgggacgatgtcgttttgttagtatttactttggcgtatatatgtggatcgaataataaacgagaacgtacgttgtcgttgtgagtgtgagtactgtattattaatggttctatttgtttttacttgcaagttttcttgttttgaatttgtttttttcatatttgtatatcgattcgtgcattattgtattatttcaatttgtaataagattatgttacctttg

SEQ ID NO: 101955 - protein, 98 aa, Arabidopsis thaliana; identical to SEQ ID NO: 28278
  peptide (1)..(98): Ceres Seq. ID no. 13609149

SEQ ID NO: 101956 - DNA, 1018 bp, Arabidopsis thaliana
  misc_feature (1)..(1018): Ceres Seq. ID no. 13609154
  misc_feature (1)..(1018): Ortholog of  Ceres SEQ ID NO 14304626 as cited in SEQ ID NO 52955
ataattagatatatgtttttaaattgcaaaaaaaaagtgtacaaagagcgtgaaatccgcggtggcttggacccctcccgagtcctcaacactatataacacactttcttctctaatctccatcacctcttattttcatctgcttttgaatttcaaaccttcacataaaaaaaatacttttgaatccgtgtttcattcatcgaatctttttccgataactatggctgaggaaatcaagaatgttcctgaacaggaggtgccaaaggtagcaacagaggaatcatcggcagaggttacagatcgtggattgttcgatttcttgggaaagaagaaagacgaaacaaaaccagaggagactccgatcgcttcagagtttgagcagaaggttcatatttcagagccggagccagaggttaaacacgaaagtcttcttgaaaagcttcaccgaagcgacagttcttctagctcctcaagtgaggaagaaggttcagatggtgagaagaggaagaagaagaaggagaagaagaagccaactactgaagttgaggtaaaggaggaagagaagaaagggtttatggagaagttgaaagagaagcttcctggacacaagaaacctgaagacggttcagccgtcgctgcggcaccggtggttgttcctcctcctgtggaagaagcgcatccagtggagaagaaagggattcttgagaagattaaggagaagcttccaggataccaccctaagaccaccgtagaggaggagaagaaagataaagaataagaagattatcattaaagatattaagaataatgatggttgatttgctttgtttttttttttttttattgtgatgattgatcatcttttgcttttgtgatgtgtaagtttgttggcttttttgttgattacaatttcttattttctcttgtatatggtttttaaaaacaaaagatctcaaggtattttaatggtatgaatattttcatttgattaagtgatatggatgatataattttatgt

SEQ ID NO: 101957 - protein, 185 aa, Arabidopsis thaliana [sequence omitted]

SEQ ID NO: 101958 - DNA, 1466 bp, Arabidopsis thaliana
  misc_feature (1)..(1466): Ceres Seq. ID no. 13609160
  misc_feature (1)..(1466): Ortholog of  Ceres SEQ ID NO 15168965 as cited in SEQ ID NO 20607
  misc_feature (1)..(1466): Ortholog of  Ceres SEQ ID NO 13597454 as cited in SEQ ID NO 64121
  misc_feature (1)..(1466): Ortholog of  Ceres SEQ ID NO 13623385 as cited in SEQ ID NO 0
gatttagcttcttcgtttccttggtaatcgttctgttttttcgttgattactgtttgaggttttcattgaatcttgtctcgacatgggctactataacaatgtctttgatgaatgcaacgaccaaactgatatcggtcgggttatacgcgatggaagggaagtcattctccaagcatataattgggaatctcataaatatgattggtggagaaacttggatggtaaagttcctgacatcgcgaaatccggctttacttctgcatggttgccaccaccatctcagtctcttgcaccggaaggttatcttccacaggacctttattcactaaactcagcatatggctctgagcatctattgaaatccttactgcgcaagatgaaacaatacaaagttagagctatggctgatatagtcatcaatcatcgtgttgggacaactagaggacatggtggaatgtataaccgttatgatggaatttcattaccgtgggatgaacacgccgtgacttcttgtaccggaggactgggtaaccgaagcacaggggataatttcaatggagttccaaatgttgatcacactcagcattttgttaggaaagatataattggatggcttcgttggttacgcaacaccgtcgggtttcaagatttccgttttgactttgctaggggttattcagcaaactatgtgaaggaatacattggcgcagcgaaaccattattctcggttggagaatgttgggattcttgcaattacaatggccatggtctagactataatcaagatagccatagacagcgtataatcagttggatcgatgcgacgggacagatctctgctgcatttgacttcacaactaaaggaattctgcaggaagccgtaaagggtcagtattggcgtttatgtgatgcccaagggaagccaccgggtgtaatgggatggtggccttcaagagctgtcacattccttgataaccatgacactggctctactcaggctcattggccgttcccttcacaccacgttatggagggctatgcatatatacttactcatcccggcattccctgtgtgttctacgatcacttttacgattggggaagctcaatacatgatcagattgtcaaactgattgacattaggaggcgacaagatatccacagtaggtcaactgtccgtgttttaaaagcagaatctaacttatatgcagccattgttggtgagaaaatatgtatgaagcttggagacggctcttggtgcccttctggtagagactggactctagcaacaagtggccatcgctatgccgtctggcacaagtaattcttttgtgtctatctagctttgagtccaaagaaaaatatatgtaattcattttctgtaccgggttttactataatgtcatgcccttacgtcttcatgacgtaagattttataagttatatttatgaatgtaaaatttgc

SEQ ID NO: 101959 - protein, 413 aa, Arabidopsis thaliana; identical to SEQ ID NO: 41296
  peptide (1)..(413): Ceres Seq. ID no. 13609161

SEQ ID NO: 101960 - protein, 315 aa, Arabidopsis thaliana; identical to SEQ ID NO: 41297
  peptide (1)..(315): Ceres Seq. ID no. 13609162

SEQ ID NO: 101961 - protein, 307 aa, Arabidopsis thaliana; identical to SEQ ID NO: 41298
  peptide (1)..(307): Ceres Seq. ID no. 13609163

SEQ ID NO: 101962 - DNA, 1296 bp, Arabidopsis thaliana
  misc_feature (1)..(1296): Ceres Seq. ID no. 13609168
  misc_feature (1)..(1296): Ortholog of  Ceres SEQ ID NO 15176375 as cited in SEQ ID NO 53238
  misc_feature (1)..(1296): Ortholog of  Ceres SEQ ID NO 15170532 as cited in SEQ ID NO 55671
  misc_feature (1)..(1296): Ortholog of  Ceres SEQ ID NO 14316507 as cited in SEQ ID NO 57397
  misc_feature (1)..(1296): Ortholog of  Ceres SEQ ID NO 13598532 as cited in SEQ ID NO 65204
  misc_feature (1)..(1296): Ortholog of  Ceres SEQ ID NO 13656849 as cited in SEQ ID NO 65764
  misc_feature (1)..(1296): Ortholog of  Ceres SEQ ID NO 13655298 as cited in SEQ ID NO 68914
  misc_feature (1)..(1296): Ortholog of  Ceres SEQ ID NO 13656501 as cited in SEQ ID NO 69206
tgaatttcgaaaaatcagtccgttgtgaaagcccaagaataaggattctataatttcaggtctcatttaattatataacctatctacactttgatctccgacaattcactttcccaataagaaccaactgagagagagagagcgccggagaagaagaattttagagagcgatggacgagggagttatagcagtttccgccatggatgctttcgagaagcttgagaaagttggtgaagggacatacgggaaagtttacagagccagagagaaagctaccgggaaaatcgtcgctctaaagaagacgcgtctccatgaggacgaagaaggcgttccttccaccactctccgcgagatctccattttgcgaatgctcgctcgtgatcctcacgtcgtcaggttaatggatgttaagcaaggactaagcaaagaaggcaaaactgtactgtacctggtttttgaatacatggacactgatgtcaagaaattcatcagaagtttccgtagcactggcaagaacattccaacccaaactatcaagagcttgatgtatcaactatgcaaaggtatggcattctgccatggtcacgggatattgcacagagatctcaagcctcacaatctcttgatggatcccaagacaatgaggctcaaaatagcagatcttggtttagccagagccttcactctgccaatgaagaagtatacccatgagatattaactctttggtatagagctccagaggttcttcttggtgccacccattactctacagctgtggatatgtggtctgttggctgcatatttgctgaacttgtgaccaaccaagcaatctttcagggagactctgagctccaacagctcctccatattttcaagttgtttgggacacccaatgaagaaatgtggccaggagtgagcacactcaagaactggcatgaatacccacagtggaaaccatcgactctatcctctgctgttccaaacctcgacgaggctggagttgatcttctatctaaaatgctgcagtacgagccagcgaaacgaatctcagcaaagatggctatggagcatccttactttgatgatctgccagaaaagtcctctctctaaggatttaaaatcttcagttagtatctttccaagttttatggtttttctagttttgcttctttcaagcatatctctagtgtgctgcttccccctctatgaatcatcctttctttagcataatatatcacttctgattgttgtttctttctattcgaatatttggattaacggctttaatgttctt

SEQ ID NO: 101963 - protein, 313 aa, Arabidopsis thaliana; identical to SEQ ID NO: 25957
  peptide (1)..(313): Ceres Seq. ID no. 13609169

SEQ ID NO: 101964 - protein, 303 aa, Arabidopsis thaliana; identical to SEQ ID NO: 25958
  peptide (1)..(303): Ceres Seq. ID no. 13609170

SEQ ID NO: 101965 - protein, 247 aa, Arabidopsis thaliana; identical to SEQ ID NO: 25959
  peptide (1)..(247): Ceres Seq. ID no. 13609171

SEQ ID NO: 101966 - DNA, 1255 bp, Arabidopsis thaliana
  misc_feature (1)..(1255): Ceres Seq. ID no. 13609177
  misc_feature (1)..(1255): Ortholog of  Ceres SEQ ID NO 13658911 as cited in SEQ ID NO 66294
  misc_feature (1)..(1255): Ortholog of  Ceres SEQ ID NO 13660693 as cited in SEQ ID NO 67411
atcgatcgccttctgaattttccggcggaaaagcaaatgtccgttaacgacagtatcgatcctcggttcgtattccacgttgaagatgaatctttgcgtttccgtgtgggagattcaggtactaagatccgggagctcgaaaccgtcggcgatcgccatttcagaacccagcaaggtttctgcggaaatagaattgagaaagatgaaaccatgtattccgatggagatgatgaagagtacgacgtttctatccgaagacgaactgctctgattcagcctggtattgattccggtaacaattatgattctgctgcagctgaagaaaccaacagagaaagtaaaaatccagttggttgggaactggttgtgagagaagatggggaaggtaattcaacgattgatcgacatgaaatggagtttaaggtgaggatcactaaaccagatggtaacgtatctaattcccaccgtaacacgcaacaaaagcgagattttgcttctgtggagaaggagagagtcactactactagtgtcagctcttgggagtctctcaaggccatcctctctgatcctgtcaccggagccttgatgaatgatgctaccatactgccttgtggacattcttttggcgccgggggattaaaagaagttaaaaaaatgaaagcatgtttcacatgttcccaacctactttagaaggatcagaaaagccaaatctctctctcagaattgtagttcatgctttccgccaagaagaagattcagatcatattcacacgctgaaaagaaggaaagaaaggtcggatcagaagagaagtttctgtatcccaaacatcactgaaactcctaagagtagccgaggcatacagtttcctttctccattggagatcatattatcatagagggaaacaaaaggacgcctccaaggtttgtcggacgcatagctgttataatgacacaatgcttaaatggatggtacgttgtgaagacagtggacaattcagagtctatcaagttacaacattgctcacttgccaagatttcagacaattcatctacgaaggtaacagtagctgaaatgccaccgtcttggctctaactcgtagaaagcaaatatctgtggctgcagaaatcagcatctgtaattttttcattcagagaaagtagttactacgtttcattatgtaatataggaacgagacaacaattttctgtactaaatccagtgttttcattcatacaaggaaactttgctcatc

SEQ ID NO: 101967 - protein, 364 aa, Arabidopsis thaliana
  peptide (1)..(364): Ceres Seq. ID no. 13609178
IDRLLNFPAEKQMSVNDSIDPRFVFHVEDESLRFRVGDSGTKIRELETVGDRHFRTQQGFCGNRIEKDETMYSDGDDEEYDVSIRRRTALIQPGIDSGNNYDSAAAEETNRESKNPVGWELVVREDGEGNSTIDRHEMEFKVRITKPDGNVSNSHRNTQQKRDFASVEKERVTTTSVSSWESLKAILSDPVTGALMNDATILPCGHSFGAGGLKEVKKMKACFTCSQPTLEGSEKPNLSLRIVVHAFRQEEDSDHIHTLKRRKERSDQKRSFCIPNITETPKSSRGIQFPFSIGDHIIIEGNKRTPPRFVGRIAVIMTQCLNGWYVVKTVDNSESIKLQHCSLAKISDNSSTKVTVAEMPPSWL

SEQ ID NO: 101968 - protein, 352 aa, Arabidopsis thaliana; identical to SEQ ID NO: 27650
  peptide (1)..(352): Ceres Seq. ID no. 13609179

SEQ ID NO: 101969 - protein, 294 aa, Arabidopsis thaliana
  peptide (1)..(294): Ceres Seq. ID no. 13609180
MYSDGDDEEYDVSIRRRTALIQPGIDSGNNYDSAAAEETNRESKNPVGWELVVREDGEGNSTIDRHEMEFKVRITKPDGNVSNSHRNTQQKRDFASVEKERVTTTSVSSWESLKAILSDPVTGALMNDATILPCGHSFGAGGLKEVKKMKACFTCSQPTLEGSEKPNLSLRIVVHAFRQEEDSDHIHTLKRRKERSDQKRSFCIPNITETPKSSRGIQFPFSIGDHIIIEGNKRTPPRFVGRIAVIMTQCLNGWYVVKTVDNSESIKLQHCSLAKISDNSSTKVTVAEMPPSWL

SEQ ID NO: 101970 - DNA, 1248 bp, Arabidopsis thaliana
  misc_feature (1)..(1248): Ceres Seq. ID no. 13609192
  misc_feature (1)..(1248): Ortholog of  Ceres SEQ ID NO 15175496 as cited in SEQ ID NO 56127
  misc_feature (1)..(1248): Ortholog of  Ceres SEQ ID NO 13639124 as cited in SEQ ID NO 56718
  misc_feature (1)..(1248): Ortholog of  Ceres SEQ ID NO 13598714 as cited in SEQ ID NO 62656
  misc_feature (1)..(1248): Ortholog of  Ceres SEQ ID NO 13597519 as cited in SEQ ID NO 64759
  misc_feature (1)..(1248): Ortholog of  Ceres SEQ ID NO 13597870 as cited in SEQ ID NO 64982
  misc_feature (1)..(1248): Ortholog of  Ceres SEQ ID NO 13656123 as cited in SEQ ID NO 65212
atgtatgtgtgtgagtataaatataagttggttcttgaacatcattgcatgttgattaatcacacagcacaaataagagttagaaaaatgggagtgtacttaggtaagtattgttatataatgataataatgttagtgttggtgttgggaaaagaagtgagaagccagttgttaaaaaatggttattattcaacttcatgtccaaaagctgagtcgatagttagatccactgttgaatctcactttgattctgatcccacaatttcccctggcttgcttaggcttcatttccatgactgttttgttcagggttgtgatggttcggttttaatcaaagggaaatctgcggagcaagctgctctaccaaatcttggtctaagaggtttagaagtgatcgatgatgctaaagcccggcttgaggcggtgtgtccaggagttgtgtcatgtgcagatatacttgcacttgctgctcgtgactctgttgacttgagtgatgggccaagctggcgagtaccaacgggtcgtaaagacgggagaatctcgttggcaactgaagcatcgaatctaccttctccacttgactctgttgctgttcaaaagcaaaagtttcaagataaaggattggatactcatgatctagttactctactaggtgcacatacaattggacaaaccgactgtctcttcttccgttaccgtttatacaacttcacggtgaccggaaactccgatccaaccataagcccatcgtttcttacacagctcaagactctttgtcctcccaatggagacggttcgaaacgtgttgctcttgacattggtagcccctcaaaattcgatgaaagtttcttcaagaacttacgcgacggaaacgctattctagagtcggaccaacggctttggtcggacgccgagacaaatgccgtggtgaagaagtatgcgagtcgtcttagaggtttgttagggtttaggtttgattatgagtttggtaaagctatgattaagatgagttccattgatgtaaagactgacgttgatggcgaggttaggaaagtttgttccaaggtgaactagtttgaataaagacatatagtatatgtattcggtttctctatgtttcagatttctaatcactgaatgcatgttacgtaattgtcgtctttcaatatttatttttcagttttttatttctctagaaaaaatagtgagtttgttttggatggtaaaacagtatatgctaatctttat

SEQ ID NO: 101971 - protein, 357 aa, Arabidopsis thaliana
  peptide (1)..(357): Ceres Seq. ID no. 13609193
MYVCEYKYKLVLEHHCMLINHTAQIRVRKMGVYLGKYCYIMIIMLVLVLGKEVRSQLLKNGYYSTSCPKAESIVRSTVESHFDSDPTISPGLLRLHFHDCFVQGCDGSVLIKGKSAEQAALPNLGLRGLEVIDDAKARLEAVCPGVVSCADILALAARDSVDLSDGPSWRVPTGRKDGRISLATEASNLPSPLDSVAVQKQKFQDKGLDTHDLVTLLGAHTIGQTDCLFFRYRLYNFTVTGNSDPTISPSFLTQLKTLCPPNGDGSKRVALDIGSPSKFDESFFKNLRDGNAILESDQRLWSDAETNAVVKKYASRLRGLLGFRFDYEFGKAMIKMSSIDVKTDVDGEVRKVCSKVN

SEQ ID NO: 101972 - protein, 341 aa, Arabidopsis thaliana; identical to SEQ ID NO: 36756
  peptide (1)..(341): Ceres Seq. ID no. 13609194

SEQ ID NO: 101973 - protein, 328 aa, Arabidopsis thaliana; identical to SEQ ID NO: 36757
  peptide (1)..(328): Ceres Seq. ID no. 13609195

SEQ ID NO: 101974 - DNA, 820 bp, Arabidopsis thaliana
  misc_feature (1)..(820): Ceres Seq. ID no. 13609215
  misc_feature (1)..(820): Ortholog of  Ceres SEQ ID NO 12597207 as cited in SEQ ID NO 62146
gatcttttcgaagagcggaagctaaggagaggcgaattcgaatcgagaagatggtgtctgggtcagggatatgttcaaagcgtgtcgttgttgacgcacgtcaccatatgtgtggtcgtcttgcttcgatcatagctaaagagttgctcaatggacagagtgttgttgttgtccgatgtgaggagatttgtttgtctggtggtttggttcgtcagaagatgaagtacatgaggtttcttaggaaacgcatgaacactaaaccttctcatggtcctattcatttccgtgctccgtctaagatcttctggcgtaccgttcgtgggatgattccacacaagaccaagcgtggtgctgctgctcttgcacgtttgaaggtgtttgagggagtaccacctccttatgacaaggtcaagagaatggtcattcctgatgctctcaaggtgttgaggcttcaggctggtcacaagtactgcttgttgggacgtttgtcttctgaagttggctggaaccattacgataccatcaaggagcttgaggtgaagagaaaggagaggtcacaagctttgtatgagcgtaagaagcaactcaccaagctcagggcaaaggccgagaaggttgcagaggagaaacttggatcccagctcgatgttcttgcatcgatcaagtactgaagaaaatcagcatctatcttttggtttaactcttgttttggtttttatctattcagattttgttttcttccttgtatcactgttgaagtttatcacctcatttcagttttatttatcagttgatacttcaatccttagggatgagttct

SEQ ID NO: 101975 - protein, 222 aa, Arabidopsis thaliana
  peptide (1)..(222): Ceres Seq. ID no. 13609216
SFRRAEAKERRIRIEKMVSGSGICSKRVVVDARHHMCGRLASIIAKELLNGQSVVVVRCEEICLSGGLVRQKMKYMRFLRKRMNTKPSHGPIHFRAPSKIFWRTVRGMIPHKTKRGAAALARLKVFEGVPPPYDKVKRMVIPDALKVLRLQAGHKYCLLGRLSSEVGWNHYDTIKELEVKRKERSQALYERKKQLTKLRAKAEKVAEEKLGSQLDVLASIKY

SEQ ID NO: 101976 - protein, 206 aa, Arabidopsis thaliana [sequence omitted]

SEQ ID NO: 101977 - protein, 187 aa, Arabidopsis thaliana; identical to SEQ ID NO: 37119
  peptide (1)..(187): Ceres Seq. ID no. 13609218

SEQ ID NO: 101978 - DNA, 674 bp, Arabidopsis thaliana
  misc_feature (1)..(674): Ceres Seq. ID no. 13609223
  misc_feature (1)..(674): Ortholog of  Ceres SEQ ID NO 14305967 as cited in SEQ ID NO 1343
  misc_feature (1)..(674): Ortholog of  Ceres SEQ ID NO 14309614 as cited in SEQ ID NO 52633
  misc_feature (1)..(674): Ortholog of  Ceres SEQ ID NO 12626306 as cited in SEQ ID NO 65869
attcatctccaaactttcaaaaaaaaacctaaaacaaaaaaaatctctttccttcttctttctccatcaatggcgtcaacaaaaccaaccgatcaaatcaaacaactcaaagatatcttcgctcgtttcgacatggacaaggacggaagcttaacgcagctagaactcgccgctcttctgcgttctctcggaatcaaacctcgcagcgatcaaatctctcttctgttgaaccaaatcgaccgtaacggtaacggatccgtagagttcgacgagctggtcgtggcgatattgccggatataaacgaagaggttttgataaatcaagaacagttgatggaggttttccgttcgtttgatcgtgacggaaacggttcaataacggcggcggaacttgctgggtcaatggctaaaatgggacatccgttgacttaccgtgaattaacggaaatgatgacggaagctgattctaacggtgacggtgttattagttttaatgagttttctcatattatggctaaatcggctgctgattttcttggattaaccgcttcttgatctgttttgttttaattactctctttttttcttctcctgtcaatgcaacttgtgcaatttaacaatgtgctaatcttcattaatttatttatgactcgtttggtgtgacgtaaaaattt

SEQ ID NO: 101979 - protein, 184 aa, Arabidopsis thaliana
  peptide (1)..(184): Ceres Seq. ID no. 13609224
IHLQTFKKKPKTKKISFLLLSPSMASTKPTDQIKQLKDIFARFDMDKDGSLTQLELAALLRSLGIKPRSDQISLLLNQIDRNGNGSVEFDELVVAILPDINEEVLINQEQLMEVFRSFDRDGNGSITAAELAGSMAKMGHPLTYRELTEMMTEADSNGDGVISFNEFSHIMAKSAADFLGLTAS

SEQ ID NO: 101980 - protein, 161 aa, Arabidopsis thaliana; identical to SEQ ID NO: 78739
  peptide (1)..(161): Ceres Seq. ID no. 13609225

SEQ ID NO: 101981 - protein, 140 aa, Arabidopsis thaliana; identical to SEQ ID NO: 78740
  peptide (1)..(140): Ceres Seq. ID no. 13609226

SEQ ID NO: 101982 - DNA, 1685 bp, Arabidopsis thaliana
  misc_feature (1)..(1685): Ceres Seq. ID no. 13609227
  misc_feature (1)..(1685): Ortholog of  Ceres SEQ ID NO 13656161 as cited in SEQ ID NO 64908
  misc_feature (1)..(1685): Ortholog of  Ceres SEQ ID NO 13597600 as cited in SEQ ID NO 65142
actccattccactctcgtcccgcttcgcctcttttagggcgcaaccaagagacagagaagaagagagagactcgtaagcaacaataaccaatagctctctctctctctctctctctctcctctgctgattcttcgctgactcttgcctcctcgacgtcgtcttcggctttgtagcatctcgccgaagcgtcgttgatttgagagagacccaatttggattgttagaaaatgggttacataggagctcatggtgtagctgctcttaagaaacacaaatacagtggtgttgatcactcttatcttgccaaatatgttctccaacctttttggaaccgttttgtcaaaatcttccctctatggatgccccccaacatgataacacttatggggttcatgtttcttctcacatctgctctcttaggctatatatactcacctaagttggattctccacctcctcgatgggtccactttgcacacggcttacttctgtttttatatcagacatttgatgcggttgatgggaagcaagcacgaagaacaaattcatctagcccactaggagagctttttgaccatggttgcgatgcacttggctgtgcgttagaaacaatggcatatgggagtactgctatgtgtggaagagatactttctggttttgggttatttctgctgttccattttttggagcaacatgggaacactattttaccaatacgcttactcttccggtagtcaatggtcctacagaaggtcttgcacttatatactgtggccatttcttcacagccattgttggtgcggagtggtgggctcagccgtttgggaagtcgattcctttgtttagttgggttccgtttttgaacgagatgcaaatgtccagaataatactattctccatgattttctttgctgttataccaacccttgcaatcaacacgtctaatgtttacaaagttgtacattcaagaaatggaagcatgcttctagcattagctatgctatatcccttagtcacgttaattgcaggagttctgatttgggattacttgtctccaattgatctcataagaaactaccctcacttagttgtgttgggaactggtcttgcatttggattccttgtgggaagaatgattctagctcacttatgtgacgaaccaaaaggattgaaaacaaacatgtgtatgtcactgctttaccttccatttgcactagcaaatgctctaaccgctagactcaacgacggggttcctcttgtggatgagttttgggttcttcttggatattgtatattcacattgtcactatatgcgcattttgcaacttcagtcattcatgagatcacaactgcacttggaatctactgcttcaggattactcggaaagaagcttgaagaaacaaaatgtgattgaaatttttatttataagaaaaagcaaatcttaagggagaaaaaaaatgcaaatcccaacacgaatctgaatattttgttacttggaattaaaaatgattgactgatatgcttttggatgtatactcattaatgtttttgttttagtgttttttttcttgttcggttgaaatagggtaattcatgtagaacctttttgtgtaacgtttctaagaaaaaaaaatatgggattgttctagatttttttttttaatttaaacctcgttattga

SEQ ID NO: 101983 - protein, 389 aa, Arabidopsis thaliana; identical to SEQ ID NO: 44528
  peptide (1)..(389): Ceres Seq. ID no. 13609228

SEQ ID NO: 101984 - protein, 345 aa, Arabidopsis thaliana; identical to SEQ ID NO: 44529
  peptide (1)..(345): Ceres Seq. ID no. 13609229

SEQ ID NO: 101985 - protein, 341 aa, Arabidopsis thaliana; identical to SEQ ID NO: 44530
  peptide (1)..(341): Ceres Seq. ID no. 13609230

SEQ ID NO: 101986 - DNA, 1950 bp, Arabidopsis thaliana
  misc_feature (1)..(1950): Ceres Seq. ID no. 13609231
  misc_feature (1)..(1950): Ortholog of  Ceres SEQ ID NO 15170764 as cited in SEQ ID NO 52602
ttgaggagaaaattgagccgtgtttgtgttgagatgtctatgatcgatgagccgttgtacccaatcgccgtacttatagacgagttaaaaaacgatgatattcagctaagattgaattccatcagaaggctttctacgatcgctcgtgctcttggggaagagaggactagaaaggaattgatccctttccttagcgaaaacaatgacgatgatgatgaggttttattagcaatggctgaagaattgggtgtgtttattccttatgttggtggtgttgagtatgcacatgttcttcttccacctttggaaactctttcgactgtcgaagaaacttgtgttagggagaaagctgttgagtcgctttgtagagttggctctcagatgagggagagtgacttggttgatcatttcatttcgttagttaagcgacttgccgctggtgagtggttcacagctagagtatcggcttgcggtgttttccatattgcatacccgagcgcgccggatatgttgaagactgagttaagatcgttgtatactcagctttgtcaggatgatatgccgatggtaaggagagctgcagcaactaatcttgggaaatttgctgctacggttgaatcagcgcatttgaagaccgacgttatgtccatgtttgaggatcttactcaagatgatcaagattctgttagattattggccgttgagggttgtgctgctcttgggaaattgttggagcctcaggattgtgtccaacacattcttcccgtgattgttaatttctcgcaggataagtcttggcgtgtgcgctatatggttgcaaatcaactctacgagctttgtgaagccgtgggacctgagcctactaggacggagctggtgcctgcatatgtgcgcctacttcgtgataatgaagctgaagtacgcatagcagctgccggaaaagttacaaagttttgtcggattctaaaccctgaaattgctatccagcacattctcccctgtgtgaaggagctatcatcagactcttctcagcatgtcagatctgcattggcctcagttataatgggaatggctccagtcttgggtaaggatgcaacaattgagcatctccttccaatctttctttctctattgaaagatgagttcccggatgtacgcttgaacattatcagcaaacttgaccaagtgaatcaggttattgggattgatctactatcacaatccttgttgccagctattgtagaacttgctgaagatagacactggagagtaagacttgctataatcgagtatatccctttgttggcaagtcagttaggtgttggcttctttgacgataagcttggtgctctttgcatgcaatggttacaagacaaggttcactcaatccgcgatgctgctgctaacaatctcaagcggcttgctgaggaatttggtcctgaatgggcaatgcaacatatagttcctcaggttcttgagatggttaacaaccctcactatctctaccgaatgaccattttgcgtgcggtgtctcttcttgcacctgtaatgggctcagagattacatgctctaagctcttacctgtagtaatgactgcatctaaagacagagttccaaacatcaaattcaacgtcgctaaagtacttcaatccctcattccaatagttgatcaatcggttgtggagaagacgattcgtcctgggcttgtggagctaagcgaggatccagatgttgatgtcaggtttttcgcaaaccaagctctacaatctattgacaatgtgatgatgtctagctaaaaccattagatcttgtctctctgcttataatcgttttctatttgattgaaaaaaaaaacaaatctcaagacttttgtaacgtagtagtggattctcgtcttgtgttttttattacacgcaaactactagagtgcctcggtacgggttttgtcc

SEQ ID NO: 101987 - protein, 598 aa, Arabidopsis thaliana
  peptide (1)..(598): Ceres Seq. ID no. 13609232
LRRKLSRVCVEMSMIDEPLYPIAVLIDELKNDDIQLRLNSIRRLSTIARALGEERTRKELIPFLSENNDDDDEVLLAMAEELGVFIPYVGGVEYAHVLLPPLETLSTVEETCVREKAVESLCRVGSQMRESDLVDHFISLVKRLAAGEWFTARVSACGVFHIAYPSAPDMLKTELRSLYTQLCQDDMPMVRRAAATNLGKFAATVESAHLKTDVMSMFEDLTQDDQDSVRLLAVEGCAALGKLLEPQDCVQHILPVIVNFSQDKSWRVRYMVANQLYELCEAVGPEPTRTELVPAYVRLLRDNEAEVRIAAAGKVTKFCRILNPEIAIQHILPCVKELSSDSSQHVRSALASVIMGMAPVLGKDATIEHLLPIFLSLLKDEFPDVRLNIISKLDQVNQVIGIDLLSQSLLPAIVELAEDRHWRVRLAIIEYIPLLASQLGVGFFDDKLGALCMQWLQDKVHSIRDAAANNLKRLAEEFGPEWAMQHIVPQVLEMVNNPHYLYRMTILRAVSLLAPVMGSEITCSKLLPVVMTASKDRVPNIKFNVAKVLQSLIPIVDQSVVEKTIRPGLVELSEDPDVDVRFFANQALQSIDNVMMSS

SEQ ID NO: 101988 - protein, 587 aa, Arabidopsis thaliana; identical to SEQ ID NO: 22173
  peptide (1)..(587): Ceres Seq. ID no. 13609233

SEQ ID NO: 101989 - protein, 585 aa, Arabidopsis thaliana; identical to SEQ ID NO: 22174
  peptide (1)..(585): Ceres Seq. ID no. 13609234

SEQ ID NO: 101990 - DNA, 1216 bp, Arabidopsis thaliana
  misc_feature (1)..(1216): Ceres Seq. ID no. 13609235
  misc_feature (1)..(1216): Ortholog of  Ceres SEQ ID NO 15170885 as cited in SEQ ID NO 54326
tcatttcattgattacttgaaggatgatgtccgaattgttcgagacatacctgactggttcactgacaaagcagagctattctctagtataagaagaacagtcaaaaacattcccaaatatgcagcagcccaattttatattgacaatgttttacctcggataaaggagaagaagataatggccttgaagccttttgtcgatcgacttgggtatgacaatgtacctcaagaaatcaacagattacgatgccgtgtaaattatcatgctctcaaatttcttccagagatagagcagatggctgattcacttgtttctagaatgagaaatcgcactggaaatccaaatccatatatggctcttcatcttagattcgagaaaggaatggttggtctatcgttctgtgattttgtggggacaagggaagagaaagttaaaatggcagaatacagacaaaaggaatggcctcggcgtttcaagaatggttcccatctctggcagctcgccttgcagaagcgcaaagaaggtcgatgccctcttgagccaggagaagttgctgtgatcctacgtgcaatgggctatccaaaagaaacacaaatctatgttgcatctggtcaagtctatggcggtcaaaaccgtatggctccactaagaaacatgttcccaaatttggtaacaaaggaggatttagcaggcaaagaggaactaacaacgtttagaaaacacgttacaagtcttgcggctctagatttcttggtgtgcttgaaatcagatgtatttgtgatgacacacggtggaaactttgcaaaactgatcatcggagcgcgtagatatatggggcatcgccagaaatcaatcaaaccggataaagggttgatgtcgaaatcatttggggatccttacatgggatgggcaacttttgtggaagatgtagttgtaacccatcaaacacgaaccggtttacctgaagaaactttccctaactatgatctttgggaaaatcctctcactccatgcatgtgtaaagcttgatgatgatgcttttgtttggtcttggattttgtctgatgaggagcaacaaactatagagattcgtagttttcttcttcttcttcttcttttttgacctttcaaatctttgaagtcttcatttaccatctttgtaatcattttgatattatgtaaagttcctagtgatgaaaaaaaagtttctttttt

SEQ ID NO: 101991 - protein, 342 aa, Arabidopsis thaliana; identical to SEQ ID NO: 23731
  peptide (1)..(342): Ceres Seq. ID no. 13609236

SEQ ID NO: 101992 - protein, 283 aa, Arabidopsis thaliana; identical to SEQ ID NO: 23732
  peptide (1)..(283): Ceres Seq. ID no. 13609237

SEQ ID NO: 101993 - protein, 244 aa, Arabidopsis thaliana; identical to SEQ ID NO: 23733
  peptide (1)..(244): Ceres Seq. ID no. 13609238

SEQ ID NO: 101994 - DNA, 1256 bp, Arabidopsis thaliana
  misc_feature (1)..(1256): Ceres Seq. ID no. 13609239
  misc_feature (1)..(1256): Ortholog of  Ceres SEQ ID NO 15225196 as cited in SEQ ID NO 63947
agaagaagaagacgaagcagaggaatctagggtttatgctacattgaagcaaagatggttacgagcagcgatcaaatccaaaatggttctgaagagcaatcaaaaagatcagagatttacacatacgaagcaccatggcagatctacgcaatgaactggagcattcgtcgagacaagaagtatcggctcgcaatcacaagcctcatcgagcaatatccgaatcgcgtcgaaattgttcagcttgatgaatcaaatggtgagattcgttcagatccaaatctctgcttcgaacatccttacccaccaacgaaaaccagtttcatacccgataaagaatgtcaaagacccgatcttttagctacttctagtgatttccttcgtttatggcgaatctctgatgatgaatctcgtgttgagcttaagtcttgtcttagtagtgataagaatagtgagtttagtggtccaatcacttcatttgattggaatgaagctgagcctagacgaattggtacttctagtattgataccacttgtactatttgggatatagagcgtgaagttgttgatacccagcttattgctcatgataaagaggtttatgacattgcttggggtggtgttggtgtctttgcctctgtctcagaggatggttccgttagagtgtttgatctccgtgataaggagcattcgacgattatctacgagagtggtgagcctagtactcctttggtgcgacttagttggaacaagcaggatccgaggtatatggctactgttatcatgggcagtgctaaaattgttgtgttggatattcggtttccggctcttcctgtcgtggagcttcagcgacatcaggctagtgtcaatgctatagcttgggctcctcatagctcttcccatatctgctccgctggagatgattctcaggcgttgatttgggatatatcttccatgggacagcatgttgaaggtggtctggatccgattctagcttacacagccggcgctgaggttgagcagcttcagtggtcatcttctcagcctgattgggttgccattgccttctctaacaagctgcagattctccgggtctgattatgttttacagatttctgttggatacttggatgtaaaaactcgttgctattgttgattaatgatcttttgatctctgactctaagcctcattgagtttcctttcatagtatggtctgtgtaggaactatgtaccttcaaaattgtgaataactagcttt

SEQ ID NO: 101995 - protein, 346 aa, Arabidopsis thaliana; identical to SEQ ID NO: 35123
  peptide (1)..(346): Ceres Seq. ID no. 13609240

SEQ ID NO: 101996 - protein, 314 aa, Arabidopsis thaliana; identical to SEQ ID NO: 35124
  peptide (1)..(314): Ceres Seq. ID no. 13609241

SEQ ID NO: 101997 - DNA, 1975 bp, Arabidopsis thaliana
  misc_feature (1)..(1975): Ceres Seq. ID no. 13609242
  misc_feature (1)..(1975): Ortholog of  Ceres SEQ ID NO 13660287 as cited in SEQ ID NO 67316
acaaaattcctctttttttttatttaattaaaattgcatcaaaatgtttgttttcttgagccgaattattctattaagcgcattaaaaaagaaaaaaaaaaaagaaataggagctaatgtaatttagagaaactctatcaaagacttataataaccaaaacgaagacctattgtgaccaaatacaaagggtggggcagatcgtttctttgaatactatgatgtcttttagtttatgagttgctttatttctgatacttctcctccccattctcttatcctatcctcagccattgaaacctctgtgtcccaatttgttttgcagatcatccatgttaaaactattgtctgaaccacggtccccgtcaacattccacaccagattcccattacaccatagttaagcttgtaccccaataatagaccaaatgggattccaaacacgtaatagcaggcgatgttaacgtaggccaccactgcttgccatccagctcccacagccacactgataagacaggttggacattgttgatgacaatggaaagtgcaagtattggtgtgagttctttaacaagaatgatgactttttcgtctttcacaaaaagtgatggatattgatctctaaagatgagtagaatcattgatacaatgaatccgattagcgtcgatgttatcactgccacaagtagtgagaatttcgcggttcttggatggttagctcctaattcattagacactctcacacttacggctgtgttcatcccaatagcaatcatagcagtccatcccaaaatattcatccagatggagagggcagctacagagatttcagcattcttcaaatatccagcaaataatatgattgccataaaataccaaacctccaaactgagcataacagcagaagccaaagataatctaacgaaactccacaaattatgaaaagcctcccacgagaaaccagaccaagcctcaccacacgtaccactaaatatgtacacaagctgagccatgtcaatgaagcaccacgacgcgttaagcactacggctagacctggcataccccactggagcttcacaatgacaaaccacgtgagaggcacgtgtataacaagtgcaacagccgatatcacggccatgaccattatcttgctttgcgattgcaaaaatttagcggttggaaaattgatggcgtaggcaaagatttgagggatcatgtagatggaaaatattccggccgcgctagagattgccgccgtttgaccaatggacgcgaggataggggcggcgaaaatgtaaaggagagagaggataagagcagtcacgtttagtatcacccatgatcgttgcaagtaaacgccaagcattgacaattttcctgctccaaacgcttgtccacatagcgtttctaacgcacttcccattccaaccatgatgccgaatgagaagccggcaacgacggagttttcgacggagacagcggcaagagcgatggtgctgatgtgaccggcgaagacctgagtaatagcgccgagagaatattggttcacggatgtgaaaatggcgggaccggccaagtaccatagctttttggtttccacgttgaattccctaacgaagccaccgacggtggtgatcggaggaatatcgtcgacggataagaaaggaagatcagaacgttcttccgccgcagtgagaagcgtctccgttatatctttgtcttttgccatcttaagagaaagagatggagagattaaaggaggtcgaagactaaggaccaacgagtgaggatcttgggtttaatcattcatgaattatataggaaaaaaaatgttaatacgtgcgaccaaaaaaattgtttttatgatattaaggaaaaaatagctaatatagcaactagcatttaataaaatggctaaatgtagacaaaatcattgttgtattaatcaaattatggtatatattatggatggattc

SEQ ID NO: 101998 - protein, 104 aa, Arabidopsis thaliana
  peptide (1)..(104): Ceres Seq. ID no. 13609243
MSRIIDTMNPISVDVITATSSENFAVLGWLAPNSLDTLTLTAVFIPIAIIAVHPKIFIQMERAATEISAFFKYPANNMIAIKYQTSKLSITAEAKDNLTKLHKL

SEQ ID NO: 101999 - protein, 97 aa, Arabidopsis thaliana
  peptide (1)..(97): Ceres Seq. ID no. 13609244
MNPISVDVITATSSENFAVLGWLAPNSLDTLTLTAVFIPIAIIAVHPKIFIQMERAATEISAFFKYPANNMIAIKYQTSKLSITAEAKDNLTKLHKL

SEQ ID NO: 102000 - protein, 75 aa, Arabidopsis thaliana
  peptide (1)..(75): Ceres Seq. ID no. 13609245
MAGPAKYHSFLVSTLNSLTKPPTVVIGGISSTDKKGRSERSSAAVRSVSVISLSFAILRERDGEIKGGRRLRTNE

SEQ ID NO: 102001 - DNA, 1618 bp, Arabidopsis thaliana
  misc_feature (1)..(1618): Ceres Seq. ID no. 13609250
  misc_feature (1)..(1618): Ortholog of  Ceres SEQ ID NO 13594345 as cited in SEQ ID NO 58043
  misc_feature (1)..(1618): Ortholog of  Ceres SEQ ID NO 15168421 as cited in SEQ ID NO 60131
  misc_feature (1)..(1618): Ortholog of  Ceres SEQ ID NO 13597574 as cited in SEQ ID NO 64677
  misc_feature (1)..(1618): Ortholog of  Ceres SEQ ID NO 13597843 as cited in SEQ ID NO 64850
  misc_feature (1)..(1618): Ortholog of  Ceres SEQ ID NO 13597678 as cited in SEQ ID NO 65375
  misc_feature (1)..(1618): Ortholog of  Ceres SEQ ID NO 15176787 as cited in SEQ ID NO 66468
  misc_feature (1)..(1618): Ortholog of  Ceres SEQ ID NO 13596180 as cited in SEQ ID NO 67941
  misc_feature (1)..(1618): Ortholog of  Ceres SEQ ID NO 13591190 as cited in SEQ ID NO 68044
  misc_feature (1)..(1618): Ortholog of  Ceres SEQ ID NO 13595961 as cited in SEQ ID NO 68223
atgggtgaagaagctatagttctgtatcctgcaccaccaataggtcacttagtgtccatggttgagttaggtaaaaccatcctctccaaaaacccatctctctccatccacattatcttagttccaccgccttatcagccggaatcaaccgccacttacatctcctccgtctcctcctccttcccttcaataaccttccaccatcttcccgccgtcacaccgtactcctcctcctccacctctcgccaccaccacgaatctctcctcctagagatcctctgttttagcaacccaagtgtccaccgaactcttttctcactctctcggaatttcaatgtccgagcaatgatcatcgatttcttctgcaccgccgttttagacatcaccgctgacttcacgttcccggtttacttcttctacacctctggagccgcatgtctcgccttttccttctatctcccgaccatcgacgaaacaacccccggaaaaaacctcaaagacattcctacagttcatatccccggcgttcctccgatgaagggctccgatatgcctaaggcggtgctcgaacgagacgatgaggtctacgatgtttttataatgttcggtaaacagctctcgaagtcgtcagggattattatcaatacgtttgatgctttagaaaacagagccatcaaggccataacagaggagctctgttttcgcaatatttatccaattggaccgctcattgtaaacggaagaatcgaagatagaaacgacaacaaggcagtttcttgtctcaattggctggattcgcagccggaaaagagtgttgtgtttctctgttttggaagcttaggtttgttctcaaaagaacaggtgatagagattgctgttggtttagagaaaagtgggcagagattcttgtgggtggtccgtaatccacccgagttagaaaagacagaactggatttgaaatcactcttaccagaaggattcttaagccgaaccgaagacaaagggatggtcgtgaaatcatgggctccgcaagttccggttctgaatcataaagcagtcgggggattcgtcactcattgcggttggaattcaattcttgaagctgtttgtgctggtgtgccgatggtggcttggccgttgtacgctgagcagaggtttaatagagtgatgattgtggatgagatcaagattgcgatttcgatgaatgaatcagagacgggtttcgtgagctctacagaggtggagaaacgagtccaagagataattggggagtgtccggttagggagcgaaccatggctatgaagaacgcagccgaattagccttgacagaaactgattgcaattccgatggatgaatcagacatgggtttcgtgagctcaacggaggtggtgaatcgagaccgcgaggtactgctggatggtccggttaggaagaaaaccaaagaacgcagccgaatcagccttggcagaaaccggttcatctcatgccgtgttgactacgttactcctcagtcatggagcccaaaatgttcttaaaaatcaagccttgtagtattaattaatggtaggaatgtttctaaacttataaattcccatatctctaatgaatgatctttg

SEQ ID NO: 102002 - protein, 451 aa, Arabidopsis thaliana
  peptide (1)..(451): Ceres Seq. ID no. 13609251
MGEEAIVLYPAPPIGHLVSMVELGKTILSKNPSLSIHIILVPPPYQPESTATYISSVSSSFPSITFHHLPAVTPYSSSSTSRHHHESLLLEILCFSNPSVHRTLFSLSRNFNVRAMIIDFFCTAVLDITADFTFPVYFFYTSGAACLAFSFYLPTIDETTPGKNLKDIPTVHIPGVPPMKGSDMPKAVLERDDEVYDVFIMFGKQLSKSSGIIINTFDALENRAIKAITEELCFRNIYPIGPLIVNGRIEDRNDNKAVSCLNWLDSQPEKSVVFLCFGSLGLFSKEQVIEIAVGLEKSGQRFLWVVRNPPELEKTELDLKSLLPEGFLSRTEDKGMVVKSWAPQVPVLNHKAVGGFVTHCGWNSILEAVCAGVPMVAWPLYAEQRFNRVMIVDEIKIAISMNESETGFVSSTEVEKRVQEIIGECPVRERTMAMKNAAELALTETDCNSDG

SEQ ID NO: 102003 - protein, 432 aa, Arabidopsis thaliana
  peptide (1)..(432): Ceres Seq. ID no. 13609252
MVELGKTILSKNPSLSIHIILVPPPYQPESTATYISSVSSSFPSITFHHLPAVTPYSSSSTSRHHHESLLLEILCFSNPSVHRTLFSLSRNFNVRAMIIDFFCTAVLDITADFTFPVYFFYTSGAACLAFSFYLPTIDETTPGKNLKDIPTVHIPGVPPMKGSDMPKAVLERDDEVYDVFIMFGKQLSKSSGIIINTFDALENRAIKAITEELCFRNIYPIGPLIVNGRIEDRNDNKAVSCLNWLDSQPEKSVVFLCFGSLGLFSKEQVIEIAVGLEKSGQRFLWVVRNPPELEKTELDLKSLLPEGFLSRTEDKGMVVKSWAPQVPVLNHKAVGGFVTHCGWNSILEAVCAGVPMVAWPLYAEQRFNRVMIVDEIKIAISMNESETGFVSSTEVEKRVQEIIGECPVRERTMAMKNAAELALTETDCNSDG

SEQ ID NO: 102004 - protein, 336 aa, Arabidopsis thaliana
  peptide (1)..(336): Ceres Seq. ID no. 13609253
MIIDFFCTAVLDITADFTFPVYFFYTSGAACLAFSFYLPTIDETTPGKNLKDIPTVHIPGVPPMKGSDMPKAVLERDDEVYDVFIMFGKQLSKSSGIIINTFDALENRAIKAITEELCFRNIYPIGPLIVNGRIEDRNDNKAVSCLNWLDSQPEKSVVFLCFGSLGLFSKEQVIEIAVGLEKSGQRFLWVVRNPPELEKTELDLKSLLPEGFLSRTEDKGMVVKSWAPQVPVLNHKAVGGFVTHCGWNSILEAVCAGVPMVAWPLYAEQRFNRVMIVDEIKIAISMNESETGFVSSTEVEKRVQEIIGECPVRERTMAMKNAAELALTETDCNSDG

SEQ ID NO: 102005 - DNA, 1537 bp, Arabidopsis thaliana
  misc_feature (1)..(1537): Ceres Seq. ID no. 13609254
  misc_feature (1)..(1537): Ortholog of  Ceres SEQ ID NO 15171430 as cited in SEQ ID NO 51500
  misc_feature (1)..(1537): Ortholog of  Ceres SEQ ID NO 15172476 as cited in SEQ ID NO 54945
  misc_feature (1)..(1537): Ortholog of  Ceres SEQ ID NO 15176106 as cited in SEQ ID NO 60324
  misc_feature (1)..(1537): Ortholog of  Ceres SEQ ID NO 13654989 as cited in SEQ ID NO 63117
  misc_feature (1)..(1537): Ortholog of  Ceres SEQ ID NO 13584744 as cited in SEQ ID NO 69137
gctcaattttctttctttctttctttctttctctgggagtttgggattttcttaagggtctttttcaattctcgctccattttgtacgcatagaactgggtttgtgtttacacacataaagctcttatcttttttcttctttcaatcgagaagattatagagctgagtgactgattggtggtttcttggagttttaatgggaggttgtttcagcaatcggattaaaacagatattgcttccagtacatggctaagttcgaaattcttgagtagagatgggagcaagggctcgtcgaccgcttccttctcttatatgcctcgaacagaaggcgagatcttgcaaaatgctaatctcaagaactttagtctcagtgaactgaaatctgcaactaggaatttccggcctgatagtgtggttggtgaaggtggatttggttgcgttttcaaaggctggatcgatgagtcctctctcgctccttctaaaccggggaccgggattgtcattgctgtgaaaagacttaaccaagaagggtttcaaggtcatcgagagtggctggctgagatcaattatttaggccagctggatcatcctaaccttgtgaaactgattggatactgcttggaagaggagcacaggcttcttgtttacgagtttatgactcgtggtagtcttgagaatcacttattcagaagaggaacattctatcagccactttcatggaacacgcgggttcgtatggctcttggtgcagctagaggacttgcttttcttcacaatgctcaaccgcaagttatataccgagacttcaaagcatctaacatcttgctagattcgaactacaacgcaaagctttcggatttcggtttggctagagatggtccaatgggtgacaacagccatgtttctaccagagtcatgggaactcagggatacgctgctccagaatatctagctacaggtcatttatcggtgaagagcgatgtatacagttttggggttgtgttactggagttgttatcaggaagacgagcaattgacaagaatcaaccagtaggagaacacaatctcgtggattgggcaagaccctacttaacaaacaagagaagacttctgcgagtgatggatcctcgtctccaaggtcaatactcactaacccgagctttgaaaattgcagttcttgcactcgattgcatatctatagatgccaagagtagaccgaccatgaacgaaatcgtcaagacaatggaagaacttcatatccagaaggaagcatcaaaagagcagcagaatcctcaaatcagcattgacaacatcatcaacaaatctccacaagctgtgaattatcctaggccttcaattatgtaacaatcctaggcgagctatttaccgggttttagagatgtatagactctttaccttctgtctgtttagatattatgttgtttggtagtaacaaaagagctggcaatgtaagggagagaaggaaacttactagttgtaaacttaggttctcttacaacgttcacatgttatctc

SEQ ID NO: 102006 - protein, 389 aa, Arabidopsis thaliana; identical to SEQ ID NO: 20837
  peptide (1)..(389): Ceres Seq. ID no. 13609255

SEQ ID NO: 102007 - protein, 350 aa, Arabidopsis thaliana; identical to SEQ ID NO: 20838
  peptide (1)..(350): Ceres Seq. ID no. 13609256

SEQ ID NO: 102008 - protein, 236 aa, Arabidopsis thaliana; identical to SEQ ID NO: 20839
  peptide (1)..(236): Ceres Seq. ID no. 13609257

SEQ ID NO: 102009 - DNA, 1393 bp, Arabidopsis thaliana
  misc_feature (1)..(1393): Ceres Seq. ID no. 13609258
  misc_feature (1)..(1393): Ortholog of  Ceres SEQ ID NO 13654557 as cited in SEQ ID NO 68444
acagcaaaaaatcgaaaatggttgcctcagccgccgcacatgagcaccgatcaatccaccaccgtcactttaccagacgtcatgactgctccagttcgacctgacattgtcaacttcgtccacgcccaaatctccaacaacagccgtcagccttacgcagtctccaaaaaggccggtcaccaaacctccgccgagtcctggggaaccggaagagccgtgtcacgtatccctcgtgttcctggtggtggaactcaccgtgccggtcaagcagcgttcggaaacatgtgtcgtggtggtcgtatgtttgctccgactaagatctggagacgctggcaccgtcgtgtcaatgtcaacatgaagaggcacgcgattgtttctgcaatcgctgctactgctgttccagctcttgtgatggctcgtggtcacaagatcgagaatgttcctgagatgcctcttgttgttagcgactcagctgaagctgtggagaagacatcagctgcgatcaaggtattgaagcagatcggtgcttacgacgatgcggagaaagctaagaacagtattggaattcgtcctggtaaaggtaaaatgaggaatcgtcgttacatttctaggaaaggtcctcttgttgtgtttggaactgaaggagccaagattgtgaaagcttttaggaatcttcctggtgttgagctttgtcacgttgagaggcttaacttgttgaaattagcccctggtggtcaccttggtaggtttgtgatttggactaagtctgcttttgagaagcttgaatctatctatggctcgtttgagaaaccatcagagaagaagaagggttacgtcttgcctcgtgcgaagatggtgaatgctgatcttgctaggattattaactccgatgaggtacagagtgtggtgaacccgattaaggatggttccaagagagcggttctgaagaagaatccattgaagaaccttaatgtgatgttcaagttgaatccttatgctaagaccgcaaagagaatgtctctgttggctgaagcttcaagggttaaggctaagaaggagaagctcgagaagaagaggaaagtcgtcactaaggaggaggcccaagcgatcaaagcagcaggcaaggcttggtatcagactatgatttcagacagtgactacaccgagttcgataacttcaccaagtggcttggcgctagtcagtaatgatgctctcgtcatcgcaaagtctcttatatctaggcaaagattttggttttctgatttatgttcttcgtttgtattggatttatctgggattttatgttgttgagttggtaagacgatttttaagaactatgatggtgtttttcaaactcttttcaatctgtttcccttagtgctctttactcgc

SEQ ID NO: 102010 - protein, 401 aa, Arabidopsis thaliana
  peptide (1)..(401): Ceres Seq. ID no. 13609259
TAKNRKWLPQPPHMSTDQSTTVTLPDVMTAPVRPDIVNFVHAQISNNSRQPYAVSKKAGHQTSAESWGTGRAVSRIPRVPGGGTHRAGQAAFGNMCRGGRMFAPTKIWRRWHRRVNVNMKRHAIVSAIAATAVPALVMARGHKIENVPEMPLVVSDSAEAVEKTSAAIKVLKQIGAYDDAEKAKNSIGIRPGKGKMRNRRYISRKGPLVVFGTEGAKIVKAFRNLPGVELCHVERLNLLKLAPGGHLGRFVIWTKSAFEKLESIYGSFEKPSEKKKGYVLPRAKMVNADLARIINSDEVQSVVNPIKDGSKRAVLKKNPLKNLNVMFKLNPYAKTAKRMSLLAEASRVKAKKEKLEKKRKVVTKEEAQAIKAAGKAWYQTMISDSDYTEFDNFTKWLGASQ

SEQ ID NO: 102011 - protein, 388 aa, Arabidopsis thaliana; identical to SEQ ID NO: 36167
  peptide (1)..(388): Ceres Seq. ID no. 13609260

SEQ ID NO: 102012 - protein, 374 aa, Arabidopsis thaliana
  peptide (1)..(374): Ceres Seq. ID no. 13609261
MTAPVRPDIVNFVHAQISNNSRQPYAVSKKAGHQTSAESWGTGRAVSRIPRVPGGGTHRAGQAAFGNMCRGGRMFAPTKIWRRWHRRVNVNMKRHAIVSAIAATAVPALVMARGHKIENVPEMPLVVSDSAEAVEKTSAAIKVLKQIGAYDDAEKAKNSIGIRPGKGKMRNRRYISRKGPLVVFGTEGAKIVKAFRNLPGVELCHVERLNLLKLAPGGHLGRFVIWTKSAFEKLESIYGSFEKPSEKKKGYVLPRAKMVNADLARIINSDEVQSVVNPIKDGSKRAVLKKNPLKNLNVMFKLNPYAKTAKRMSLLAEASRVKAKKEKLEKKRKVVTKEEAQAIKAAGKAWYQTMISDSDYTEFDNFTKWLGASQ

SEQ ID NO: 102013 - DNA, 986 bp, Arabidopsis thaliana
  misc_feature (1)..(986): Ceres Seq. ID no. 13609262
  misc_feature (1)..(986): Ortholog of  Ceres SEQ ID NO 13594655 as cited in SEQ ID NO 51843
  misc_feature (1)..(986): Ortholog of  Ceres SEQ ID NO 13637562 as cited in SEQ ID NO 53674
  misc_feature (1)..(986): Ortholog of  Ceres SEQ ID NO 13595851 as cited in SEQ ID NO 56559
  misc_feature (1)..(986): Ortholog of  Ceres SEQ ID NO 15173454 as cited in SEQ ID NO 57898
  misc_feature (1)..(986): Ortholog of  Ceres SEQ ID NO 13598755 as cited in SEQ ID NO 69032
aaaaaaaatccgtagtttcttctacagaatcagatctttgtatcgtcaatggctccttcttttatttttgtagaagatcgtccagctccgcttgatgctacttctgatccaccgtctctcttcgacggaaccacaaggttgtacacaagctacgtttgcccatttgctcaacgagtttggatcactcgaaacttcaagggtttgcaagaaaagattaaacttgttcctttggatcttgggaataggcctgcttggtacaaggagaaagtatatccagagaacaaggtgccagcgcttgagcacaatggaaaaatcattggggagagtctggatttgattaaatatcttgataacacttttgaagggccttctctttaccccgaggatcatgcaaaaagagagtttggcgacgagttgctcaagtatactgatactttcgttaaaactatgtatgtgtcactcaaaggagacccctctaaagaaaccgcacctgtgttagattatctggaaaacgctctgtataagttcgatgacgggccgttcttcctcggtcagttaagcttggttgatatcgcctatatcccgttcattgaaaggttccaaactgtactcaatgaattatttaagtgcgacattactgccgaacgtcccaaactatcagcatggattgaggaaattaacaagagcgatggctatgcacagacgaaaatggatcctaaggagattgtggaggttttcaagaaaaaattcatgtaactgtaagcaagcacgaagcagtaaagtgtatgagaccaaaccaccttgtacgaacaggtggtctttggatatgaagaaataagatgtgtacttgaacctgatgatgcaataagatttgtactttaagcagcaacagcttaatctgtattctagtgttgatcaaattatcaaccattgacattgttaatatattactgtatgatagtaatactatcaaaatctcacacatt

SEQ ID NO: 102014 - protein, 235 aa, Arabidopsis thaliana; identical to SEQ ID NO: 29141
  peptide (1)..(235): Ceres Seq. ID no. 13609263

SEQ ID NO: 102015 - DNA, 2641 bp, Arabidopsis thaliana
  misc_feature (1)..(2641): Ceres Seq. ID no. 13609266
  misc_feature (1)..(2641): Ortholog of  Ceres SEQ ID NO 15172609 as cited in SEQ ID NO 61938
  misc_feature (1)..(2641): Ortholog of  Ceres SEQ ID NO 13595870 as cited in SEQ ID NO 62101
  misc_feature (1)..(2641): Ortholog of  Ceres SEQ ID NO 13590241 as cited in SEQ ID NO 63878
  misc_feature (1)..(2641): Ortholog of  Ceres SEQ ID NO 13657939 as cited in SEQ ID NO 66349
  misc_feature (1)..(2641): Ortholog of  Ceres SEQ ID NO 13660597 as cited in SEQ ID NO 67655
  misc_feature (1)..(2641): Ortholog of  Ceres SEQ ID NO 13654484 as cited in SEQ ID NO 67717
tcatcatcatcatcatcaccaatcgatctctctagaaacaaatttcccaacttccttcttagagctctcttgtcagtttaagctatcattatgtcaaacgaaccggaatcctccgactcgaaaactaagaaggatttcagtactgcgattctagagaggaagaagtctccaaaccgacttgttgtcgatgaagctattaacgatgacaactctgttgtctctctccatcctactaccatggaaaaactccagcttttccgaggcgatacaattctcatcaagggtaagaagaggaaggacactgtatgcattgccctcgctgatgaaacatgtgaggaacccaagatcagaatgaataaggttgtaaggtctaacttgagggttaggctgggagatgttatttctgttcaccaatgcccagatgtcaagtatggaaagcgtgttcacatcttgcctgttgatgatacagttgaaggcgttactggaaacctctttgatgcttacctgaaaccttactttctggaggcgtaccgtccagtgaggaagggagatcttttcctagtgagaggaggaatgaggagtgtggagttcaaagtgatcgagactgatcctgctgagtactgtgtggtggctccagatacagagattttctgtgagggtgaaccagttaagagggaggacgaagaaaggcttgatgaggttggttatgacgatgttggtggtgtcaggaaacagatggctcagattagggaattggttgaacttcccttgaggcatccacaactctttaaatcaattggtgtgaagccaccaaagggaattctgctttacggacctcctggatccgggaagactcttattgctcgtgctgtggctaatgaaaccggagcattcttcttctgtatcaatggaccggaaatcatgtcgaaactagctggtgagagtgagagcaacctcaggaaagcatttgaggaggctgagaagaatgccccgtctatcatattcattgatgagattgactctattgcaccaaaaagagagaagacgaatggtgaggttgagaggaggattgtctctcagctccttacgcttatggatggactaaaatcacgtgcccatgttattgttatgggagcaacaaatcgtcccaacagtattgatccggctttgagaaggtttggaagattcgacagggaaattgatatcggtgttcctgatgaaattggacgtcttgaagttcttaggatccacacgaagaacatgaagctagctgaagatgttgatctagaaagaatctccaaggacacgcatggatatgttggagctgatcttgcagctctatgcactgaagctgcccttcaatgtatcagagagaagatggatgtgattgacttggaagatgactcaattgacgccgaaatcctcaattccatggctgtgtctaatgaacacttccacactgctcttggaaacagcaacccatccgcccttcgtgaaactgttgtggaggttccaaatgtctcctgggaggatattggaggtctcgagaatgttaagagagagcttcaggagactgttcaataccctgtggagcatccagagaaattcgagaagtttggtatgtctccatcaaagggagttcttttctacggtcctcctggatgtggtaaaaccctgttagccaaagctatagcaaacgagtgccaagcaaacttcatcagtgtcaagggacccgagcttctcacaatgtggtttggagaaagtgaagccaacgtccgagaaatctttgacaaggctcgtcaatctgctccttgtgttctgtttttcgatgagctagactccattgctactcagagagggaacagcgcgggtgatgccggcggtgcagctgacagagtgttgaatcagcttttgacagaaatggatggaatgaatgcaaagaagacggtattcattattggagcaactaacagaccggatatcatagattcagctcttcttcgacctggaagactcgaccagcttatctacattcctctacctgatgaagattcccgtctcaatatctttaaggcctgcttgagaaaatctcccgtcgctaaagatgtagatgttactgcactcgcaaagtacactcagggattcagtggtgctgatatcaccgagatctgccagagagcttgcaagtacgccatcagagaaaacatcgaaaaggatattgagaacgagcgtagaaggagccagaatccagaggccatggaggaagatatggtggatgatgaagtttcagagattagagctgctcatttcgaagagtcgatgaaatatgcaaggagaagtgtgagtgatgctgatattcgcaagtaccaagcttttgctcagacgctgcagcaatccagagggtttggatctgagttcaggtttgactcaaccgctggtgtcggacgcaccactggtgttgcagccgccgatccctttgccacttctgcagctgcagctgatgacgacgatctctacagttagattttgatttcttagtgatcgtttttcttctttctttaacttaaattaggttcttttggatgatgtcgagattgatacagtttaaaatcatctgggtttgccagcttataatcacttg

SEQ ID NO: 102016 - protein, 810 aa, Arabidopsis thaliana; identical to SEQ ID NO: 42289
  peptide (1)..(810): Ceres Seq. ID no. 13609267

SEQ ID NO: 102017 - protein, 761 aa, Arabidopsis thaliana; identical to SEQ ID NO: 42290
  peptide (1)..(761): Ceres Seq. ID no. 13609268

SEQ ID NO: 102018 - protein, 723 aa, Arabidopsis thaliana; identical to SEQ ID NO: 42291
  peptide (1)..(723): Ceres Seq. ID no. 13609269

SEQ ID NO: 102019 - DNA, 1166 bp, Arabidopsis thaliana
  misc_feature (1)..(1166): Ceres Seq. ID no. 13609274
  misc_feature (1)..(1166): Ortholog of  Ceres SEQ ID NO 15177746 as cited in SEQ ID NO 57935
ccattaattactaaacccaaacccaaccaaagatcttcacaaagaaaaaaacaattggtggtatcaatggggaagaagaagatgaaactctcttctctgttcaaaggcggagccggaggattactagcggttcctctctgttacaatgccaaaactctttcgttccgagtcggcgacgacatgatcaagacggtgaactctgttttcttcgaccaccaccacaacaacaacaatggaggagatttgttggaagcggagacgcctgagtcatggtttactaactcgtccgagacagcgagtcactcaaccgagtcggatcaagaccttgacgctgagtccttagagatggtggttcgtggcgttgttagatcggagcggttattcttcgatccaggagttacgagttcgattctggaagagattgaagagaaatcgaaatcggatttgaaatcgaaggaaacggttgcggtgggagaagatcggagtacgccgattgaggagattagtgtcgcggtggcgatggaatccgaggatccgtacggtgatttccggcgatcgatggaggagatggtgacgagtcacggtgagttggctaaagattgggagagcttggaatcgatgctcgcttggtatttgaggatgaatgggaggaagagtcacggcgttatcgtcagtgcttttgttgatcttctctctggactctctgattccggcgccggaataacgtcggcttcggtatcggattcggctcgttattcaaccgccgtttcgtctttgccgtcgtcgccggtttattcgttatctcaaggtcagacggagattcaagaggaagagagacggagctgttaaaaataaaaaaaggcttaagattcggttttaaattttttaatctccggttttgtttagattaattaaccctttttggattttgtaaaaagtaattagtggttagaggaaaaagaaccattaaatatatatcaaaaatatttttagagccattattgttgatttatgtgtataacagtgccttttgtcataactcgaaagttacactatttttcccccaaaattcatgaaactcagcgaagtttatgccaacagattcagagaaattttgtataacagccccattttaaaaggaaatatacataagaataaattctgtg

SEQ ID NO: 102020 - protein, 282 aa, Arabidopsis thaliana; identical to SEQ ID NO: 28728
  peptide (1)..(282): Ceres Seq. ID no. 13609275

SEQ ID NO: 102021 - protein, 260 aa, Arabidopsis thaliana; identical to SEQ ID NO: 28729
  peptide (1)..(260): Ceres Seq. ID no. 13609276

SEQ ID NO: 102022 - protein, 255 aa, Arabidopsis thaliana; identical to SEQ ID NO: 28730
  peptide (1)..(255): Ceres Seq. ID no. 13609277

SEQ ID NO: 102023 - DNA, 1528 bp, Arabidopsis thaliana
  misc_feature (1)..(1528): Ceres Seq. ID no. 13609285
  misc_feature (1)..(1528): Ortholog of  Ceres SEQ ID NO 13597740 as cited in SEQ ID NO 64482
  misc_feature (1)..(1528): Ortholog of  Ceres SEQ ID NO 13596056 as cited in SEQ ID NO 68307
  misc_feature (1)..(1528): Ortholog of  Ceres SEQ ID NO 12388689 as cited in SEQ ID NO 0
aacgcattattgacacgtgtcttttcatttctcttcttccggcgttttctctccgccgtttcgccaccgtacgtgacaatgtctgtttctctctccgccgcctctcacttactctgttcctccaccagagtctctctttcccccgccgtcacctcttcgtcctcgtcccctgtcgttgctctttcttcctctacatcgccacattctcttggaagcgtcgcatcttcttctctgtttcctcactcctccttcgtgcttcagaaaaaacatccgatcaatgggacgagcacgaggatgatttcaccaaaatgtgccgcttctgatgcagctcaattgataagcgctaaagaagatatcaaagttcttctccggactaagttttgccatcccatcttggttagattggggtggcacgatgctggtacttataacaagaatattgaggagtggccactgagaggtggagctaatggaagtcttaggtttgaggctgagcttaagcatgctgcaaatgctggtctgcttaatgctttaaagctcattcagcctctcaaagacaagtatcctaacatctcttatgcggacttattccagttagctagtgccacagcaatagaggaggctggtggtcctgatatcccgatgaaatatgggagagttgatgttgtagcacctgaacagtgtccagaagaaggaagactccctgatgctggacctccttcaccagctgatcatttgagagatgttttctacagaatgggacttgatgacaaggaaatagttgccttgtctggtgcacataccttagggagagccagaccagaccgtagtggttggggaaaacctgagacaaagtacacgaaaactggacctggagaagcaggaggacagtcatggacagtgaaatggctcaagttcgacaactcttatttcaaggatatcaaagaaaagagggacgacgatcttctggtgttacccactgatgcggcgctatttgaagatccttcattcaagaactatgcagagaagtatgctgaagatgtggctgcatttttcaaggactacgctgaagcccatgccaagcttagcaatctcggtgcaaaatttgatcctcccgagggcatagtcattgaaaacgttccagagaagttcgtagctgcaaagtattctacgggaaagaaggagctttcggattcgatgaaaaagaagataagagcagagtatgaagcaattggaggaagcccagataagccattacccacaaattacttcctcaacatcataattgccattggcgttttggtcctcttgtccactctctttggtggtaataacaactccgatttctctggtttctaattgacaaattatatattttgatttctcttacctacatacataattacgtggtgatcatatattccttgcaaacaaaaacatcattgttaaagtttgcttgaataaaatcaccttataaataacattgtttatttggtttttagaattttgagattagtgtgagtttctt

SEQ ID NO: 102024 - protein, 452 aa, Arabidopsis thaliana
  peptide (1)..(452): Ceres Seq. ID no. 13609286
NALLTRVFSFLFFRRFLSAVSPPYVTMSVSLSAASHLLCSSTRVSLSPAVTSSSSSPVVALSSSTSPHSLGSVASSSLFPHSSFVLQKKHPINGTSTRMISPKCAASDAAQLISAKEDIKVLLRTKFCHPILVRLGWHDAGTYNKNIEEWPLRGGANGSLRFEAELKHAANAGLLNALKLIQPLKDKYPNISYADLFQLASATAIEEAGGPDIPMKYGRVDVVAPEQCPEEGRLPDAGPPSPADHLRDVFYRMGLDDKEIVALSGAHTLGRARPDRSGWGKPETKYTKTGPGEAGGQSWTVKWLKFDNSYFKDIKEKRDDDLLVLPTDAALFEDPSFKNYAEKYAEDVAAFFKDYAEAHAKLSNLGAKFDPPEGIVIENVPEKFVAAKYSTGKKELSDSMKKKIRAEYEAIGGSPDKPLPTNYFLNIIIAIGVLVLLSTLFGGNNNSDFSGF

SEQ ID NO: 102025 - protein, 426 aa, Arabidopsis thaliana; identical to SEQ ID NO: 43222
  peptide (1)..(426): Ceres Seq. ID no. 13609287

SEQ ID NO: 102026 - protein, 354 aa, Arabidopsis thaliana; identical to SEQ ID NO: 43223
  peptide (1)..(354): Ceres Seq. ID no. 13609288

SEQ ID NO: 102027 - DNA, 2494 bp, Arabidopsis thaliana
  misc_feature (1)..(2494): Ceres Seq. ID no. 13609289
  misc_feature (1)..(2494): Ortholog of  Ceres SEQ ID NO 13655755 as cited in SEQ ID NO 65117
atggaggtaagtttgacggcgggagcaatcgggaagataatgaatggagaagtgacgactgaagcagatatgattccggtgttgcaagtgacggatttgaagcagattatggctcaacaagatccaacaagagagaggtttaggatggtgttatctgatgggacatacttgcatcaaggaatgctaggaactgatctcaacaatcttgtcaaagaagggactcttcaacccggttctattgttagacttactcgtttcgtcggtgatgtcatcaagggtcgaaggattgttattgttccgcaactggaggtgttaaaacagatttctgatattatcgggcatcctgttccaggaggaaagcataatgatcaacgtggagcagattctggtattaagtttaatacaactgagcaacaaggtagtggtatccgtcaagtaaacaatatcgagccagggagaagtaatgcagctatttcacctcaggttggtggtactggttctagtgttcctgcatcaacaacaccttccactcgggcatacagcaatccgtcttcaggtaatggagtcactaggcaggactatgctcgtgatcctccaacaagttatcctcatcagcctcaaccaccaccaccgatgtatgcaaacaggggaccagtggctaggaatgaagcacctcctaagataattccagttaatgctcttagtccatattcaggtaggtggaccatcaaggccagagtcacgaataaagcagcacttaagcaatacagtaatccccgtggggaagggaaagtgttcaactttgatcttcttgatgctgatggcggagaaatacgtgttacttgttttaacgctgtggctgatcaattctatgaccagattgttgttggtaatctttatcttatctcgaggggaagtttgcggcctgcacaaaagaactttaatcatcttcgaaatgattacgagatcatgctggataatgcatcaactataaaacaatgctatgaagaggatgctgcaattccgcgccatcagttccatttccgtaccattggggatattgagagcatggagaataactgcatcgttgatgtaattggtattgtgtcatctatcagtcctactgtaacaataacgaggaaaaacggaactgcaacaccgaaaagatcacttcagttgaaggatatgtcaggccgaagtgttgaggtaactatgtggggtgacttctgcaatgcagaaggacaaaggctgcaaagtctttgtgattctggtgtgtttccggttcttgctgttaaggcgggcaggattagtgaatttaatggaaagacagtgagcaccattggatcaagtcagctgttcattgacccagattttgttgaagctgagaaactgaagaactggtttgagagagaaggaaagagtgtcccttgtatctccttatctcgggagttttccggcagtggcaaagtagatgttcgtaagacaatatctcaaattaaagatgagaaactaggaacctccgaaaaaccagactggatcacagtcagtgccacaattttatacttgaagtttgataacttctgctacacagcttgtcctatcatgaacggtgatcgtccatgcagcaaaaaggtaacagacaatggagatgggacatggcggtgcgaaaagtgtgataaaagcgttgatgaatgtgactacaggtatatactgcagcttcagatacaggaccatacagatcttacttgcgtcacagcattccaggaggctggtgaagagataatgggcatatctgctaaagatttgtattatgtgaagaatgaacacaaggatgaggaaaaattcgaagatatcatccgtaaggttgcttttaccaagtacaacttcaagctgaaggtaaaagaagaaacattcagcgacgaacagcgtgtgaaagcaacagttgtgaaagtggacaagctaaactattcagcagataccaggactatgttaggtgctatggataaactcaggaccagagatgcaaattctcttcccattaacccagaaggatccgattacaatgctgatgtggttaatactggtataggaagctcaggaaccagagatccctcatcggtccaaagaagggatttcggtttacatgcgcatcaatcgggtcaatctgggaatcactatagtggtggtggtgctactactagctgcaatgtctgtggaaacagtggtcatgtttctgcaaagtgtccaggcgctactaagccgcaagagcaagggcagtacatgggtggctcttacagaggcacgacggggagttatggaggaggactaccgagacaacatgttggaagctactgagagtcataatcatcatcatctgatgatgctctcactctttttttttgtagacttttgttttggtagaattaactaatgccaaacttttctgaagtcttttaaggttatttaagcatattaggttctcttgtttggtttc

SEQ ID NO: 102028 - protein, 784 aa, Arabidopsis thaliana
  peptide (1)..(784): Ceres Seq. ID no. 13609290
MEVSLTAGAIGKIMNGEVTTEADMIPVLQVTDLKQIMAQQDPTRERFRMVLSDGTYLHQGMLGTDLNNLVKEGTLQPGSIVRLTRFVGDVIKGRRIVIVPQLEVLKQISDIIGHPVPGGKHNDQRGADSGIKFNTTEQQGSGIRQVNNIEPGRSNAAISPQVGGTGSSVPASTTPSTRAYSNPSSGNGVTRQDYARDPPTSYPHQPQPPPPMYANRGPVARNEAPPKIIPVNALSPYSGRWTIKARVTNKAALKQYSNPRGEGKVFNFDLLDADGGEIRVTCFNAVADQFYDQIVVGNLYLISRGSLRPAQKNFNHLRNDYEIMLDNASTIKQCYEEDAAIPRHQFHFRTIGDIESMENNCIVDVIGIVSSISPTVTITRKNGTATPKRSLQLKDMSGRSVEVTMWGDFCNAEGQRLQSLCDSGVFPVLAVKAGRISEFNGKTVSTIGSSQLFIDPDFVEAEKLKNWFEREGKSVPCISLSREFSGSGKVDVRKTISQIKDEKLGTSEKPDWITVSATILYLKFDNFCYTACPIMNGDRPCSKKVTDNGDGTWRCEKCDKSVDECDYRYILQLQIQDHTDLTCVTAFQEAGEEIMGISAKDLYYVKNEHKDEEKFEDIIRKVAFTKYNFKLKVKEETFSDEQRVKATVVKVDKLNYSADTRTMLGAMDKLRTRDANSLPINPEGSDYNADVVNTGIGSSGTRDPSSVQRRDFGLHAHQSGQSGNHYSGGGATTSCNVCGNSGHVSAKCPGATKPQEQGQYMGGSYRGTTGSYGGGLPRQHVGSY

SEQ ID NO: 102029 - protein, 771 aa, Arabidopsis thaliana
  peptide (1)..(771): Ceres Seq. ID no. 13609291
MNGEVTTEADMIPVLQVTDLKQIMAQQDPTRERFRMVLSDGTYLHQGMLGTDLNNLVKEGTLQPGSIVRLTRFVGDVIKGRRIVIVPQLEVLKQISDIIGHPVPGGKHNDQRGADSGIKFNTTEQQGSGIRQVNNIEPGRSNAAISPQVGGTGSSVPASTTPSTRAYSNPSSGNGVTRQDYARDPPTSYPHQPQPPPPMYANRGPVARNEAPPKIIPVNALSPYSGRWTIKARVTNKAALKQYSNPRGEGKVFNFDLLDADGGEIRVTCFNAVADQFYDQIVVGNLYLISRGSLRPAQKNFNHLRNDYEIMLDNASTIKQCYEEDAAIPRHQFHFRTIGDIESMENNCIVDVIGIVSSISPTVTITRKNGTATPKRSLQLKDMSGRSVEVTMWGDFCNAEGQRLQSLCDSGVFPVLAVKAGRISEFNGKTVSTIGSSQLFIDPDFVEAEKLKNWFEREGKSVPCISLSREFSGSGKVDVRKTISQIKDEKLGTSEKPDWITVSATILYLKFDNFCYTACPIMNGDRPCSKKVTDNGDGTWRCEKCDKSVDECDYRYILQLQIQDHTDLTCVTAFQEAGEEIMGISAKDLYYVKNEHKDEEKFEDIIRKVAFTKYNFKLKVKEETFSDEQRVKATVVKVDKLNYSADTRTMLGAMDKLRTRDANSLPINPEGSDYNADVVNTGIGSSGTRDPSSVQRRDFGLHAHQSGQSGNHYSGGGATTSCNVCGNSGHVSAKCPGATKPQEQGQYMGGSYRGTTGSYGGGLPRQHVGSY

SEQ ID NO: 102030 - protein, 761 aa, Arabidopsis thaliana
  peptide (1)..(761): Ceres Seq. ID no. 13609292
MIPVLQVTDLKQIMAQQDPTRERFRMVLSDGTYLHQGMLGTDLNNLVKEGTLQPGSIVRLTRFVGDVIKGRRIVIVPQLEVLKQISDIIGHPVPGGKHNDQRGADSGIKFNTTEQQGSGIRQVNNIEPGRSNAAISPQVGGTGSSVPASTTPSTRAYSNPSSGNGVTRQDYARDPPTSYPHQPQPPPPMYANRGPVARNEAPPKIIPVNALSPYSGRWTIKARVTNKAALKQYSNPRGEGKVFNFDLLDADGGEIRVTCFNAVADQFYDQIVVGNLYLISRGSLRPAQKNFNHLRNDYEIMLDNASTIKQCYEEDAAIPRHQFHFRTIGDIESMENNCIVDVIGIVSSISPTVTITRKNGTATPKRSLQLKDMSGRSVEVTMWGDFCNAEGQRLQSLCDSGVFPVLAVKAGRISEFNGKTVSTIGSSQLFIDPDFVEAEKLKNWFEREGKSVPCISLSREFSGSGKVDVRKTISQIKDEKLGTSEKPDWITVSATILYLKFDNFCYTACPIMNGDRPCSKKVTDNGDGTWRCEKCDKSVDECDYRYILQLQIQDHTDLTCVTAFQEAGEEIMGISAKDLYYVKNEHKDEEKFEDIIRKVAFTKYNFKLKVKEETFSDEQRVKATVVKVDKLNYSADTRTMLGAMDKLRTRDANSLPINPEGSDYNADVVNTGIGSSGTRDPSSVQRRDFGLHAHQSGQSGNHYSGGGATTSCNVCGNSGHVSAKCPGATKPQEQGQYMGGSYRGTTGSYGGGLPRQHVGSY

SEQ ID NO: 102031 - DNA, 1695 bp, Arabidopsis thaliana
  misc_feature (1)..(1695): Ceres Seq. ID no. 13609293
  misc_feature (1)..(1695): Ortholog of  Ceres SEQ ID NO 13596984 as cited in SEQ ID NO 63196
cccaaaagatgaaaaacgatactctacttttttatgaatcctttaattgaacaaacggaaccaacacaacaacagattgtgaagaagaaagaaaaaacaacaatggcttcacaaaccaaactcaagaaacctaattctcattttagcctttgtactttcctcttcttcaccgtcctctttaccataccggctctctttctcctccgcacctccacttgctcctcctccaccgctgcagtctcctcctcctcctctgacacaaaccagccaccgtggtctggcgacctccaaaccgcccaatttgcctggaaccgccttgatttctccttaaccaaccctcctcccaaaacactaaaactcgctgttttctcccggaaatggcccacgggtcccaatcctggcggcatggaacgccacgccttcactctatacaccgccttagctcgccgtggacaccgtgtccacgttttcacctctcccttagaccaatcccctgaaaccaacaaaatcccccctgtttccgaccaaatcatttaccctataatccattctcacggcgacgcggagcccggaaaatggcggtacaacaaggcatgggagctttaccaagaagaaaacaagaaagaacctttcgatgcggttcactctgaaagtgttgctttacctcactggatcgcccgggaggttccaaacctcgctgtatcctggcacggcattgcgttagagagcttacaatcaagtatttaccaagacctgatccgtaaaccagacgaaccaagatcacaaggcttcaatgcaagtctatacggtgccgtgcttcccaagatactggacgaaatcagattcttccacaactacgctcaccacatcgctatcagcgatagctgcggagaaatgctaagagacgtttaccaaatccctgagaaaagggttcatgtgatcctcaatggagtcgacgagaacggattcacatcagacaagaagctacgtactctgtttaggtcaaaattagggttaccagaaaactcatcagcgattgttttaggagctgctgggagattagtcaaagacaaaggacatccattgctcttcgaagctttcgcgaaaataatccaaacgtattcaaatgtttacctcgtagtagctggatcagggccatgggagcaacgttacaaggaattaggggaaaaagtttccattttgggatctctaaacccaaatgagctcaagggtttctacaacgggatcgatttgttcgtgaatccaacgcttagaccacaaggtcttgatttaacgttaatggaagcgatgttgagtggtaaaccagtgatggcatctaggtacgcaagcataaagaggactatagtggtgaatgatgagtttgggtttatgtttgcgccaaatgtggaagctttgacggcggttatggaggttgctgtggctgaaggagcggagagattggcggagagaggaaggaagtgtaaagagtatgctgcggagatgtttacggcgagtaaaatggctttggcttatgagaggctttttctttgtattaatgatcagaaattttgtatttacccttaattagtaagactcaacatctttatttttttcattattggaaaagtgagtcatatactcatagcaatgtaatcaaatacatatgcgacccttacatatctaaagttatctttt

SEQ ID NO: 102032 - protein, 516 aa, Arabidopsis thaliana
  peptide (1)..(516): Ceres Seq. ID no. 13609294
MNPLIEQTEPTQQQIVKKKEKTTMASQTKLKKPNSHFSLCTFLFFTVLFTIPALFLLRTSTCSSSTAAVSSSSSDTNQPPWSGDLQTAQFAWNRLDFSLTNPPPKTLKLAVFSRKWPTGPNPGGMERHAFTLYTALARRGHRVHVFTSPLDQSPETNKIPPVSDQIIYPIIHSHGDAEPGKWRYNKAWELYQEENKKEPFDAVHSESVALPHWIAREVPNLAVSWHGIALESLQSSIYQDLIRKPDEPRSQGFNASLYGAVLPKILDEIRFFHNYAHHIAISDSCGEMLRDVYQIPEKRVHVILNGVDENGFTSDKKLRTLFRSKLGLPENSSAIVLGAAGRLVKDKGHPLLFEAFAKIIQTYSNVYLVVAGSGPWEQRYKELGEKVSILGSLNPNELKGFYNGIDLFVNPTLRPQGLDLTLMEAMLSGKPVMASRYASIKRTIVVNDEFGFMFAPNVEALTAVMEVAVAEGAERLAERGRKCKEYAAEMFTASKMALAYERLFLCINDQKFCIYP

SEQ ID NO: 102033 - protein, 493 aa, Arabidopsis thaliana; identical to SEQ ID NO: 75724
  peptide (1)..(493): Ceres Seq. ID no. 13609295

SEQ ID NO: 102034 - protein, 392 aa, Arabidopsis thaliana; identical to SEQ ID NO: 75725
  peptide (1)..(392): Ceres Seq. ID no. 13609296

SEQ ID NO: 102035 - DNA, 1244 bp, Arabidopsis thaliana
  misc_feature (1)..(1244): Ceres Seq. ID no. 13609302
  misc_feature (1)..(1244): Ortholog of  Ceres SEQ ID NO 13597376 as cited in SEQ ID NO 64002
  misc_feature (1)..(1244): Ortholog of  Ceres SEQ ID NO 13503573 as cited in SEQ ID NO 65402
  misc_feature (1)..(1244): Ortholog of  Ceres SEQ ID NO 13659615 as cited in SEQ ID NO 67248
atgctaagtttctctagagctagaagtcaaggaagaaacacaagacctcttggaggagggatggaatacttagaacctaaaaggaagagcaatgtaatgggcaagattatcttggttgtttctcttactgctttatgcatttttatgctcaagcacgcaccgagtttcacatcaccaaccgcgttctctcgtagcgaggaaggtgtgactcatgtgttagtcactggtggtgctggatatatcggatcacatgctgcgttgaggctcttaaaagattcataccgtgtaaccattgtggacaatctttctcggggaaatcttggtgccgtcaaggttttacaaggattgttcccagaacccgggaggcttcaatttatttatgctgacttaggagatgccaaagctgttgataaaatcttctcagagaacgcgtttgatgctgttatgcattttgctgcagtagcatatgttggagagagcactctagatcctctaaagtattaccacaacattacatcaaacacattagtagttcttgaagctgtggctagacataaagtgaagaagttgatatattcaagcacatgtgccacttatggagaacctgacaagatgcctattgttgaagttactccacaggtccccattaacccttatggaaaagctaagaagatggctgaagatatgatcctggatttctctaaaaactctgacatggcagtcatgatcctaagatactttaacgtgataggttcagatccagaaggtagactaggagaagctccaaagcccgagctacgtgaacacggacggatttcgggtgcctgtttcgatgcagctcgtggcgtgattccaggccttcaggtcaaaggaacagactacaaaacaggagatggaacttgtgttcgtgactacatagatgttactgaccttgtagatgctcacgtaaaagctctcgagaaagctaagcctagaaatgtgggaatatacaatgtaggtacaggaaaaggaagatcggtgaaagagtttgtggaagcatgtaagaaagcgacaggagtagatatcaaagtagattttttgcctcgaagacctggagattacgcagaggtttacagtgatccagcaaagattctgagagatcttaattggtctgctcgttacactaatcttcaagaaagtcttgaggttgcttggaagtggcaaaagactcatccccatggatatgcttcttcttaaagacgacc

SEQ ID NO: 102036 - protein, 411 aa, Arabidopsis thaliana
  peptide (1)..(411): Ceres Seq. ID no. 13609303
MLSFSRARSQGRNTRPLGGGMEYLEPKRKSNVMGKIILVVSLTALCIFMLKHAPSFTSPTAFSRSEEGVTHVLVTGGAGYIGSHAALRLLKDSYRVTIVDNLSRGNLGAVKVLQGLFPEPGRLQFIYADLGDAKAVDKIFSENAFDAVMHFAAVAYVGESTLDPLKYYHNITSNTLVVLEAVARHKVKKLIYSSTCATYGEPDKMPIVEVTPQVPINPYGKAKKMAEDMILDFSKNSDMAVMILRYFNVIGSDPEGRLGEAPKPELREHGRISGACFDAARGVIPGLQVKGTDYKTGDGTCVRDYIDVTDLVDAHVKALEKAKPRNVGIYNVGTGKGRSVKEFVEACKKATGVDIKVDFLPRRPGDYAEVYSDPAKILRDLNWSARYTNLQESLEVAWKWQKTHPHGYASS

SEQ ID NO: 102037 - protein, 391 aa, Arabidopsis thaliana
  peptide (1)..(391): Ceres Seq. ID no. 13609304
MEYLEPKRKSNVMGKIILVVSLTALCIFMLKHAPSFTSPTAFSRSEEGVTHVLVTGGAGYIGSHAALRLLKDSYRVTIVDNLSRGNLGAVKVLQGLFPEPGRLQFIYADLGDAKAVDKIFSENAFDAVMHFAAVAYVGESTLDPLKYYHNITSNTLVVLEAVARHKVKKLIYSSTCATYGEPDKMPIVEVTPQVPINPYGKAKKMAEDMILDFSKNSDMAVMILRYFNVIGSDPEGRLGEAPKPELREHGRISGACFDAARGVIPGLQVKGTDYKTGDGTCVRDYIDVTDLVDAHVKALEKAKPRNVGIYNVGTGKGRSVKEFVEACKKATGVDIKVDFLPRRPGDYAEVYSDPAKILRDLNWSARYTNLQESLEVAWKWQKTHPHGYASS

SEQ ID NO: 102038 - protein, 379 aa, Arabidopsis thaliana; identical to SEQ ID NO: 72126
  peptide (1)..(379): Ceres Seq. ID no. 13609305

SEQ ID NO: 102039 - DNA, 1020 bp, Arabidopsis thaliana
  misc_feature (1)..(1020): Ceres Seq. ID no. 13609306
  misc_feature (1)..(1020): Ortholog of  Ceres SEQ ID NO 13593919 as cited in SEQ ID NO 54135
  misc_feature (1)..(1020): Ortholog of  Ceres SEQ ID NO 14303359 as cited in SEQ ID NO 54913
  misc_feature (1)..(1020): Ortholog of  Ceres SEQ ID NO 13596017 as cited in SEQ ID NO 62012
cttacgcgtcatgtaaaaaaaaaagaagcgtaaattacgaaaaacagagagataaatccgggcattgagattttggagatagagagagagaaaaatcgaaatctattgtctatctcctcaatttggattggattttctgcatatcatcgctctagctttcgcgggttttggattcgattccttacccttctccaatcgaagtttttggctttgaattggatttgggtttcgttccaaaatcagctctttttgttaatcagcagatatgcaggaccagctggtgtgtcatggttgtaggaatttattgatgtatcctagaggagcatctaatgtgcgttgtgcgttatgtaacactatcaacatggttcctcctcctcctccacctcacgacatggcacacattatatgtggtggttgtagaacaatgcttatgtatacgcgtggggctagtagcgtaagatgctcttgctgtcaaactacgaaccttgtgccagcgcactccaatcaggttgcccatgctccttccagtcaggttgcgcagatcaattgtgggcattgtcggacgaccctcatgtatccttacggtgcatcatccgtcaaatgcgctgtttgtcaattcgtaactaacgttaatatgagcaatggaagggtacctctcccaactaaccggccaaatggaacagcttgtcccccctctacatcaacttcaacaccaccctctcagacccaaaccgttgttgtagaaaaccccatgtccgttgatgaaagcggaaagttggtgagcaatgttgttgttggagtgacaactgacaaaaagtaatcaagaatgagtgagatcttaaagatcaaatccaaattcttcctctattcctgcgtttggtttgtgcatattacatacgcggaaaaactgtatgttatatatctcttgactcctttttaacccaagagaaaaagcttatcagaatctcttgttactgcattattggggtttattcaaagttgaagacacaaggtttttgc

SEQ ID NO: 102040 - protein, 184 aa, Arabidopsis thaliana; identical to SEQ ID NO: 24508
  peptide (1)..(184): Ceres Seq. ID no. 13609307

SEQ ID NO: 102041 - protein, 170 aa, Arabidopsis thaliana; identical to SEQ ID NO: 24509
  peptide (1)..(170): Ceres Seq. ID no. 13609308

SEQ ID NO: 102042 - protein, 152 aa, Arabidopsis thaliana; identical to SEQ ID NO: 24510
  peptide (1)..(152): Ceres Seq. ID no. 13609309

SEQ ID NO: 102043 - DNA, 1128 bp, Arabidopsis thaliana
  misc_feature (1)..(1128): Ceres Seq. ID no. 13609321
  misc_feature (1)..(1128): Ortholog of  Ceres SEQ ID NO 14306066 as cited in SEQ ID NO 57378
cagcgttcgccgagagatatacatactcggatcagtcgtcaaaagctttggaatttgatacttttgatttttcgagaatcttgaaaatcagtcatgggttctggaaaagagcgtgacactttcgtctacctcgctaagctctctgagcaagctgagcgttatgaagaaatggtggaatcaatgaaaagtgttgcgaaattgaatgttgatctgacggtggaagagaggaacttactctctgtgggttacaagaacgtgattggttcaaggagagcttcgtggaggatcttctcgtcgattgaacaaaaggaagcagtgaaagggaatgatgttaatgtaaagaggatcaaagagtatatggagaaggttgagttagagctttctaacatatgcattgatattatgtctgtcttagatgagcatctcattccttcggcttccgagggtgaatctactgtcttcttcaacaagatgaaaggtgactattaccgctatcttgctgagttcaaatcagggaacgagaggaaagaggctgctgatcagtctttgaaagcctatgagattgctactactgctgctgaggctaagctccctccaacacaccctatcagattgggtttggctttgaatttctctgtcttctactacgagatcatgaacgcacctgaaagggcatgtcaccttgctaagcaggcgttcgatgaagctatctcagagcttgacactctgaacgaggaatcctacaaagatagcaccttaataatgcaactccttagggacaatctgaccttgtggacttctgacatctcagaagaaggaggagacgatgctcataagacgaatggttctgccaaacctggtgctggtggagacgatgcagagtgatatgatatgtgtgcacctggacaatatgtttcaagaactgaatgtgcggtgaataatagtgaaaagtagagtttctctgttccctatatcatgattgtctatgttacttgtactctggtttagccctaaatgtctctctggtttgaatgtattgcatgcctgtctcaggacactcttatttgtaattcactactgtcgtcttactatctatccttatggatccaatcttgaaacttatattcc

SEQ ID NO: 102044 - protein, 263 aa, Arabidopsis thaliana; identical to SEQ ID NO: 30992
  peptide (1)..(263): Ceres Seq. ID no. 13609322

SEQ ID NO: 102045 - protein, 238 aa, Arabidopsis thaliana; identical to SEQ ID NO: 30993
  peptide (1)..(238): Ceres Seq. ID no. 13609323

SEQ ID NO: 102046 - protein, 234 aa, Arabidopsis thaliana; identical to SEQ ID NO: 30994
  peptide (1)..(234): Ceres Seq. ID no. 13609324

SEQ ID NO: 102047 - DNA, 851 bp, Arabidopsis thaliana
  misc_feature (1)..(851): Ceres Seq. ID no. 13609325
  misc_feature (1)..(851): Ortholog of  Ceres SEQ ID NO 13581804 as cited in SEQ ID NO 51424
  misc_feature (1)..(851): Ortholog of  Ceres SEQ ID NO 14310890 as cited in SEQ ID NO 54290
  misc_feature (1)..(851): Ortholog of  Ceres SEQ ID NO 13663874 as cited in SEQ ID NO 67003
atctttaggccaatgaacaaattaactctctcataattcatcttcccatcctcacttctctttctttctgatcataattaatcttgctaagccagctagggcttatagaaatggagggtggtgcgagtaatgaagtagcagagagcagcaagaagatagggagagggaagatagagataaagaggatagagaacactacgaatcgtcaagtcactttctgcaaacgacgcaatggtttactcaagaaagcttatgagctctctgtcttgtgtgacgctgaggttgctcttgtcatcttctccactcgaggccgtctctacgagtacgccaacaacagtgtgagaggaacaatagaaaggtacaagaaagcttgctccgacgccgttaaccctccgaccatcaccgaagctaatactcagtactatcagcaagaggcgtctaaactccggagacagattcgggacattcagaatttgaacagacacattcttggtgaatctcttggttccttgaactttaaggaactcaagaaccttgaaagtaggcttgagaaaggaatcagtcgtgtccgatccaagaagcacgagatgttagttgcagagattgaatacatgcaaaaaagggaaatcgagctgcaaaacgataacatgtatctccgctccaagattactgaaagaacaggtctacagcaacaagaatcgagtgtgatacatcaagggacagtttacgagtcgggtgttacttcttctcaccagtcggggcagtataaccggaattatattgcggttaaccttcttgaaccgaatcagaattcctccaaccaagaccaaccacctctgcaacttgtttga

SEQ ID NO: 102048 - protein, 246 aa, Arabidopsis thaliana
  peptide (1)..(246): Ceres Seq. ID no. 13609326
MEGGASNEVAESSKKIGRGKIEIKRIENTTNRQVTFCKRRNGLLKKAYELSVLCDAEVALVIFSTRGRLYEYANNSVRGTIERYKKACSDAVNPPTITEANTQYYQQEASKLRRQIRDIQNLNRHILGESLGSLNFKELKNLESRLEKGISRVRSKKHEMLVAEIEYMQKREIELQNDNMYLRSKITERTGLQQQESSVIHQGTVYESGVTSSHQSGQYNRNYIAVNLLEPNQNSSNQDQPPLQLV

SEQ ID NO: 102049 - DNA, 2097 bp, Arabidopsis thaliana
  misc_feature (1)..(2097): Ceres Seq. ID no. 13609327
  misc_feature (1)..(2097): Ortholog of  Ceres SEQ ID NO 14310375 as cited in SEQ ID NO 59612
caaagcctaaaaaatccgacctttttttgttttctctctctagaagtctctctgttttcatctttctctctctctctctagctcttcttcctcgtttctggcttttctgggaattttgatcctttggcccccattgctcgcttgaattacgaatcagatatcgccgatcgtcgtagatctgcgttgatactgtccggctgagtaaacagggtgaacaaaaaccaaaaacagagagggggtttaaaaatcctgaagaaaatcgcatgaatttgtttggaagcctgattttttcatcttcgatttcgagccacttcacgacttgtcttctcatctttattcttcatttctctccccagcttaatagtaataataataataataatagtaatcgtaattccaataatctcgagagtaatcgtttgatcaattgaaaaaaaaatcatggagtccaggaaaaactctgatcgtcaaatgcgtagagctaattgcttttcagctggtgagaggatgaagacaaggtcgccctccgtgattgtgatcggaggtggtttcggtgggatttcagctgctcgcactcttcaggatgcttcctttcaggttatggtactggagtcccgtgacagaattggtggacgagttcacactgattactcatttggttttcctgttgatcttggtgcatcatggctgcatggagtatgcaaggagaatcctctcgcaccagttattggaagacttggactgcccttgtatcgtactagcggtgacaattccgtcctgtatgatcatgatctcgagagctatgctctgtttgatatggatggcaaccaagttcctcaagaattggtaactcagattggcgtaacgtttgagcgtattttggaagagatcaataaagtcagggatgagcaggatgctgacatttcaatttctcaggctttctcaattgtcttttctaggaaacccgagctgaggttagaggggcttgcacacaacgtacttcaatggtatgtatgccgcatggaaggatggtttgccgcagatgctgaaaccatctctgcaaagtgttgggaccaggaggaattgttgcctggtggacacggtcttatggttagagggtatcgtcctgtcatcaatactctggcgaaaggtcttgatatccgagtaggccacagggttactaagattgtcaggcggtacaatggagtgaaggtaacgacagaaaacgggcaaacttttgttgcggatgctgcagtcattgctgtccctcttggagttttaaaatcgggaaccataaagttcgaacctaagctacctgagtggaaacaagaagcaatcaacgacctaggagtaggtattgagaacaagatcatactacattttgagaaagtcttttggccgaaagtagagtttctaggagtggtagctgaaacctcctacggttgcagttattttttgaacctgcacaaggccacgggtcatccggttctggtttacatgccggctggtcagcttgccaaagacattgagaaaatgtctgatgaagcagctgcaaatttcgccgtcttgcaactccagagaattcttcccgatgcattgcctccggtacagtatctcgtgtcgaggtggggatctgatgtgaattcaatgggatcttatagctatgatatcgtgggcaaacctcatgatctctacgagaggcttagggttccagtggataacttattctttgccggtgaagcgacgagctcgagcttcccgggctcggttcacggcgcttattcaactggattgatggcagctgaagattgtaggatgcgagttctggagcggtatggtgagttggatctgttccagcctgtgatgggcgaggaaggacctgcctctgtacctcttcttatatctcgtctctaaactccatcagttatcgtttactagaaggaacctcaagtgatgattgtcttaatatgaaactaaaattattctcgtgtcggatcgtttaaaacattcccagtcttattttctcagtgtttttaattcaataaattggaacattatatccttgtgatattatttatatatgataatcatctttaa

SEQ ID NO: 102050 - protein, 490 aa, Arabidopsis thaliana; identical to SEQ ID NO: 37591
  peptide (1)..(490): Ceres Seq. ID no. 13609328

SEQ ID NO: 102051 - protein, 480 aa, Arabidopsis thaliana; identical to SEQ ID NO: 37592
  peptide (1)..(480): Ceres Seq. ID no. 13609329

SEQ ID NO: 102052 - protein, 468 aa, Arabidopsis thaliana; identical to SEQ ID NO: 37593
  peptide (1)..(468): Ceres Seq. ID no. 13609330

SEQ ID NO: 102053 - DNA, 1163 bp, Arabidopsis thaliana
  misc_feature (1)..(1163): Ceres Seq. ID no. 13609349
  misc_feature (1)..(1163): Ortholog of  Ceres SEQ ID NO 13594548 as cited in SEQ ID NO 51267
  misc_feature (1)..(1163): Ortholog of  Ceres SEQ ID NO 12614847 as cited in SEQ ID NO 61970
ttttgtcctcttaacaaaatattcttcaaactctctctgttgtttgtttgttgacaaatctctcaaaaccatttgttttgcaatcgcagatccgtttttcttcgggtctcatcacaatgaatggcttctctgatcttaatccttctgagagcaaaccttctctgtcacaactagctccattagaagccattctgtttgatgttgatggaacactctgtgactcagatcccatccaccttattgccttccaagaactgcttcaagagattggttttaacaatggtgtcccaatcgatgagaaattctttgttgagaacattgctggaaaacacaattctgaaattgctctacttctgttccctgatgatgtttcaagagggttaaaattctgtgatgaaaaggaagctctttaccgcaaaattgttgcagagaagataaagccacttgatgggcttataaaactgaccaaatggatcgaagatcgtggattgaaacgagctgcggtaacaaacgctccaaaagaaaacgcagagctcatgatatcgaaacttggtctgactgatttctttcaagcagtgattcttggctctgaatgtgaatttcccaaaccacaccctggaccttacttgaaggctcttgaagtgcttaacgtgtcaaaggagcacacgctagttttcgaagactcgatctctgggataaaagctggagttgcagctggaatgccagtgattggactgactacagggaatccagcaagcctgcttatgcaagcaaaacccgcttttctcatcgagaactatgcggatccaaaactgtgggctgtgttggaagaacttgataacaagtcttaagtctcacttgtttggcttatggaaacccacacatgcatgagcagcctctgaagtttaccttatgtcttagatgatcattgttgaataattcattgggagtttatgacaatgggagctttcaaatatctgattattttgtattgatacatgcacaatgctagatttgtatccaggagatagttgcataaaccaatatactataccctcggatcttagcttattttcattgatatcttgttgttttgtgctgtaaacatatcagcttttgaatacatttggtccatggcgcaaaataagacttttttttttttt

SEQ ID NO: 102054 - protein, 244 aa, Arabidopsis thaliana; identical to SEQ ID NO: 25320
  peptide (1)..(244): Ceres Seq. ID no. 13609350

SEQ ID NO: 102055 - DNA, 1383 bp, Arabidopsis thaliana
  misc_feature (1)..(1383): Ceres Seq. ID no. 13609351
  misc_feature (1)..(1383): Ortholog of  Ceres SEQ ID NO 12636863 as cited in SEQ ID NO 0
attcaatgcacacaaacatttacccaaaatggcatcggcggttcagaaatcagcgttgctcttatgtggagactacatggaagcctatgaaacgattgttcctctctatgttctccaatcgtttggggttagcgttcattgcgtttcacccaaccgcaacgccggcgatcgctgcgttatgtctgcccacgatttcttgggcctcgagttgactttaaacgcaaacttcgatgacgtcactccggagaattacgacgtcatcatcatcccaggaggccgattcacggagcttctcagcgccgacgagaaatgcgttgacctcgtggcgcgattcgccgaatccaagaagctgatcttcactagctgtcatagccaggttatgctgatggcggccggaatcctcgccggtggtgtgaaatgcacggcgtttgaaagcataaagcctttgatcgaactctccggcggtgagtggtggcaacagcctgggattcagagcatgttcgagatcaccgattgcgttaaagacgggaatttcatgagtacggttggttggccaacgcttggtcacggcattaagcttttgcttgaatctcttggtggcaaagtctgtagcttggagaagaagcaagcttctgtgcttttcctcattggggactatgtagaagattatgggatcaatgtaccgtttagagcactacaagctttaggttgtaaagtggatgctgtgacaccgaacaagaagaagggagaagtgtgtgcaacggcggtttatgaccttgaggatggacggcagattcctgcagagaagcgtggacataacttctttgtgactgcatcgtgggatgatatatgtgtggatgattatgactgtgtagtggttccaggagggagatcacctgagctattggtgatgaatgaaaaggctgttgctttggttaagagttttgcagagaaagataaggtgtttgcagctattggacaggggaaattgcttcttgcagccactggtgttcttaaggggaagcgatgcgcgagtgggaaagggatgaaggtgatggtgaaggtggctggaggtgaggctgtgatggaaaagggatgtgtaactgatgggaaggttgtgacggcagcatcagccacggatctgcctgcctttttgtttgatttatcaactgctcttggtctaactgtcatgttctaagattttgcaactaaaaaacataaaagatagtttgagtaataaaatcatatcttcaatttgctcaattgaagtgaaaagaaaaacaaaagagctcgattgtagtgtctctgctttcatgagttcatggcactcctaacaaactatattgtagctgcttcttggaaataaaagcatgtagtttggtg

SEQ ID NO: 102056 - protein, 398 aa, Arabidopsis thaliana; identical to SEQ ID NO: 40376
  peptide (1)..(398): Ceres Seq. ID no. 13609352

SEQ ID NO: 102057 - protein, 389 aa, Arabidopsis thaliana; identical to SEQ ID NO: 40377
  peptide (1)..(389): Ceres Seq. ID no. 13609353

SEQ ID NO: 102058 - protein, 373 aa, Arabidopsis thaliana; identical to SEQ ID NO: 40378
  peptide (1)..(373): Ceres Seq. ID no. 13609354

SEQ ID NO: 102059 - DNA, 1217 bp, Arabidopsis thaliana
  misc_feature (1)..(1217): Ceres Seq. ID no. 13609355
  misc_feature (1)..(1217): Ortholog of  Ceres SEQ ID NO 12484482 as cited in SEQ ID NO 53324
aaaacggctctaaattgaaaacaaaagaagagagagagagagagagacgaagaaacagagagattctctcgaaaatggccaccattagagtaccaaacgaagttccttctccagctcaggattctgaaactctcaaacaagctattcgcggatggggaacagatgagaaggcgattatacgagttttagggcaaagagaccagagccagagaaggaagattagagaaagttttagagagatttatggcaaagatcttatcgatgttctatcctccgaactgtctggtgatttcatgaaagctgtggtttcgtggacgtatgatccagcagagagagacgcaaggcttgtgaacaagattttgaacaaggagaagaagaagaaaagcttagagaatttgaaggttatagtagagatctcttgcacgacttccccaaaccatttgattgctgtgaggaaagcttattgttcactctttgactcttctcttgaagaacacattgcttcttctctgccttttcctcttgcaaagttactggtgacattggcaagtacattcagatatgacaaagataggactgatgcagaagtagctactattgaggcggctatgctacgtgaagccatagagaagaaacaattagatcatgaccatgtcctgtacatattaggaacgcgtagtatctatcagctcagagaaacttttgttgcttacaagaagaattatggggtcacaattgataaggatgttgatggatgtccaggagatgctgatctgagaagtctattgaaggtggcaatcttttgtattgatactcctgagaaacactttgcaaaggtggtaagagattcgattgagggttttggaacagatgaggattcgttgacgagggcgattgtgacgcgtgcagagatcgatttgatgaaagtaagaggagagtatttcaacatgtataatacaagcatggacaatgctattactggtgatatttctggagactacaaggacttcattatcaccttacttggatccaaaatctgatcgttctttcgtttctttgtcagttgttatattcttggctttgcttgtgacttgtataatcaatcaatacattgtattccaactccagtttgaattgtttaaaaaataatcaaatttctcttgattcttgcatttttgaatcaaagcaaatctatgtttaattttgttttcaaaatt

SEQ ID NO: 102060 - protein, 345 aa, Arabidopsis thaliana
  peptide (1)..(345): Ceres Seq. ID no. 13609356
NGSKLKTKEERERERRRNREILSKMATIRVPNEVPSPAQDSETLKQAIRGWGTDEKAIIRVLGQRDQSQRRKIRESFREIYGKDLIDVLSSELSGDFMKAVVSWTYDPAERDARLVNKILNKEKKKKSLENLKVIVEISCTTSPNHLIAVRKAYCSLFDSSLEEHIASSLPFPLAKLLVTLASTFRYDKDRTDAEVATIEAAMLREAIEKKQLDHDHVLYILGTRSIYQLRETFVAYKKNYGVTIDKDVDGCPGDADLRSLLKVAIFCIDTPEKHFAKVVRDSIEGFGTDEDSLTRAIVTRAEIDLMKVRGEYFNMYNTSMDNAITGDISGDYKDFIITLLGSKI

SEQ ID NO: 102061 - protein, 321 aa, Arabidopsis thaliana; identical to SEQ ID NO: 26654
  peptide (1)..(321): Ceres Seq. ID no. 13609357

SEQ ID NO: 102062 - protein, 248 aa, Arabidopsis thaliana; identical to SEQ ID NO: 26655
  peptide (1)..(248): Ceres Seq. ID no. 13609358

SEQ ID NO: 102063 - DNA, 1885 bp, Arabidopsis thaliana
  misc_feature (1)..(1885): Ceres Seq. ID no. 13609359
  misc_feature (1)..(1885): Ortholog of  Ceres SEQ ID NO 13596509 as cited in SEQ ID NO 62004
  misc_feature (1)..(1885): Ortholog of  Ceres SEQ ID NO 13659971 as cited in SEQ ID NO 67565
  misc_feature (1)..(1885): Ortholog of  Ceres SEQ ID NO 13500385 as cited in SEQ ID NO 67583
agaagaggaaacaaagagaagtagcgtcctctcttcaatttcaaccggcactttcttctcttcttcttcttcttcccaatcttcctcgtctctttacctacacctatatatatatatatatatatatctccttccctcacacacatacctgcacagctacaataatctacttcccctctttcaataacggaattaatagtaatctaatcggaagattcaagcgagaaatcgatttggttgtctgttaatttgttgggaaataaattgaaataggagattgattggatggtgagaaggcaagaggaggagaagaaggcggagaagggaatgcgtctggggaaatacgagctagggaggacgctcggcgagggtaatttcggtaaagttaaattcgctaaagataccgtctccggtcattccttcgccgttaaaatcatcgacaagtctcgtatcgccgatctcaacttctccttacagataaaaagagagatccggactctgaaaatgttgaaacatccccacattgttagattacatgaggtcttggctagcaaaacgaaaattaatatggtaatggaacttgttaccggaggagaattgttcgacagaattgtttccaacggaaaattaacagaaactgatggaagaaaaatgtttcagcagcttatcgatggaatcagctactgtcatagcaaaggtgttttccacagggatctcaagctagagaatgttcttcttgatgcaaagggacatataaagatcactgattttggcctcagtgctctgcctcagcattttagggatgacggattgttgcatacaacctgtggaagtcctaattacgttgcgcctgaggttttagctaacagaggctacgatggtgcagcatcagacatatggtcctgtggtgtaatcttgtatgtgattctaaccggatgtcttcctttcgacgacagaaaccttgcagttctttaccagaagatatgtaaaggagacccaccaataccaagatggttatccccgggtgcaagaaccatgattaagagaatgcttgatccaaatccagtcacgaggatcacagttgtgggtattaaagccagcgagtggttcaaacttgagtacattccttcaattcccgatgatgatgacgaagaagaagttgacacagacgatgatgctttctcaatccaagaactcggatcagaagaagggaagggcagtgattcaccgaccatcatcaatgcgtttcagttaatcggaatgtcttcctttcttgacctgtccggtttctttgaacaagagaatgtatcagagaggagaataagattcacttcaaatagctcagcaaaagatttactggagaaaatcgaaacagccgttacagaaatgggattcagtgtacaaaagaaacatgccaagttaagagtaaaacaagaagaaagaaaccagaaaggtcaagttggtttatcagtaacagctgaggttttcgagataaagccgtcactgaacgtggttgagctaagaaaatcttatggcgattcatgtttatatagacagttgtacgagagactattaaaagacgtgggcacatcctcgccggagcaagagatagtaacttaggtgttggtgttttcggctgaagagatatacatagctctaataatttatcatatggaacacaccatccatgttcatataatttattatcttaagtatatataaaaggagctcgatttatatgattagtgcaaatagtaattgcatttaagtataaaccgtggcgtagatctttcctcaagaattagagattttattcactacctttgtatttgtttttattattatttggtgtggcaaatctgcctactagcaaaaaagatcccat

SEQ ID NO: 102064 - protein, 444 aa, Arabidopsis thaliana
  peptide (1)..(444): Ceres Seq. ID no. 13609360
MVRRQEEEKKAEKGMRLGKYELGRTLGEGNFGKVKFAKDTVSGHSFAVKIIDKSRIADLNFSLQIKREIRTLKMLKHPHIVRLHEVLASKTKINMVMELVTGGELFDRIVSNGKLTETDGRKMFQQLIDGISYCHSKGVFHRDLKLENVLLDAKGHIKITDFGLSALPQHFRDDGLLHTTCGSPNYVAPEVLANRGYDGAASDIWSCGVILYVILTGCLPFDDRNLAVLYQKICKGDPPIPRWLSPGARTMIKRMLDPNPVTRITVVGIKASEWFKLEYIPSIPDDDDEEEVDTDDDAFSIQELGSEEGKGSDSPTIINAFQLIGMSSFLDLSGFFEQENVSERRIRFTSNSSAKDLLEKIETAVTEMGFSVQKKHAKLRVKQEERNQKGQVGLSVTAEVFEIKPSLNVVELRKSYGDSCLYRQLYERLLKDVGTSSPEQEIVT

SEQ ID NO: 102065 - protein, 430 aa, Arabidopsis thaliana
  peptide (1)..(430): Ceres Seq. ID no. 13609361
MRLGKYELGRTLGEGNFGKVKFAKDTVSGHSFAVKIIDKSRIADLNFSLQIKREIRTLKMLKHPHIVRLHEVLASKTKINMVMELVTGGELFDRIVSNGKLTETDGRKMFQQLIDGISYCHSKGVFHRDLKLENVLLDAKGHIKITDFGLSALPQHFRDDGLLHTTCGSPNYVAPEVLANRGYDGAASDIWSCGVILYVILTGCLPFDDRNLAVLYQKICKGDPPIPRWLSPGARTMIKRMLDPNPVTRITVVGIKASEWFKLEYIPSIPDDDDEEEVDTDDDAFSIQELGSEEGKGSDSPTIINAFQLIGMSSFLDLSGFFEQENVSERRIRFTSNSSAKDLLEKIETAVTEMGFSVQKKHAKLRVKQEERNQKGQVGLSVTAEVFEIKPSLNVVELRKSYGDSCLYRQLYERLLKDVGTSSPEQEIVT

SEQ ID NO: 102066 - protein, 371 aa, Arabidopsis thaliana
  peptide (1)..(371): Ceres Seq. ID no. 13609362
MLKHPHIVRLHEVLASKTKINMVMELVTGGELFDRIVSNGKLTETDGRKMFQQLIDGISYCHSKGVFHRDLKLENVLLDAKGHIKITDFGLSALPQHFRDDGLLHTTCGSPNYVAPEVLANRGYDGAASDIWSCGVILYVILTGCLPFDDRNLAVLYQKICKGDPPIPRWLSPGARTMIKRMLDPNPVTRITVVGIKASEWFKLEYIPSIPDDDDEEEVDTDDDAFSIQELGSEEGKGSDSPTIINAFQLIGMSSFLDLSGFFEQENVSERRIRFTSNSSAKDLLEKIETAVTEMGFSVQKKHAKLRVKQEERNQKGQVGLSVTAEVFEIKPSLNVVELRKSYGDSCLYRQLYERLLKDVGTSSPEQEIVT

SEQ ID NO: 102067 - DNA, 1282 bp, Arabidopsis thaliana
  misc_feature (1)..(1282): Ceres Seq. ID no. 13609363
  misc_feature (1)..(1282): Ortholog of  Ceres SEQ ID NO 14309116 as cited in SEQ ID NO 0
atggcggtgaacgcgtgtctatctccgccggagatgatggctgtccggccaggggaaggcgttccgaattcaaaatctacgcagggaaaaactaggctctatctcaccaaaccttcatggatagtcagaactcagtctggagctaagacgtgtatgaagtcgaaggcgaaaggacgatgcgtaatctgccatggaagtggaagagtcgattgtttcaattgttgtgggaaagggaggactaattgtgtggatgtggaaatgcttccaagaggagaatggcctaaatggtgcaagagttgtggagggagtggattaagtgactgttctcgctgtcttggcaccggagagcgcgcatctttcttcttcttgtggttcgatattcttatcgttatgtcttccgtcgctttgccggcgatgagctgccggagctcaggtgaacaagtgaaggagattcgcgtttgtacgaatcgcacctgccgaagacaaggctccttccagattctcgagactttaacagctctcgcacctcccgaactccgagtcactcactgcgcttgcctcggccgatgcggctccggtccaaacctcgtggctctccctcaaggtctcatcctacgtcactgcgccacgccttctcgagctgctgaaattttgttcagcctatgtggtgacggtcgtgaagcttcttcatcctccgccgtcacagacgctctcacggctttagcgttaaccaacaatgctctctctcaaatcgatgcgggaaatttctctgaagccgaagcacttctcactcaggctttagagctgaaaccctacggtggcttgcatagaatattcaaacacagatcagtagcaaaattgggaatgcttgattactctggggctcttgaagatataagccaagctctagctttagctcctaactattctgagccctacatatgccaaggggatgtctacgtagcaaaaggtcaatatgatcttgcagagaagtcatacttgacatgtctagagatagatccttctcttcgcagatcgaaaccattcaaggcccggattgcgaaacttcaacagaaagttgttgaactagatgtaacatagaagtattctgactctgggagttgatacaaaacagccgttgcaataaatgtctctttctttgggtgttccagagtggaaaggtatgtgtataggttattagtatagcaagaggtattgacattgcgttgtgtatatattactcagatgatattatcaatgttaatgacattattttggtact

SEQ ID NO: 102068 - protein, 366 aa, Arabidopsis thaliana
  peptide (1)..(366): Ceres Seq. ID no. 13609364
MAVNACLSPPEMMAVRPGEGVPNSKSTQGKTRLYLTKPSWIVRTQSGAKTCMKSKAKGRCVICHGSGRVDCFNCCGKGRTNCVDVEMLPRGEWPKWCKSCGGSGLSDCSRCLGTGERASFFFLWFDILIVMSSVALPAMSCRSSGEQVKEIRVCTNRTCRRQGSFQILETLTALAPPELRVTHCACLGRCGSGPNLVALPQGLILRHCATPSRAAEILFSLCGDGREASSSSAVTDALTALALTNNALSQIDAGNFSEAEALLTQALELKPYGGLHRIFKHRSVAKLGMLDYSGALEDISQALALAPNYSEPYICQGDVYVAKGQYDLAEKSYLTCLEIDPSLRRSKPFKARIAKLQQKVVELDVT

SEQ ID NO: 102069 - protein, 355 aa, Arabidopsis thaliana
  peptide (1)..(355): Ceres Seq. ID no. 13609365
MMAVRPGEGVPNSKSTQGKTRLYLTKPSWIVRTQSGAKTCMKSKAKGRCVICHGSGRVDCFNCCGKGRTNCVDVEMLPRGEWPKWCKSCGGSGLSDCSRCLGTGERASFFFLWFDILIVMSSVALPAMSCRSSGEQVKEIRVCTNRTCRRQGSFQILETLTALAPPELRVTHCACLGRCGSGPNLVALPQGLILRHCATPSRAAEILFSLCGDGREASSSSAVTDALTALALTNNALSQIDAGNFSEAEALLTQALELKPYGGLHRIFKHRSVAKLGMLDYSGALEDISQALALAPNYSEPYICQGDVYVAKGQYDLAEKSYLTCLEIDPSLRRSKPFKARIAKLQQKVVELDVT

SEQ ID NO: 102070 - protein, 354 aa, Arabidopsis thaliana
  peptide (1)..(354): Ceres Seq. ID no. 13609366
MAVRPGEGVPNSKSTQGKTRLYLTKPSWIVRTQSGAKTCMKSKAKGRCVICHGSGRVDCFNCCGKGRTNCVDVEMLPRGEWPKWCKSCGGSGLSDCSRCLGTGERASFFFLWFDILIVMSSVALPAMSCRSSGEQVKEIRVCTNRTCRRQGSFQILETLTALAPPELRVTHCACLGRCGSGPNLVALPQGLILRHCATPSRAAEILFSLCGDGREASSSSAVTDALTALALTNNALSQIDAGNFSEAEALLTQALELKPYGGLHRIFKHRSVAKLGMLDYSGALEDISQALALAPNYSEPYICQGDVYVAKGQYDLAEKSYLTCLEIDPSLRRSKPFKARIAKLQQKVVELDVT

SEQ ID NO: 102071 - DNA, 1852 bp, Arabidopsis thaliana
  misc_feature (1)..(1852): Ceres Seq. ID no. 13609367
  misc_feature (1)..(1852): Ortholog of  Ceres SEQ ID NO 15176579 as cited in SEQ ID NO 54513
atggcgtctcaagctgcgaatctctgggttcttctaggtttaggtctcgctgggattcttatgcttaccaaaaagctgaagaagaccgtccgtgaagatttcggcgcttttatcgataaactcatgcttcttccccctccgcaacctgctcctcccaaagctcctcatcctctcaccggtctaacctttgccgtttccgacgtattcgatattacagggtatgtgactggatttggtcatccagactgggtcaggacccatgaagctgcttcgtcaacatctcctgtggtttcaactctcgttgaaggtggagccacttgtgttggaaaaactgtagttgatgagtttgcgtttagtattagtggagaaaacaagcattacgattcacctacaaatcctgcagctcctactcgtattcctggtggcgcttgcagtggagctgctgtagccgtagcaacaaatgctgtggattttgctctaggcatcgacacagttggcggggtaagagtgcctgctggatactgtggcgttcttggattcaaatcttcttatggggctatttcaaacaccggaatcataccagtatcttcaagtcttgactctgttggatggtttgcccgcgatccaaacaccctacgtcgtgttggccatgtactcttgcaacttccatttgccactcaacggaatccaaggcaaatcatactagctgatgactgttttcagctgttaaagatccctgtggatcggattacccaggtggtgaccaaatcagctgaaaagctttttggaagacaattgctaaagcatcagaacttggagacctattttgaaactaaagttcctagcttgaaagagttcgctaggacaaaagccattgctaacacgaaggtctcaacatcgagactactggcgaatgtgatgcagctccttcaaaggcacgagttccttcaaaatcatggggattggatcaacacagtgaagccagccattgatcctgtgattttatcacaagtgtgtgagaacccagaactaaccaatgaagagactgagaacctgaatgctatcagaaacgagactcgagtggctattggttcacttctcaaggatgatggcattctggtaattccaacattgccagctgttcctccaaaacttggtagcaaggagataacatctgaagactatcaaaaccgagcttcaagtctgcttagcattgctagcatatcaggatgttgtcaggtgactgtgccactcggacatcatgagaaatgccctatttcagtttctttcataggaagacacggtggtgaccgctttttactagatacagtgcagacaatgtatccatctttgcaagagtactcgagtattgttaccgatcccaaatcttctaaaaaggctatcaccaaagaagagtcagccgagattgccaaagagaagggtaaccaagcgttcaaagagaaactatggcagaaagctattggtctatactcagaagctataaagctaagtgacaacaatgctacctattacagtaacagagctgctgcatatcttgaacttggaggctttcttcaagccgaagaagactgtaccaaagccatcaccctcgacaagaagaatgttaaagcctatttacgaagaggaaccgcaagagaaatgttaggcgattgcaagggagccatagaagatttcagatacgcacttgtgctggaaccaaacaacaaacgagcgtctctctcagcagagagactgagaaaattccagtgagcttcttttgtccgtacctcaccgatcattgagaaaacgtttgttccttagaatttgtccaagagtataggccaattttgtc

SEQ ID NO: 102072 - protein, 589 aa, Arabidopsis thaliana
  peptide (1)..(589): Ceres Seq. ID no. 13609368
MASQAANLWVLLGLGLAGILMLTKKLKKTVREDFGAFIDKLMLLPPPQPAPPKAPHPLTGLTFAVSDVFDITGYVTGFGHPDWVRTHEAASSTSPVVSTLVEGGATCVGKTVVDEFAFSISGENKHYDSPTNPAAPTRIPGGACSGAAVAVATNAVDFALGIDTVGGVRVPAGYCGVLGFKSSYGAISNTGIIPVSSSLDSVGWFARDPNTLRRVGHVLLQLPFATQRNPRQIILADDCFQLLKIPVDRITQVVTKSAEKLFGRQLLKHQNLETYFETKVPSLKEFARTKAIANTKVSTSRLLANVMQLLQRHEFLQNHGDWINTVKPAIDPVILSQVCENPELTNEETENLNAIRNETRVAIGSLLKDDGILVIPTLPAVPPKLGSKEITSEDYQNRASSLLSIASISGCCQVTVPLGHHEKCPISVSFIGRHGGDRFLLDTVQTMYPSLQEYSSIVTDPKSSKKAITKEESAEIAKEKGNQAFKEKLWQKAIGLYSEAIKLSDNNATYYSNRAAAYLELGGFLQAEEDCTKAITLDKKNVKAYLRRGTAREMLGDCKGAIEDFRYALVLEPNNKRASLSAERLRKFQ

SEQ ID NO: 102073 - protein, 569 aa, Arabidopsis thaliana
  peptide (1)..(569): Ceres Seq. ID no. 13609369
MLTKKLKKTVREDFGAFIDKLMLLPPPQPAPPKAPHPLTGLTFAVSDVFDITGYVTGFGHPDWVRTHEAASSTSPVVSTLVEGGATCVGKTVVDEFAFSISGENKHYDSPTNPAAPTRIPGGACSGAAVAVATNAVDFALGIDTVGGVRVPAGYCGVLGFKSSYGAISNTGIIPVSSSLDSVGWFARDPNTLRRVGHVLLQLPFATQRNPRQIILADDCFQLLKIPVDRITQVVTKSAEKLFGRQLLKHQNLETYFETKVPSLKEFARTKAIANTKVSTSRLLANVMQLLQRHEFLQNHGDWINTVKPAIDPVILSQVCENPELTNEETENLNAIRNETRVAIGSLLKDDGILVIPTLPAVPPKLGSKEITSEDYQNRASSLLSIASISGCCQVTVPLGHHEKCPISVSFIGRHGGDRFLLDTVQTMYPSLQEYSSIVTDPKSSKKAITKEESAEIAKEKGNQAFKEKLWQKAIGLYSEAIKLSDNNATYYSNRAAAYLELGGFLQAEEDCTKAITLDKKNVKAYLRRGTAREMLGDCKGAIEDFRYALVLEPNNKRASLSAERLRKFQ

SEQ ID NO: 102074 - protein, 548 aa, Arabidopsis thaliana
  peptide (1)..(548): Ceres Seq. ID no. 13609370
MLLPPPQPAPPKAPHPLTGLTFAVSDVFDITGYVTGFGHPDWVRTHEAASSTSPVVSTLVEGGATCVGKTVVDEFAFSISGENKHYDSPTNPAAPTRIPGGACSGAAVAVATNAVDFALGIDTVGGVRVPAGYCGVLGFKSSYGAISNTGIIPVSSSLDSVGWFARDPNTLRRVGHVLLQLPFATQRNPRQIILADDCFQLLKIPVDRITQVVTKSAEKLFGRQLLKHQNLETYFETKVPSLKEFARTKAIANTKVSTSRLLANVMQLLQRHEFLQNHGDWINTVKPAIDPVILSQVCENPELTNEETENLNAIRNETRVAIGSLLKDDGILVIPTLPAVPPKLGSKEITSEDYQNRASSLLSIASISGCCQVTVPLGHHEKCPISVSFIGRHGGDRFLLDTVQTMYPSLQEYSSIVTDPKSSKKAITKEESAEIAKEKGNQAFKEKLWQKAIGLYSEAIKLSDNNATYYSNRAAAYLELGGFLQAEEDCTKAITLDKKNVKAYLRRGTAREMLGDCKGAIEDFRYALVLEPNNKRASLSAERLRKFQ

SEQ ID NO: 102075 - DNA, 597 bp, Arabidopsis thaliana
  misc_feature (1)..(597): Ceres Seq. ID no. 13609371
  misc_feature (1)..(597): Ortholog of  Ceres SEQ ID NO 12321778 as cited in SEQ ID NO 20535
acaccaaaaacacatttctataaactcagaaacaaacaaaagatcaagaagaaacatggtgatgatcaagaccacaatggtttccctttttgctctagcggcggttctcctaatgattctagccccggcggcagaagccgtgacgtgctcgccaatgcagctaagcccatgtgcaacggcgataacgtcgtcttctccaccatcggctttgtgctgtgcaaagctgaaggagcagaggccatgcttatgtggttacatgagaaaccctagcctccgtcgcttcgtcagcactcccaacgctcgtaaagtctctaaaagttgcaaactccccatcccaaggtgttaaaaagtcagaaaagtgtttgctgtttatgatcatcctatatatgtttgaatcctacttttggtgtgtgtttaaggatgtttatttatgaccactataagtagtagagttaaataagtaagtggtactcttggtgatgctttgtatgcatcttatttaaatttttgctatcttattctggttgttgttgatatatatatatatacatgatggtgtaataactgagatgatataatatatgaaaattatatttc

SEQ ID NO: 102076 - protein, 114 aa, Arabidopsis thaliana
  peptide (1)..(114): Ceres Seq. ID no. 13609372
HQKHISINSETNKRSRRNMVMIKTTMVSLFALAAVLLMILAPAAEAVTCSPMQLSPCATAITSSSPPSALCCAKLKEQRPCLCGYMRNPSLRRFVSTPNARKVSKSCKLPIPRC

SEQ ID NO: 102077 - protein, 96 aa, Arabidopsis thaliana; identical to SEQ ID NO: 20537
  peptide (1)..(96): Ceres Seq. ID no. 13609373

SEQ ID NO: 102078 - protein, 94 aa, Arabidopsis thaliana; identical to SEQ ID NO: 20538
  peptide (1)..(94): Ceres Seq. ID no. 13609374

SEQ ID NO: 102079 - protein, 89 aa, Arabidopsis thaliana
  peptide (1)..(89): Ceres Seq. ID no. 13609375
TPKTHFYKLRNKQKIKKKHGDDQDHNGFPFCSSGGSPNDSSPGGRSRDVLANAAKPMCNGDNVVFSTIGFVLCKAEGAEAMLMWLHEKP

SEQ ID NO: 102080 - DNA, 1189 bp, Arabidopsis thaliana
  misc_feature (1)..(1189): Ceres Seq. ID no. 13609404
  misc_feature (1)..(1189): Ortholog of  Ceres SEQ ID NO 14316451 as cited in SEQ ID NO 57956
  misc_feature (1)..(1189): Ortholog of  Ceres SEQ ID NO 15224799 as cited in SEQ ID NO 0
gagcttctgtaatggctacttggagtggtttcaacgtctcttcttctccgttgcttaggcttcggtcttcctccgtctcaaatgtcactaagcttccgtttctctctcctatttgccggcgtcggttactggcagaacgctttggtctcgcaactgtcgttgttacgcgccaaaacctcacggttactccgtcgtctgcggcggtggaagctcgtatctcagggaaaagagaacctatgacgcctccgtataacatattgatcactggctcaaccaaaggtataggatatgcattagctagagagtttctgaaagcaggcgacaatgttgtgatttgctctagatcagctgaacgagttgagactgctgttcagagtcttaaggaagaatttggggagcatgtgtggggaactaagtgtgatgttacggaagggaaggatgtgagggaacttgtagcttatagtcagaagaatcttaaatacattgacatttggataaataatgcgggatctaatgcatatagctttaaacctttggcagaggcctcagatgaggatcttattgaagttgtgaaaaccaacactctaggtctcatgttatgttgccgagaggcaatgaatatgatgttgacccaatctcgaggtggtcatatcttcaatattgatggagctggttcagatgggagaccaacacccagatttgctgcatatggtgcaactaaacggagtgtcgttcacctgacaaagtcattacaggcagagttgcagatgcaagatgtcaaaaatgtcgtggtgcataatctatcgcctggaatggtcacaactgatctgctcatgtccggagcaactacaaaacaagccaagttcttcattaatgttttggcagagccagccgaagtggtggctgagtaccttgtcccaaacataagggcaataccggctagcggatctatgaagccgacttacatccgtttcctaactggaatcaaagcctacaccaaaatattctcaagagttgcgttgggagcaaggaagaacaggtatgttactgaagagtaggtgtcaaactaagtattagaattgtattgctttctcagtttgttcaatggtaaataaaaacctctacattttgttcatgacaactccaaaacatgcaatctattgtacaatttggatttaagctcatttgc

SEQ ID NO: 102081 - protein, 351 aa, Arabidopsis thaliana; identical to SEQ ID NO: 29410
  peptide (1)..(351): Ceres Seq. ID no. 13609405

SEQ ID NO: 102082 - protein, 348 aa, Arabidopsis thaliana; identical to SEQ ID NO: 29411
  peptide (1)..(348): Ceres Seq. ID no. 13609406

SEQ ID NO: 102083 - protein, 273 aa, Arabidopsis thaliana; identical to SEQ ID NO: 29412
  peptide (1)..(273): Ceres Seq. ID no. 13609407

SEQ ID NO: 102084 - DNA, 1590 bp, Arabidopsis thaliana
  misc_feature (1)..(1590): Ceres Seq. ID no. 13609408
  misc_feature (1)..(1590): Ortholog of  Ceres SEQ ID NO 13502874 as cited in SEQ ID NO 66298
  misc_feature (1)..(1590): Ortholog of  Ceres SEQ ID NO 12614124 as cited in SEQ ID NO 68392
atgcttgactccaccccaatgctcgcgtttattataggtttgcttcttcttgcattaactatgaagcgtaaggagaagaagaaaaccatgttaattagccctacgagaaacctctctctccctcccgggccgaaatcttggcctttaatcggaaacctaccggaaatactagggaggaacaaaccggtgttccggtggatacattctctcatgaaagaactcaacaccgatattgcatgtatccgtcttgcgaatactcacgtgatccccgtgacatccccgagaattgcaagagagattctgaagaagcaagactccgttttcgccactagaccgctaacgatgggcacggagtactgcagccgcgggtacttgaccgttgcggtggagccacaaggagagcagtggaagaagatgaggagagtggtggcatctcacgtgacgagcaagaagagcttccaaatgatgctacaaaagagaaccgaagaggctgataacttagtccggtacatcaataaccgtagtgtcaaaaaccgtggtaatgcttttgtggttattgatttaaggcttgcggtacggcaatacagtggaaatgtagctcggaagatgatgtttggtataaggcattttggtaaaggaagtgaagatggatcgggaccagggttggaagagattgaacatgtggaatctttgtttacggttttaacccatctttacgcctttgcattgtcagattatgtcccgtggctaaggttcttggacttggaaggccatgagaaggttgtgagtaacgcaatgagaaatgtaagtaagtataacgacccttttgttgatgaaagactcatgcaatggcgaaatgggaagatgaaagaacctcaagattttcttgacatgtttataatagctaaagacactgacgggaagcctactctgtcggacgaagagatcaaagcacaagtgacggaactaatgttggcgacggttgataatccgtctaacgcggcagagtggggtatggcggagatgattaacgagccgagcatcatgcaaaaagccgtggaagagattgatagggtagttggaaaagaccgtcttgtcattgagtctgatctcccaaatcttaactatgtgaaggcttgtgtgaaagaagcattccggttacaccccgtggcaccgttcaacctccctcacatgtccaccactgatactgtggtagacggttatttcatccccaagggaagccacgtattgattagtcgtatggggattgggagaaatcctagtgtgtgggacaagccgcataagttcgaccctgagagacatttgagcactaacacatgtgtggatctaaacgagtctgatctgaatataatatcgttcagtgcaggacgaagaggttgtatgggtgtggacattgggtcagccatgacgtacatgttactggctcggttgattcaaggattcacgtggttaccagtgcctggtaagaataagattgatatttcagaaagcaagaatgatctttttatggcaaaaccattatacgcggttgccacacctcgtttagctccacatgtgtatccaacctaa

SEQ ID NO: 102085 - protein, 529 aa, Arabidopsis thaliana
  peptide (1)..(529): Ceres Seq. ID no. 13609409
MLDSTPMLAFIIGLLLLALTMKRKEKKKTMLISPTRNLSLPPGPKSWPLIGNLPEILGRNKPVFRWIHSLMKELNTDIACIRLANTHVIPVTSPRIAREILKKQDSVFATRPLTMGTEYCSRGYLTVAVEPQGEQWKKMRRVVASHVTSKKSFQMMLQKRTEEADNLVRYINNRSVKNRGNAFVVIDLRLAVRQYSGNVARKMMFGIRHFGKGSEDGSGPGLEEIEHVESLFTVLTHLYAFALSDYVPWLRFLDLEGHEKVVSNAMRNVSKYNDPFVDERLMQWRNGKMKEPQDFLDMFIIAKDTDGKPTLSDEEIKAQVTELMLATVDNPSNAAEWGMAEMINEPSIMQKAVEEIDRVVGKDRLVIESDLPNLNYVKACVKEAFRLHPVAPFNLPHMSTTDTVVDGYFIPKGSHVLISRMGIGRNPSVWDKPHKFDPERHLSTNTCVDLNESDLNIISFSAGRRGCMGVDIGSAMTYMLLARLIQGFTWLPVPGKNKIDISESKNDLFMAKPLYAVATPRLAPHVYPT

SEQ ID NO: 102086 - protein, 523 aa, Arabidopsis thaliana; identical to SEQ ID NO: 79638
  peptide (1)..(523): Ceres Seq. ID no. 13609410

SEQ ID NO: 102087 - protein, 509 aa, Arabidopsis thaliana; identical to SEQ ID NO: 79639
  peptide (1)..(509): Ceres Seq. ID no. 13609411

SEQ ID NO: 102088 - DNA, 924 bp, Arabidopsis thaliana
  misc_feature (1)..(924): Ceres Seq. ID no. 13609412
  misc_feature (1)..(924): Ortholog of  Ceres SEQ ID NO 12610385 as cited in SEQ ID NO 55938
  misc_feature (1)..(924): Ortholog of  Ceres SEQ ID NO 13661939 as cited in SEQ ID NO 61170
  misc_feature (1)..(924): Ortholog of  Ceres SEQ ID NO 14309041 as cited in SEQ ID NO 0
  misc_feature (1)..(924): Ortholog of  Ceres SEQ ID NO 14309611 as cited in SEQ ID NO 0
tttctgttctgtcctaatttctctctggcgaaagctaagaggtttcggttacggtctccatctccgatcaaatcacgaagtttctatcggaaattttcagtgatacataccgtcagagattttctttacgagagaattgtcgccgacatactaaagcagagttttgggtgggaattagtaagatttcgactttggaattgggagatctttccattatgggttctgagcaaaacgacagcacaagcttctctccttcagagccaaagctctgcgtcaaaggatgtggcttcttcggatctccatcgaacatgaacctctgctctaaatgctacagagacatccgagccacggaggaacaaaccgcttccgctaaagccgccgtcgagaaatctctaaaccctaataaacccaaaactcaaccacaacagagccaagaaatcactcaaggcgtcctcggatctggatcgtcttcctcatcaacgagagggggtgattcggctgctgctccgttggatccaccgaaatcgacggctacgagatgcttgagctgtaacaagaaagttggcgtgacgggtttcaagtgtaggtgtggaagcactttctgtggaactcatagatatccagagagtcacgagtgccaattcgatttcaaaggagttgcgagagaagctattgctaaagctaatcctgtggtgaaggctgataaggttgataggatatgaattggtgaagaaactgttgtgttctcttttgtttttttattttcaagtctcgtgatgttggtggtttggctctctgttttctgctcttattatggttttatttgcttttagggtttcttaggaaaggccttagattctgctattatgtggtttcatgttttgcaacattggatttgttgttctgtaataaagtgttggttat

SEQ ID NO: 102089 - protein, 168 aa, Arabidopsis thaliana; identical to SEQ ID NO: 35636
  peptide (1)..(168): Ceres Seq. ID no. 13609413

SEQ ID NO: 102090 - protein, 137 aa, Arabidopsis thaliana; identical to SEQ ID NO: 35637
  peptide (1)..(137): Ceres Seq. ID no. 13609414

SEQ ID NO: 102091 - protein, 103 aa, Arabidopsis thaliana
  peptide (1)..(103): Ceres Seq. ID no. 13609415
FLFCPNFSLAKAKRFRLRSPSPIKSRSFYRKFSVIHTVRDFLYERIVADILKQSFGWELVRFRLWNWEIFPLWVLSKTTAQASLLQSQSSASKDVASSDLHRT

SEQ ID NO: 102092 - DNA, 1256 bp, Arabidopsis thaliana
  misc_feature (1)..(1256): Ceres Seq. ID no. 13609416
  misc_feature (1)..(1256): Ortholog of  Ceres SEQ ID NO 14306059 as cited in SEQ ID NO 52249
  misc_feature (1)..(1256): Ortholog of  Ceres SEQ ID NO 15170479 as cited in SEQ ID NO 52835
  misc_feature (1)..(1256): Ortholog of  Ceres SEQ ID NO 13596087 as cited in SEQ ID NO 68336
aaagattctttcttctaaccccattcgctctctccgatcaacacaacatttgatctaacggtttaattttctcgagaaaccgaaggaaaacaaacagaggtgcataacgattctgacggaaacttttgagatattttttttagagccaaaaggattcactttttttggttttatcttcgcatcgatctatgacgtacagcaatggcgtcgatgggacggtgcctgagctgaaattgagagtcgaagaagattccgataatggtgattatctgaaattgagaggaggatcaaatgaagaagatgaaggatcatcggcggaatcatcgagatgtccgataggatcggttacttctgtctggttctgggtgaaattgatctccttggtcgtttgtttgggttcattggcctttgttatcatcaaatgggttggtccctttttgattgaaaaggagctgattccatttataaattgggtgagaaacacattcagcataccggttctcggtcttctactatttgcctcagtggcattgtttccaagcattcttcttccttcttccccttccatgtggatggctggtcttacatttggttatggaaaagggtttcttctgattttatcagctgcttccatcggtgttactcttcctttcttaattggacatctcttcctccacaagatgcaagaatggttgaagaaataccctaaaaaagcagccatacttagagctgctggtgaaggaacctggtttcatcagtttcaagcagtcacactaatccgtgtctctccatttccttacatcatttacaactactgcgctttagcgactggagttcattatggtccttatatcttaggctctcttgttggaatggttcctgagatctttgtctcaatttacacgggtataatgctaaggacactagcagttgcatcagacacgagacacacactttcggttgtggagatagtcgtgaatgttcttggcttctgtgtaactgcgagcgcgactatagtctgcacaatctatgcgaagaagaagctaagtgcgatgcaatcagaggacgtagagacattacaaaatccaatactttattaactcttttcaccatgaccacaacataccatcatctaacacgatcttgaaattgataatatataatgtttttttttttttttgttattcttattcatttgaaaatgaatatttatgtctttttctcttgtatatatgatatgtatcaattgaattttg

SEQ ID NO: 102093 - protein, 303 aa, Arabidopsis thaliana
  peptide (1)..(303): Ceres Seq. ID no. 13609417
MTYSNGVDGTVPELKLRVEEDSDNGDYLKLRGGSNEEDEGSSAESSRCPIGSVTSVWFWVKLISLVVCLGSLAFVIIKWVGPFLIEKELIPFINWVRNTFSIPVLGLLLFASVALFPSILLPSSPSMWMAGLTFGYGKGFLLILSAASIGVTLPFLIGHLFLHKMQEWLKKYPKKAAILRAAGEGTWFHQFQAVTLIRVSPFPYIIYNYCALATGVHYGPYILGSLVGMVPEIFVSIYTGIMLRTLAVASDTRHTLSVVEIVVNVLGFCVTASATIVCTIYAKKKLSAMQSEDVETLQNPILY

SEQ ID NO: 102094 - protein, 177 aa, Arabidopsis thaliana; identical to SEQ ID NO: 26159
  peptide (1)..(177): Ceres Seq. ID no. 13609418

SEQ ID NO: 102095 - protein, 175 aa, Arabidopsis thaliana; identical to SEQ ID NO: 26160
  peptide (1)..(175): Ceres Seq. ID no. 13609419

SEQ ID NO: 102096 - DNA, 1171 bp, Arabidopsis thaliana
  misc_feature (1)..(1171): Ceres Seq. ID no. 13609420
  misc_feature (1)..(1171): Ortholog of  Ceres SEQ ID NO 14310358 as cited in SEQ ID NO 54582
  misc_feature (1)..(1171): Ortholog of  Ceres SEQ ID NO 15176085 as cited in SEQ ID NO 69305
aaacgaataaagaagtaactgtgaaagagcgaagaagagtcacacaaaaaaaacaatggcggaatcttcagagcctccggttgttctccttcaccgaccaccgtctctaactttcatggacgagattctgactcgtgaattccgtactctcatcaccgacacttcctcatcggaatcactcccgagcttcttcccccgtcacgcctcctccgccagagccttcgttatcagcggcagacttccggtaaccgatgaactcctttctcatctcccttctctccagattctcgtctgcactagcgtcggcatcgatcacatcgatctcgccgcatgcaagcgtcgcggcatcgttatcaccaacgctggcaacgcgttttccgatgacgttgctgattgtgccgtcggtttgcttattagcgttctccgtcgtattcctgccgccgatcgttacgtccggtctggtaattgggcgaaatttggggattttcaattagggtccaaggtaagtgggaagagagttgggatagttggattggggagcattggatcatttgttgctaaaagacttgaatcatttggctgtgttatctcttacaactcaaggagtcagaaacagagtagtccataccggtattactctgacattctctcgttagcagagaacaacgatgtacttgtcctctgctgctctttgacagacgaaacgcaccatattgtgaatagagaagtgatggagttgcttggtaaggatggggttgtgatcaatgtgggacgaggaaagttgattgatgagaaggagatggtcaagtgtttggttgacggtgtgattggtggtgctggtttagatgtgtttgagaatgaaccggcagttcctcaggagttgtttggtttggataatgtagtgttgtctcctcattttgctgtggctacaccagggtctttggacaatgttgcacagattgctttagctaacttgaaggcgtttttctcgaaccggcctttgctttctccggttcaattggattgagagagcgcccggtttgatcaggtagctaaattagttaagctattgtttattataatcaataattcaaaaagaaagtgtaatgaatatttgaatgtaccctgacattctctcccaaagaagaagaattaatgacgcatattattt

SEQ ID NO: 102097 - protein, 323 aa, Arabidopsis thaliana
  peptide (1)..(323): Ceres Seq. ID no. 13609421
MAESSEPPVVLLHRPPSLTFMDEILTREFRTLITDTSSSESLPSFFPRHASSARAFVISGRLPVTDELLSHLPSLQILVCTSVGIDHIDLAACKRRGIVITNAGNAFSDDVADCAVGLLISVLRRIPAADRYVRSGNWAKFGDFQLGSKVSGKRVGIVGLGSIGSFVAKRLESFGCVISYNSRSQKQSSPYRYYSDILSLAENNDVLVLCCSLTDETHHIVNREVMELLGKDGVVINVGRGKLIDEKEMVKCLVDGVIGGAGLDVFENEPAVPQELFGLDNVVLSPHFAVATPGSLDNVAQIALANLKAFFSNRPLLSPVQLD

SEQ ID NO: 102098 - protein, 303 aa, Arabidopsis thaliana
  peptide (1)..(303): Ceres Seq. ID no. 13609422
MDEILTREFRTLITDTSSSESLPSFFPRHASSARAFVISGRLPVTDELLSHLPSLQILVCTSVGIDHIDLAACKRRGIVITNAGNAFSDDVADCAVGLLISVLRRIPAADRYVRSGNWAKFGDFQLGSKVSGKRVGIVGLGSIGSFVAKRLESFGCVISYNSRSQKQSSPYRYYSDILSLAENNDVLVLCCSLTDETHHIVNREVMELLGKDGVVINVGRGKLIDEKEMVKCLVDGVIGGAGLDVFENEPAVPQELFGLDNVVLSPHFAVATPGSLDNVAQIALANLKAFFSNRPLLSPVQLD

SEQ ID NO: 102099 - DNA, 2014 bp, Arabidopsis thaliana
  misc_feature (1)..(2014): Ceres Seq. ID no. 13609423
  misc_feature (1)..(2014): Ortholog of  Ceres SEQ ID NO 14312408 as cited in SEQ ID NO 55042
accataggtcaccaaagactttataaataacccatacattatcatatacatataggcatacaaagtgagagaactctactctagattgtgctaaactcaatttgtattaatgatggatagattttggtcatggagattgtttgttgctctctctctttttctccattctccaatttgttcttctgacaaagctccgaactactccttcatgcgggacgcgacaggaagtcctacaacgtcgtactacgactatatcatcatcggtggtgggactgccgggtgccctctagccgcaacgctgtctcaaaacgccagcgttttgctgctcgaacgcggtgactcaccgtacaataaccccaacatcacgaggctctcggctttcggagccgctctctctgacctgtctgagtcctcaccatctcagcgttttgtatcagaagatggtgtcattaatgcacgtgctcgggttctcggtggcggaagcgctctcaacgccggcttctatacacgtgcgggcactaaatacgttaggaacatgggttgggacggagcgctagcgaacgagtcgtaccagtgggttgaagctaaggtggcgtttcagcctccgatggggcggtggcaaacggccgtgagagacggcttattggaggctgggattgtccctaataatggtttcacctatgatcatatcaatggcaccaaatttggcggtactatttttgaccgcaacggcaatagacacaccgccgccgatttgttagagtatgccgatcctaagggtattaccgtccttttgcatgccaccgtccaccggatcttgtttcgtactcgaggtacgaccaagccaatagccaacggagttgtgtaccgagaccggaccggtcaggctcatagagcttacctaaaggaaggcgccttgagtgagatcatcctatcggccggaaccctagggagcccacaacttcttatgctaagtggtgttggcccatcggctcaattacaggcccaaaacatcacggtggtgatggaccagcctcatgtgggtcaaggcatgtatgacaaccctatgaatgccgtgttcgttccttctccagtccccgttgaggtctcactcattgaggttgttgggattaccggggaaggaacatatgtcgaagccgccggtggtgaaaattttggcggaggtggtggtggttctagtggatcgtcctccactagagactactatgcaatgttttcaccaagggcaacattattagagtcaaattcaatgaccaaattatcatcagcccaaccttttcaaggaggcttccttttagagaaagtaatgggcccattatcaacgggtcatttagagctcaagacccgaaacccaaaagataacccgattgtgactttcaactatttccaacatcctgacgacctaaaacgttgtgttcgaggaatccaaaccatagagagagtcgtgcaatctaaagctttttcgaggtataagtacgcagatgtgtcatttgagtatttacttaacctcacggcgagtactcctgtcaatctaaggccgcctcgcagtggtcctggagcctcgttgcctccatccgcagaggaattttgccaacatacagttacaaccatttggcattaccatggaggatgcgttgtgggcagagtggtcgatggggattataaagttattggtatcgaccggcttagagtcattgatatgtcgaccgttggttattgtcccgggacaaatcctcaagccacggttatgatgcttggcaggtatatgggtgtgaagatcttgagagagagactcaccaagaagtagggttttgaatcggatcaggggttttgggaaaacgttatattaaaaatgaaatgaatcaagatattactaatcgatgttattaatagctgaatatgtattgttcttggtaatttctgtttggtacttattattagaccaaactgagatgtatacggaaatatatgtatagactcattcccaattttc

SEQ ID NO: 102100 - protein, 572 aa, Arabidopsis thaliana
  peptide (1)..(572): Ceres Seq. ID no. 13609424
MMDRFWSWRLFVALSLFLHSPICSSDKAPNYSFMRDATGSPTTSYYDYIIIGGGTAGCPLAATLSQNASVLLLERGDSPYNNPNITRLSAFGAALSDLSESSPSQRFVSEDGVINARARVLGGGSALNAGFYTRAGTKYVRNMGWDGALANESYQWVEAKVAFQPPMGRWQTAVRDGLLEAGIVPNNGFTYDHINGTKFGGTIFDRNGNRHTAADLLEYADPKGITVLLHATVHRILFRTRGTTKPIANGVVYRDRTGQAHRAYLKEGALSEIILSAGTLGSPQLLMLSGVGPSAQLQAQNITVVMDQPHVGQGMYDNPMNAVFVPSPVPVEVSLIEVVGITGEGTYVEAAGGENFGGGGGGSSGSSSTRDYYAMFSPRATLLESNSMTKLSSAQPFQGGFLLEKVMGPLSTGHLELKTRNPKDNPIVTFNYFQHPDDLKRCVRGIQTIERVVQSKAFSRYKYADVSFEYLLNLTASTPVNLRPPRSGPGASLPPSAEEFCQHTVTTIWHYHGGCVVGRVVDGDYKVIGIDRLRVIDMSTVGYCPGTNPQATVMMLGRYMGVKILRERLTKK

SEQ ID NO: 102101 - protein, 571 aa, Arabidopsis thaliana
  peptide (1)..(571): Ceres Seq. ID no. 13609425
MDRFWSWRLFVALSLFLHSPICSSDKAPNYSFMRDATGSPTTSYYDYIIIGGGTAGCPLAATLSQNASVLLLERGDSPYNNPNITRLSAFGAALSDLSESSPSQRFVSEDGVINARARVLGGGSALNAGFYTRAGTKYVRNMGWDGALANESYQWVEAKVAFQPPMGRWQTAVRDGLLEAGIVPNNGFTYDHINGTKFGGTIFDRNGNRHTAADLLEYADPKGITVLLHATVHRILFRTRGTTKPIANGVVYRDRTGQAHRAYLKEGALSEIILSAGTLGSPQLLMLSGVGPSAQLQAQNITVVMDQPHVGQGMYDNPMNAVFVPSPVPVEVSLIEVVGITGEGTYVEAAGGENFGGGGGGSSGSSSTRDYYAMFSPRATLLESNSMTKLSSAQPFQGGFLLEKVMGPLSTGHLELKTRNPKDNPIVTFNYFQHPDDLKRCVRGIQTIERVVQSKAFSRYKYADVSFEYLLNLTASTPVNLRPPRSGPGASLPPSAEEFCQHTVTTIWHYHGGCVVGRVVDGDYKVIGIDRLRVIDMSTVGYCPGTNPQATVMMLGRYMGVKILRERLTKK

SEQ ID NO: 102102 - protein, 539 aa, Arabidopsis thaliana
  peptide (1)..(539): Ceres Seq. ID no. 13609426
MRDATGSPTTSYYDYIIIGGGTAGCPLAATLSQNASVLLLERGDSPYNNPNITRLSAFGAALSDLSESSPSQRFVSEDGVINARARVLGGGSALNAGFYTRAGTKYVRNMGWDGALANESYQWVEAKVAFQPPMGRWQTAVRDGLLEAGIVPNNGFTYDHINGTKFGGTIFDRNGNRHTAADLLEYADPKGITVLLHATVHRILFRTRGTTKPIANGVVYRDRTGQAHRAYLKEGALSEIILSAGTLGSPQLLMLSGVGPSAQLQAQNITVVMDQPHVGQGMYDNPMNAVFVPSPVPVEVSLIEVVGITGEGTYVEAAGGENFGGGGGGSSGSSSTRDYYAMFSPRATLLESNSMTKLSSAQPFQGGFLLEKVMGPLSTGHLELKTRNPKDNPIVTFNYFQHPDDLKRCVRGIQTIERVVQSKAFSRYKYADVSFEYLLNLTASTPVNLRPPRSGPGASLPPSAEEFCQHTVTTIWHYHGGCVVGRVVDGDYKVIGIDRLRVIDMSTVGYCPGTNPQATVMMLGRYMGVKILRERLTKK

SEQ ID NO: 102103 - DNA, 1299 bp, Arabidopsis thaliana
  misc_feature (1)..(1299): Ceres Seq. ID no. 13609430
  misc_feature (1)..(1299): Ortholog of  Ceres SEQ ID NO 13594604 as cited in SEQ ID NO 52106
accccttctttattgctctgttctttgagcaaacaattttgatttcttcgcgagcgaagaaacctcaaagacgaaaagtctcgaaatttcataactttttcttgaagatctatctagatcacccattttcttaaaaacctcttgagatttttctatctcgtgaaaagaggttttaaggtttagatgggtgtggctcactctgatcttcacaatgatttgtcttcttcatcttgttttggggatcggaatatcttgaagcctggtttaggagatttaccagaggcgtgtgtggctataattgttgagaatttggatcctgttgagatctgtagattctcaaagctcaatagagcatttcgcggcgcttcttgggctgattgtgtttgggaatcgaaacttcctcagaattacagagatgttctcgagaaaatccttggtggcttccctgaaaatttgcaaaaaagacacctttatgcttttctctccaggattaactcattcgatgatgccaccaagaaggtatggatagataaacgaaccagtggtgtttgtctatccatttcagccaaaggattatccattacaggcattgatgatcgtagatattggagtcatatccccactgatgaatctcggttttcttctgtagcttatctccaacaaatctggtggtttgaagttgatggtgaaatcgatttcccattcccggttggaacctacagcattttcttcaggcttcaattaggccggtcgggcaagtggtttggtcgacgggtctgtaacacagaacaagtccatggttgggacattaaaccggttcgatttcaactctggactgaagatggtcaatattcctcatctcaatgtatgttaactgagcggggaaactggattcattaccacgccggagacgttgttgtccgggaatcgaataggtcatcgacaaagattaagttttcgatgactcagatcgattgtacacataccaaaggcgggttatctctagactctgtagtcgtgtacccgagctcgtgtaaagaccagttgaagcggttttaatgtttcaaccggatccggtttagtgagaggttaaagcagggttttttgttatgcaggtctttagccccttctatagatgtagttagagcttctatttagagagcttttgttttgtaacttcattgagttttgaggcaaactgtaataatatgttgtggttatgaaactaaaccatctgttataacttgttattagttacgttaagaatgattaatcgttacaaagtttaacttcagatcc

SEQ ID NO: 102104 - protein, 291 aa, Arabidopsis thaliana; identical to SEQ ID NO: 34881
  peptide (1)..(291): Ceres Seq. ID no. 13609431

SEQ ID NO: 102105 - DNA, 1486 bp, Arabidopsis thaliana
  misc_feature (1)..(1486): Ceres Seq. ID no. 13609442
  misc_feature (1)..(1486): Ortholog of  Ceres SEQ ID NO 15176851 as cited in SEQ ID NO 61348
gatccagaatctcatcttctttgcctccaactcagcaattcatattttcctatattacaactctctgcctcttctgcttacatcatacaacaagcttctctctctggtagccatggcttcggctactttctctgtggccaaaccatctcttcagggtttttctgagttctcaggacttcgaaactcctctgctcttccctttgccaagagatcttcttccgatgagtttgtttccttcgtcagtttccaaacttctgcaatgagaagcaatggtggatacaggaaaggggtgaccgaggccaagataaaggtagccatcaatgggttcggtaggattggtaggaacttcttgaggtgttggcatggtcgtaaggactctcctcttgatgtcgttgtcattaacgacactggtggtgttaaacaagcatcacatctcctcaaatacgactcaactcttggaatctttgacgctgatgtcaaaccttcaggagactcagctctctctgttgatggaaagatcatcaagattgtatctgatcgtaacccatctaatctcccctggggggaactaggcattgacttagttatcgaaggaaccggagtgtttgttgacagagacggtgctgggaagcaccttcaggctggagccaagaaggttcttatcactgcacctggaaaaggtgacatcccaacttatgtcgttggtgtcaatgctgaactttacagccatgaagatacgatcatcagcaatgcgtcttgtactactaactgtctcgctccattcgtcaaggttcttgaccagaaatttgggatcataaagggtacaatgacaactactcactcatacactggtgaccaaaggttgttagatgcgagccaccgtgatctaaggagagcaagagcagcagctttgaacattgttccaacatctacaggagcagccaaagctgtggctcttgtgcttcctaacctcaaaggaaaacttaacggaattgcattgcgtgtgccaactccaaacgtttcagtggttgacttagtcgtgcaagtctccaagaaaacttttgctgaagaagtcaatgctgctttcagagatgcagctgagaaagagcttaaaggtatccttgacgtctgtgatgagcctcttgtctctgttgacttcaggtgctctgatgtatcctccactattgattcttccctcacaatggttatgggagatgatatggttaaagtgattgcttggtatgacaatgaatggggttactcacagagagtcgttgatttggctgacattgttgccaataactggaagtgaagactcaacaacctcttgatgtctgctccattattttttactgttacatgattcggaatgtataattgtagttcctgagtttattatgtatttgtgctctataatttatagtaataaacttgattcaaacatattacatcctctgcttaatacacaactctggtttgggaatgc

SEQ ID NO: 102106 - protein, 436 aa, Arabidopsis thaliana; identical to SEQ ID NO: 46225
  peptide (1)..(436): Ceres Seq. ID no. 13609443

SEQ ID NO: 102107 - protein, 399 aa, Arabidopsis thaliana; identical to SEQ ID NO: 46226
  peptide (1)..(399): Ceres Seq. ID no. 13609444

SEQ ID NO: 102108 - protein, 350 aa, Arabidopsis thaliana; identical to SEQ ID NO: 46227
  peptide (1)..(350): Ceres Seq. ID no. 13609445

SEQ ID NO: 102109 - DNA, 1345 bp, Arabidopsis thaliana
  misc_feature (1)..(1345): Ceres Seq. ID no. 13609446
  misc_feature (1)..(1345): Ortholog of  Ceres SEQ ID NO 15225196 as cited in SEQ ID NO 63947
aaactggatgactggaatatccatttgcttttgagcgagtgatagaagcggaggcgattttctagggtttttgctcggaatcgatttcacgatgggaacgagcagcgatccgattcaagatggttccgatgagcagcagaagcgatcagagatctatacatacgaagcgccatggcacatctacgcaatgaattggagcgttcgtcgcgataagaagtatcgtctcgccatcactagcctcctcgagcaatacccgaaccgtgtcgagattgtgcagctcgatgaatccaatggtgagatccgttccgatcctaacctctcctttgagcatccttatccaccaacgaagaccattttcatacctgacaaggaatgccaaagacctgatcttctcgctacttcaagtgatttccttcgtttatggagaatcgctgatgatcattcccgtgttgagctcaaatcttgtctcaatagcaataagaacagtgagttttgtggtcctcttacttcttttgattggaatgaagctgagccacgtcgaattggaacatctagtactgatacgacttgtactatctgggacattgagcgtgaagctgttgatactcagcttattgctcatgataaggaagtttttgatattgcttggggtggtgttggtgtttttgcatctgtttcagctgatggctccgttagggtgtttgatcttcgtgataaggaacattcgacgattatctatgagagctccgagcctgatactcctttagtgcgtcttggttggaacaaacaggatcctaggtacatggctactattatcatggacagtgctaaagttgtggtgcttgacattcgttttccggctcttcctgtggttgagcttcaacgacatcaagctagtgtcaatgccattgcttgggctcctcatagctcttgtcacatttgtactgctggagatgattctcaagctttgatttgggatatttcatccatgggacagcatgttgaaggtggtcttgaccctattctagcttacactgctggtgctgagattgagcagcttcagtggtcctcttctcagcctgattgggtcgcaattgctttctctactaagctgcaaattctcagggtttgatcttttcaaagaatttctcatctcttgtcagattagattttactcattttctatcgtattaggggtctcgttacccttgttactatcctcaagatgtaaagactgttctcaatcgaattaatgaatctgtttgatcttgttgctatactcaagatgcaaagcttagcactgactcttattgatgtatgattgataagaaaggataatcctttg

SEQ ID NO: 102110 - protein, 346 aa, Arabidopsis thaliana; identical to SEQ ID NO: 24066
  peptide (1)..(346): Ceres Seq. ID no. 13609447

SEQ ID NO: 102111 - protein, 314 aa, Arabidopsis thaliana; identical to SEQ ID NO: 24067
  peptide (1)..(314): Ceres Seq. ID no. 13609448

SEQ ID NO: 102112 - DNA, 1093 bp, Arabidopsis thaliana
  misc_feature (1)..(1093): Ceres Seq. ID no. 13609449
  misc_feature (1)..(1093): Ortholog of  Ceres SEQ ID NO 13639109 as cited in SEQ ID NO 51131
  misc_feature (1)..(1093): Ortholog of  Ceres SEQ ID NO 13596346 as cited in SEQ ID NO 60879
  misc_feature (1)..(1093): Ortholog of  Ceres SEQ ID NO 15178104 as cited in SEQ ID NO 0
ctctttcttcttcttctcgtcgtcgtttgtcactttagagctacttcttcttcttctctgctaagcctttcctctcgacttgatacttttctccagtaagggtttgcaaagatgaagcttgatactagtgggttcgagacttccatgcctatgattggatttggctcgagcagtgatatgcttgatgagctttcttctgtaccctcgtttgatctaccccgtactaaagagtttgatggatttcagaaaaaagctaaagacatgttgaagcatgcaaaaggaacaaccactctcgcttttatcttcaaaggtggtgttatggtcgctgctgattctcgggctagcatgggaggatatatctcctcacaatctgtgaagaagattattgaaatcaatccttatatgctcggtacaatggctggaggagctgctgattgccaattctggcacagaaatcttggaattaagtgccgtctacatgagctggcaaacaagaggagaatctctgtttccggagcttcgaaacttcttgccaacatgctctattcataccgtggaatgggactttctgttggtacaatgattgctggatgggacgaaactggtcccggactatactatgtcgacaacgaaggaggacggctcaagggagacaggttttcagtcggttctggttcaccatatgcttacggtgtgctggacagcgggtacaaatatgatatgtcagttgaagaagcttccgagttagcaaggagatcaatctaccatgcgacattccgtgatggagccagtggtggagttgctagcgtgtaccacgttggtcccgaaggatggacgaaactatcaggagatgatgttggggagctacactaccattactaccccgtggcaccagctaccgcagaacaagtcatggaggaagcaacagccgaataaaaatcctgtttagttttctaatcgttcactccctttcttgttgttgcattttgtggtagtatatactgagttgtctctagctgaagctttggtattctattttactgatctgaaatgttgctcgcggattattctctataagattctctttttctgc

SEQ ID NO: 102113 - protein, 274 aa, Arabidopsis thaliana; identical to SEQ ID NO: 22484
  peptide (1)..(274): Ceres Seq. ID no. 13609450

SEQ ID NO: 102114 - protein, 263 aa, Arabidopsis thaliana; identical to SEQ ID NO: 22485
  peptide (1)..(263): Ceres Seq. ID no. 13609451

SEQ ID NO: 102115 - protein, 261 aa, Arabidopsis thaliana; identical to SEQ ID NO: 22486
  peptide (1)..(261): Ceres Seq. ID no. 13609452

SEQ ID NO: 102116 - DNA, 1583 bp, Arabidopsis thaliana
  misc_feature (1)..(1583): Ceres Seq. ID no. 13609453
  misc_feature (1)..(1583): Ortholog of  Ceres SEQ ID NO 13594209 as cited in SEQ ID NO 59089
  misc_feature (1)..(1583): Ortholog of  Ceres SEQ ID NO 13502874 as cited in SEQ ID NO 66298
  misc_feature (1)..(1583): Ortholog of  Ceres SEQ ID NO 12614124 as cited in SEQ ID NO 68392
aaagaagacggaacaaaaaacaaaaacagagccaggaataatgtcagtcttcctctgtttcctctgcctcttaccccttatcttaatcttcttgaaaaatctcaaaccatcgaaatggaagcttcctccaggcccaaagaagcttccgatcatcgggaacttacaccaacgccgggaattacatcccaggaacagtcggaatctttccgaaaagtacggaccaatcgtgtttctccgatacggattcgtccccgtggtcgtgatctcgtcaaaagaagcagcagaggaagttctcaagacccacgatcttgagtgttgtagccgaccagagacggttgggaccagagcaatctcttacaactttaaagacatcggattcgcaccgtacggtgaagattggagaacgatgcggaagctctcggtggtcgagctcttcagctcgaaaaagcttcaatctttcaggtatatcagagaggaagagaacgacttgtgtgtcaagaaactctctgatttagcttcgagacgatctttggtgaatcttgagaaaaccctttttactttagtcggaagtatagtgtgtaggatagggtttgggataaatctccgtgagtgtgagttcgttgatgaagatagcatcgatgatcttgtgcacaagtctgaagatgtcataaggaattctatcttctctgatttctttcccggattaatgggtaggctcatcgagtggatcttcagtgagaggaagagattgaatagactttactcggaagtagacactttctttcagaatattcttgatgatcatctcaagcctggaagagagagctctgatatcatcgatgtgatgattgatatgatgaagaagcaagagaaagagggagactctttcaagttcaccactgatcatctcaaagggatgatctcggacatatttctagcaggagttggaacaagctccactacattgatatgggcgatgaccgagctgatcagaaacccgagagtgatgaagaaagttcaagacgagattcggacaacacttggggacaagaaggagagaatcacagaagaagatttaaaccagcttcactacttcaagctcatggtcaaagagatattcaggttacatccagcagctccacttttgctcccaagagagacattgtctcatgtcaagatccaaggctacgatattcctgctaaaacacagatcatgatcaacgcttacgcgattgcacgtgatccaaaactatggacaaaccctgatgagtttaaccctgataggttccttgacagctccatagattacagaggactgaactttgagctattaccgtttggatctggtaggaggatatgtccagggatgacaatggggatcgccattgttgaattgggactattgaatttgctttacttcttcgactgggggctaccagagaaggaagaagccaaggagatcatcaccgggaatgaagttgctcttgaccttgttcaagtttttctccactgaatgtgttttggttatggaatgtttgtactacactaagcttgattctaaattaataacatcttacaagtac

SEQ ID NO: 102117 - protein, 503 aa, Arabidopsis thaliana
  peptide (1)..(503): Ceres Seq. ID no. 13609454
KKTEQKTKTEPGIMSVFLCFLCLLPLILIFLKNLKPSKWKLPPGPKKLPIIGNLHQRRELHPRNSRNLSEKYGPIVFLRYGFVPVVVISSKEAAEEVLKTHDLECCSRPETVGTRAISYNFKDIGFAPYGEDWRTMRKLSVVELFSSKKLQSFRYIREEENDLCVKKLSDLASRRSLVNLEKTLFTLVGSIVCRIGFGINLRECEFVDEDSIDDLVHKSEDVIRNSIFSDFFPGLMGRLIEWIFSERKRLNRLYSEVDTFFQNILDDHLKPGRESSDIIDVMIDMMKKQEKEGDSFKFTTDHLKGMISDIFLAGVGTSSTTLIWAMTELIRNPRVMKKVQDEIRTTLGDKKERITEEDLNQLHYFKLMVKEIFRLHPAAPLLLPRETLSHVKIQGYDIPAKTQIMINAYAIARDPKLWTNPDEFNPDRFLDSSIDYRGLNFELLPFGSGRRICPGMTMGIAIVELGLLNLLYFFDWGLPEKEEAKEIITGNEVALDLVQVFLH

SEQ ID NO: 102118 - protein, 490 aa, Arabidopsis thaliana; identical to SEQ ID NO: 23084
  peptide (1)..(490): Ceres Seq. ID no. 13609455

SEQ ID NO: 102119 - protein, 368 aa, Arabidopsis thaliana; identical to SEQ ID NO: 23085
  peptide (1)..(368): Ceres Seq. ID no. 13609456

SEQ ID NO: 102120 - DNA, 1311 bp, Arabidopsis thaliana
  misc_feature (1)..(1311): Ceres Seq. ID no. 13609465
  misc_feature (1)..(1311): Ortholog of  Ceres SEQ ID NO 14308107 as cited in SEQ ID NO 59030
  misc_feature (1)..(1311): Ortholog of  Ceres SEQ ID NO 15226612 as cited in SEQ ID NO 62700
actgcaaattttgatattttgggttttagcagtgaagtttgcgaaaatggcgtcttcggtttttctatccagtttctcgtcatcgtcttctttgcaactctgctcttcctttcacggcgagtacttagctccgtcgagatgctttctcggagctccggtcacttcctcttctttatcactctccggtaagaagaactcatattctccgagacagttccatgtttctgccaagaaagtttctgggttagaggaagccattagaatcagaaaaatgagagagcttgaaactaaatcaaaagttaggagaaatccaccattaagacgtggaagagtatcgcctcgtcttcttgtacctgatcacattccaaggcctccttatgttgagtctggtgtattaccggatatatcaagtgagttccagattcctggtcctgaaggcattgcgaaaatgagagctgcttgcgagcttgctgctcgggttttaaactatgctggaactttggttaagccatctgttacgactaatgaaatcgataaagctgtgcatgatatgattattgaagctggtgcttatccttcacctcttggatatggtggatttcctaaaagtgtgtgtacttcagttaatgagtgtatgtgtcacggaataccagattctcgccagctacagagcggggatataatcaacatcgatgtcacggtttacttggatggttaccatggagatacgtcgagaactttcttctgtggagaagttgacgaaggtttcaaacgacttgtgaaggttacggaagaatgtttggagagaggtattgcagtttgtaaagacggagcaagcttcaagaaaatcgggaaaagaatcagtgagcatgcggaaaagttcggctacaacgttgtggagcggtttgttgggcatggtgttggaccagtattccactccgaacctcttatatatcattaccgaaatgatgagcctggactaatggttgagggacagacattcacaattgaaccgattctcacgattggaaccacagaatgtgtaacatggccagacaactggactactctgacagcagatggtggcgtcgctgctcagtttgagcataccattctgattactagaactggttcagagattcttaccaaatgctaaaactattcacattgatcatttccatttcaccttttatttgctgatcatttaaggtccatagtataaattcattatctttgagaccatagtctaacaatttgtgttagtgccatcttttaagatctcaagattagtttgctattagaaattttccc

SEQ ID NO: 102121 - protein, 384 aa, Arabidopsis thaliana; identical to SEQ ID NO: 21333
  peptide (1)..(384): Ceres Seq. ID no. 13609466

SEQ ID NO: 102122 - protein, 369 aa, Arabidopsis thaliana; identical to SEQ ID NO: 21334
  peptide (1)..(369): Ceres Seq. ID no. 13609467

SEQ ID NO: 102123 - protein, 294 aa, Arabidopsis thaliana; identical to SEQ ID NO: 21335
  peptide (1)..(294): Ceres Seq. ID no. 13609468

SEQ ID NO: 102124 - DNA, 1102 bp, Arabidopsis thaliana
  misc_feature (1)..(1102): Ceres Seq. ID no. 13609469
  misc_feature (1)..(1102): Ortholog of  Ceres SEQ ID NO 15179139 as cited in SEQ ID NO 1093
  misc_feature (1)..(1102): Ortholog of  Ceres SEQ ID NO 15226793 as cited in SEQ ID NO 58689
agttcaactaataacgcaaaaatcagtttctctttgagtaagtgtttattacaattaaactaactcaggcaagtctatgatcatggcttcttctgctgctgcatcgatctctatgataactctaaggaacctctctcgcaatcatcaatctcaccaaagcacttttctcggtttctctagatccttccataaccaaaggatctcatctaacagtccaggtctctccacacgagcaagatccaccacttcctccactggaggtttcttcagaaccatttgcagcagcagtagcaatgactactccagaccaactaagatccaagagcttaacgtctacgagttcaacgaaggtgatcgaaacagtccagcggttttaaaactagggaaaaaaccagatcagctttgtctcggagatcttgtccccttcacaaacaaactctacacaggagatctcacaaaacgcataggaatcaccgcaggtctctgcgttttgatccaacatgttccagagaagaaaggtgatcgctttgaagcttcttacagtttctacttcggagattatggtcacatatcagttcaaggaccttatctcacttacgaggacacgtttcttgctatcaccggtggctccggcgtgtttgaaggagcttatggacaggtcaagcttcgtcagcttgtgtatcctacgaagctgttttacactttctacttgaaaggtgttgctgctgatttacctgtggagcttaccggaaaacatgttgagccgtcgaaggaagtgaaaccggcggctgaagctcaggcgactcagcccggcgctacgatcgctaactttactaattgaaatctaaatctttgtgggtgtctttgtcatggatcttattgggctgttgttcattgtgtttacattttaataatgggcctaaataatgagcctttgtattgggccgttctcgtaagcgtaatgtgtcccgtccctataagctggatttaagcgcgtgaactccaccttccgatatttttttttgatagattatatcaaatccatggatactttctatatttggaaagtttggcttagtaggctcgtggccatgtttgagct

SEQ ID NO: 102125 - protein, 254 aa, Arabidopsis thaliana; identical to SEQ ID NO: 35412
  peptide (1)..(254): Ceres Seq. ID no. 13609470

SEQ ID NO: 102126 - protein, 252 aa, Arabidopsis thaliana; identical to SEQ ID NO: 35413
  peptide (1)..(252): Ceres Seq. ID no. 13609471

SEQ ID NO: 102127 - protein, 242 aa, Arabidopsis thaliana; identical to SEQ ID NO: 35414
  peptide (1)..(242): Ceres Seq. ID no. 13609472

SEQ ID NO: 102128 - DNA, 1306 bp, Arabidopsis thaliana
  misc_feature (1)..(1306): Ceres Seq. ID no. 13609477
  misc_feature (1)..(1306): Ortholog of  Ceres SEQ ID NO 15179641 as cited in SEQ ID NO 56414
  misc_feature (1)..(1306): Ortholog of  Ceres SEQ ID NO 14313252 as cited in SEQ ID NO 67134
  misc_feature (1)..(1306): Ortholog of  Ceres SEQ ID NO 14302220 as cited in SEQ ID NO 69121
ctcactcactattttcacattctcttctctctcgatatcatctaaatctctctcgatctcaatttcgcaaaatggctgacaagaagatcagaatcggaatcaacggtttcggaagaatcggtcgtttggttgctagagttgttcttcagagggatgatgttgagctcgtcgctgttaacgatcctttcatcaccaccgagtacatgacatacatgtttaagtatgacagtgttcacggtcagtggaagcaccatgagcttaaggtgaaggatgacaaaactcttctcttcggtgagaagccagtcactgttttcggcatcaggaaccctgaggacatcccatggggtgaggctggagctgactttgttgttgagtctactggtgtcttcactgacaaagacaaggctgctgctcacttgaagggtggtgctaaaaaggttgtcatctctgccccaagcaaagatgcgcccatgttcgttgttggtgtcaacgagcacgagtacaagtctgaccttgacattgtttccaacgctagttgcaccactaactgccttgctcctcttgccaaggttattaatgacaggtttggcattgttgagggactcatgaccactgtccactctatcactgctactcagaagacagttgatggtccatcaatgaaggactggagaggtggaagagctgcttccttcaacattattcctagcagcactggtgccgccaaggctgttgggaaagtgttgccatccctcaatggaaaattgaccggaatgtctttccgtgttccaaccgttgatgtctcagttgttgatctcaccgttagacttgagaaagctgcaacatacgacgaaatcaagaaggccatcaaggaggaatctgaaggcaaaatgaagggaattttgggatacactgaggatgatgttgtgtctaccgactttgttggtgacaacaggtcaagcattttcgatgccaaggctgggattgcattgagcgacaagtttgtgaagttggtgtcatggtacgacaacgaatggggttacagttctcgtgtcgttgaccttatcgttcacatgtcaaaggcctaagcttacaccggcgagagtttgtgtgtggttgagttcgtactgttctgaataaaaaaaaggagaaaagaaaactcgagttgttatgttttttcactgattccatgcgcagtcatgagagtttgtagcttttgtctttttgctttctcttaatgtttccctgctttatttactgaaaccattggtttggttttttatgttaattaagtttttagttcatt

SEQ ID NO: 102129 - protein, 361 aa, Arabidopsis thaliana
  peptide (1)..(361): Ceres Seq. ID no. 13609478
HSLFSHSLLSRYHLNLSRSQFRKMADKKIRIGINGFGRIGRLVARVVLQRDDVELVAVNDPFITTEYMTYMFKYDSVHGQWKHHELKVKDDKTLLFGEKPVTVFGIRNPEDIPWGEAGADFVVESTGVFTDKDKAAAHLKGGAKKVVISAPSKDAPMFVVGVNEHEYKSDLDIVSNASCTTNCLAPLAKVINDRFGIVEGLMTTVHSITATQKTVDGPSMKDWRGGRAASFNIIPSSTGAAKAVGKVLPSLNGKLTGMSFRVPTVDVSVVDLTVRLEKAATYDEIKKAIKEESEGKMKGILGYTEDDVVSTDFVGDNRSSIFDAKAGIALSDKFVKLVSWYDNEWGYSSRVVDLIVHMSKA

SEQ ID NO: 102130 - protein, 338 aa, Arabidopsis thaliana; identical to SEQ ID NO: 22717
  peptide (1)..(338): Ceres Seq. ID no. 13609479

SEQ ID NO: 102131 - protein, 294 aa, Arabidopsis thaliana; identical to SEQ ID NO: 22718
  peptide (1)..(294): Ceres Seq. ID no. 13609480

SEQ ID NO: 102132 - DNA, 1870 bp, Arabidopsis thaliana
  misc_feature (1)..(1870): Ceres Seq. ID no. 13609481
  misc_feature (1)..(1870): Ortholog of  Ceres SEQ ID NO 13599322 as cited in SEQ ID NO 0
aaattaaaatagaattgagaaaaaaaagtttgatcagccatcggaggagaagagagaatgatagataactggatcacgagaagtcacaaatctcaaagaagaagaaagaaaaccaaaatcaagaacaataacaacaattcgcaatgatttgagccaaatctaaaggatggagttgatgaaattgttcttctagatgtttgttttggggatatgaacaaagaagaatctgagtttaatacactatgtggaaacagattctgagtaagcttcctaagaagtcttcttctaagaaccattcttcttcatctagttccacttcaaaaagtagtgataatggcgccagtaaatcgggtaattctcaaacccagaacgctcctcctgtaaaaccttctgctgattcagggtttaaagaagggaatttgaaaggaaatggtaacggtttcactccatatgaagcattgccaggtttcaaagatgttcctaatgcagagaaacagaacttgtttgtgagaaaactcagcttgtgctgtgttgttttcgatttctcggatccaacgaagaacgttaaggaaaaggatattaagcggcagacattgcttgagcttgtggattatgtagcttctcctaatggaaagtttagtgaaactgtgattcaagaagtggttagaatggtttctgttaacatattcagaaccttgaatcctcaaccgcgcgagaataaagttattgatgcgttagacttggaggaagaagagccttctatggatcctacttggcctcacttgcagcttgtctatgaaattctcctgcggcttattgcttcaccagagacagacaccaagctggctaagaaatacattgaccaatcttttgtctcaaggttacttgatttatttgattcagaggatcctagagaaagagattgtcttaagaccgttctacatcgcatctacggtaaatttatggttcatcgtcctttcataaggaaatccattaataacattttctatcggtttgttttcgagactgagaaacacaatgggattgctgagtttctagagattttgggaagtatcatcaatggatttgctctgccgcttaaagacgagcataaagtgtttttggttagagctttggtacctcttcacaaaccgaaaagcttgcaaatgtatcatcagcaattgtcttattgtatcacacagtttgtggaaaaagattgcaaactcgctgatacggttataaggggactactcaagtcttggcctgtcacaaatagttccaaagaagtcatgtttctaaacgagctagaggaagtattagaagcaactcaaccacctgaattccaacggtgtatggtcccattgtttcgccaagttgctcggtgtttgaacagtctccattttcaggttgcagaaagagctttgttcttatggaacaacgatcatatcgagaatctaataatgcagaaccggaaagttattcttccaatcatattccctgcattggagagaaacactcagaagcattggaaccaagctgttcatagcttgacgttgaatgtgcagaagatctttaatgacattgatgcagagttgtttaaggattgtcttgctaagtttagagaagatgaatcaaaagaagctgaaattggcgcaaaacgtgaggcaacgtggaaacggttggaagaaattggtaatcaaaagcaaaagagttcattgtaagatgttttagttgtagagacagaggttttgttctgtattttctcgttttttactacattggaaaattgggtttgtttttcttactctccagaaaaacttagtgagaaaaaagtttcagattcgttttctttgaagagattgcaaatatt

SEQ ID NO: 102133 - protein, 492 aa, Arabidopsis thaliana
  peptide (1)..(492): Ceres Seq. ID no. 13609482
MWKQILSKLPKKSSSKNHSSSSSSTSKSSDNGASKSGNSQTQNAPPVKPSADSGFKEGNLKGNGNGFTPYEALPGFKDVPNAEKQNLFVRKLSLCCVVFDFSDPTKNVKEKDIKRQTLLELVDYVASPNGKFSETVIQEVVRMVSVNIFRTLNPQPRENKVIDALDLEEEEPSMDPTWPHLQLVYEILLRLIASPETDTKLAKKYIDQSFVSRLLDLFDSEDPRERDCLKTVLHRIYGKFMVHRPFIRKSINNIFYRFVFETEKHNGIAEFLEILGSIINGFALPLKDEHKVFLVRALVPLHKPKSLQMYHQQLSYCITQFVEKDCKLADTVIRGLLKSWPVTNSSKEVMFLNELEEVLEATQPPEFQRCMVPLFRQVARCLNSLHFQVAERALFLWNNDHIENLIMQNRKVILPIIFPALERNTQKHWNQAVHSLTLNVQKIFNDIDAELFKDCLAKFREDESKEAEIGAKREATWKRLEEIGNQKQKSSL

SEQ ID NO: 102134 - protein, 350 aa, Arabidopsis thaliana
  peptide (1)..(350): Ceres Seq. ID no. 13609483
MVSVNIFRTLNPQPRENKVIDALDLEEEEPSMDPTWPHLQLVYEILLRLIASPETDTKLAKKYIDQSFVSRLLDLFDSEDPRERDCLKTVLHRIYGKFMVHRPFIRKSINNIFYRFVFETEKHNGIAEFLEILGSIINGFALPLKDEHKVFLVRALVPLHKPKSLQMYHQQLSYCITQFVEKDCKLADTVIRGLLKSWPVTNSSKEVMFLNELEEVLEATQPPEFQRCMVPLFRQVARCLNSLHFQVAERALFLWNNDHIENLIMQNRKVILPIIFPALERNTQKHWNQAVHSLTLNVQKIFNDIDAELFKDCLAKFREDESKEAEIGAKREATWKRLEEIGNQKQKSSL

SEQ ID NO: 102135 - protein, 319 aa, Arabidopsis thaliana
  peptide (1)..(319): Ceres Seq. ID no. 13609484
MDPTWPHLQLVYEILLRLIASPETDTKLAKKYIDQSFVSRLLDLFDSEDPRERDCLKTVLHRIYGKFMVHRPFIRKSINNIFYRFVFETEKHNGIAEFLEILGSIINGFALPLKDEHKVFLVRALVPLHKPKSLQMYHQQLSYCITQFVEKDCKLADTVIRGLLKSWPVTNSSKEVMFLNELEEVLEATQPPEFQRCMVPLFRQVARCLNSLHFQVAERALFLWNNDHIENLIMQNRKVILPIIFPALERNTQKHWNQAVHSLTLNVQKIFNDIDAELFKDCLAKFREDESKEAEIGAKREATWKRLEEIGNQKQKSSL

SEQ ID NO: 102136 - DNA, 2411 bp, Arabidopsis thaliana
  misc_feature (1)..(2411): Ceres Seq. ID no. 13609489
  misc_feature (1)..(2411): Ortholog of  Ceres SEQ ID NO 15177678 as cited in SEQ ID NO 0
aaaaaagcgtcgttgagaggttagagacgaaggaaggaggcagaggatagagagatagcgaggctaatggatcagtgactcactgagtcagattttaccgattcattgcctccattgaagcctcttttctcagattctacgcttcactgtctcttctccatgtgcgtctcctcctcctccgtttcttcagatcttgctttccggtgacggttttaatcttcttctctctggtaacacgtataaagcatggcttacctgatgtagacatgtagtgttaggctaaagactcctcttttcacttctgtcttgttgagtttgtgttggtttaaggctttaagccaaaggcgttgttggtctgacaagatggcaatggcggtgtttaaggctcctctaaaaggggaatttcatggggctagaaagatggaagggaagcaatataagcaccatctgcttcagcaacagtctacagggagaagacgtgtgttcgtgcaaaccgatactggctgtgtgttgggagttgagttggatcgtaatgacaatgttcatactgtgaagaaaaggcttcagattgcgtttaactttcctactgaggaaagctctttgacctttggggatatggtgttgaagaatgacttgagtgctgtgaggaatgattctccgcttctcttaaagcgtaacttaatgcacagaagctcttctactccgtgtctttcacctactgggaatgatctgcagaggaaagatcgaagtggtcctattgagatacttagtcactcgccctgttttctgtctttgaagcaaacagcgaatgacattgttaaggcgatgaagatgggtgttgaaccaatccctgttaatggtgggcttggaggggcatactattttagggatgaaaagggtcaaagtgttgctattgtcaagcctacggatgaagagccgtttgcccctaacaatcctaaaggcttcgtagggaaagcgcttgggcagcctggtttaaagccttctgtgcgggttggggaaaccgggtttagagaagttgctgcataccttcttgattatgatcactttgctaatgttcctcctacggctcttgtgaagataacacactctgttttcaatgtcaatgatggaatggatgggaacaaatctcgtgagaagaagaagctggtcagcagcaagattgcttcgttccagaagtttgtacctcatgattttgatgccagtgatcacgggacttcaagcttccctgtcgcttctgtgcaccgcattgggattttggacataaggattctcaacacagaccggcatggtggaaatcttttggtgaagaagcttgatgatggtggtgttgggaggtttggtcaagtggagcttattccaatagatcatggtctttgcttaccagaaacactcgaagatccttacttcgaatggattcattggcctcaggcttcaatacctttctctgaagaagaacttgactacatacaaagtcttgatccagtgaaagattgtgaaatgcttcgaagagagcttccgatgattcgagaggcttgtctcagggttctagttctctgtaccgttttccttaaagaagctgctgtttttggactttgtcttgcagagatcggtgagatgatgactcgagaatttcgtgcaggagaagaggaaccaagtgaactagaaatgttgtgtatcgaagccaagagattaaccactgaacaagacgttttgtctcccaagtcagatggagaaggagagacagagtttcagtttgatatagactacaatgagctagactcggtttatggctctgagacagaaaccgatgagttcttcgccaagaacccattttcaaacggacgttcttcacttggagagctcaaagagagcattgctgaagaagaagaagatgacgaagaggaggcaaaacttactctatctctctcaaagctttccacatcaatgaagaacaatctaagcaacaccatgggatccggatacctgaaacctccgaaagacaaccaaaccgacaaagcattggtaagtcacaagagcgcgaacgtgcagctcccgcttagcgtaaactttgtgaagttagccgacatgaaagaagttgaatgggttgtgttcttggagaggtttcaggagttgctttactcggcttttgcagaacgcaagaccatgacgttgaggaacacacagagacttggtacatcgtgcaagttttgagatcatacgagttcacataagagaagaccaaagatttcacttttacgagttttgaagcaattacttgttagctacgttaagattagtttacttttgtagcgaccacgagcacttgcaatgtgaagaaatgtttattttgcctgtaaatattctttaccatttttttttccctaacttcc

SEQ ID NO: 102137 - protein, 622 aa, Arabidopsis thaliana; identical to SEQ ID NO: 39992
  peptide (1)..(622): Ceres Seq. ID no. 13609490

SEQ ID NO: 102138 - protein, 620 aa, Arabidopsis thaliana; identical to SEQ ID NO: 39993
  peptide (1)..(620): Ceres Seq. ID no. 13609491

SEQ ID NO: 102139 - protein, 603 aa, Arabidopsis thaliana; identical to SEQ ID NO: 39994
  peptide (1)..(603): Ceres Seq. ID no. 13609492

SEQ ID NO: 102140 - DNA, 1774 bp, Arabidopsis thaliana
  misc_feature (1)..(1774): Ceres Seq. ID no. 13609500
  misc_feature (1)..(1774): Ortholog of  Ceres SEQ ID NO 14314620 as cited in SEQ ID NO 56872
aaaacttccctccttaccataaataataatagtagtataattttagtgtaaaaatcttgaagaaagccctacaatacaaggctacaacaatcccaatttctcctcgtcggagatttctaagtaaaaccctagaactaaccattatatatattataatacaaatatattcatccctccctctccctgtgtcttactctgtcttctcttcgaactgatctgagatttttgattctgcttctcttctcatcttctcccaaggtagagatggcacttgaatcaaatgctccagtggtggacccaaacactattggcaattcttttgttgagaaatactacaacctcttgtataagtcaccatcgcaagtgcatcagttttatctcgacgatagtgttttaggccgtcctggttctgatggagagatggtttctgtcaaatccttgaaagctatcaatgagcagattatgtccttcgattacgaaatctcaaagattcagattttgactgctgattcccaagcatcttacatgaatggagttgtgactctagtcacaggtttactaaccgtgaaagaggggcaaagaatgagattttctcaatcgtttttccttgtgccgctgaatggaagctatttcgttctcaacgatgtctttaggtatgttgctgatgagattgttgaaccagaagctaacaagaaagaagtcgaggaggttattcctcaagtggtccaaccaacagagcaggtagatgaagttgcagagccggttactatccctacccaacaacccgaggcgaaacagacaaccgaaaatacagtgaagaaaccagaaagagctgtagcaaatggacatcccaaaacacaggaggataatgttgtgaacgataaaagcaatggtgttgatgctcccaagaaatcatttgcacatattgtccaagatttggctcaaaacggtgctacattcaatgccaaagcttctcctgcaaagcctaagtctaagcctgttacaaagccgagtgctgctcgtgaatccaaagctcctgctcctgtttctgaacactcttctgctgcaacaatcgaccaacaagctgagggttatacgatatttgttgccaacttgctcatggacgctacaccagagcaactaaatgaaacattcaaaggttttggagctattacgaaagatggtatccaagtgagaagttacaggctcaagggaaactgttttggctttgtgacattcgcatctgctgaagctgtgaaattggtcctccaggctcacaaagaatcagccatcagaatcggaaaccgaagagtttcaatagaagagaaacgaggcaacaacgataatggaagacccgcaatgcgaaacggaggttataggaacgacaacggttacagaaacgatgggtataggcctcgaggcaacggttccaatggaggtcgaggctatggaagaaatggatctgagagacggggtgaatcacgcaatggtgaggctcacaatggtgatggcaaagttcatcagaacggtacggtagaagctagccgttaaaatactcaatccagaggctaaacaagtttgaagtcatttgttaaactctgttgtgttattgttgttcatttgaaattgaggttttataggaagagatagtgagagggagagagagagattagaagttcttttggagtaggtttatctcttaggtgataatcccttctttgagattttgtttgggataacaaaaatttgatgattacttttaccttccattctg

SEQ ID NO: 102141 - protein, 428 aa, Arabidopsis thaliana
  peptide (1)..(428): Ceres Seq. ID no. 13609501
MALESNAPVVDPNTIGNSFVEKYYNLLYKSPSQVHQFYLDDSVLGRPGSDGEMVSVKSLKAINEQIMSFDYEISKIQILTADSQASYMNGVVTLVTGLLTVKEGQRMRFSQSFFLVPLNGSYFVLNDVFRYVADEIVEPEANKKEVEEVIPQVVQPTEQVDEVAEPVTIPTQQPEAKQTTENTVKKPERAVANGHPKTQEDNVVNDKSNGVDAPKKSFAHIVQDLAQNGATFNAKASPAKPKSKPVTKPSAARESKAPAPVSEHSSAATIDQQAEGYTIFVANLLMDATPEQLNETFKGFGAITKDGIQVRSYRLKGNCFGFVTFASAEAVKLVLQAHKESAIRIGNRRVSIEEKRGNNDNGRPAMRNGGYRNDNGYRNDGYRPRGNGSNGGRGYGRNGSERRGESRNGEAHNGDGKVHQNGTVEASR

SEQ ID NO: 102142 - protein, 376 aa, Arabidopsis thaliana
  peptide (1)..(376): Ceres Seq. ID no. 13609502
MVSVKSLKAINEQIMSFDYEISKIQILTADSQASYMNGVVTLVTGLLTVKEGQRMRFSQSFFLVPLNGSYFVLNDVFRYVADEIVEPEANKKEVEEVIPQVVQPTEQVDEVAEPVTIPTQQPEAKQTTENTVKKPERAVANGHPKTQEDNVVNDKSNGVDAPKKSFAHIVQDLAQNGATFNAKASPAKPKSKPVTKPSAARESKAPAPVSEHSSAATIDQQAEGYTIFVANLLMDATPEQLNETFKGFGAITKDGIQVRSYRLKGNCFGFVTFASAEAVKLVLQAHKESAIRIGNRRVSIEEKRGNNDNGRPAMRNGGYRNDNGYRNDGYRPRGNGSNGGRGYGRNGSERRGESRNGEAHNGDGKVHQNGTVEASR

SEQ ID NO: 102143 - protein, 362 aa, Arabidopsis thaliana
  peptide (1)..(362): Ceres Seq. ID no. 13609503
MSFDYEISKIQILTADSQASYMNGVVTLVTGLLTVKEGQRMRFSQSFFLVPLNGSYFVLNDVFRYVADEIVEPEANKKEVEEVIPQVVQPTEQVDEVAEPVTIPTQQPEAKQTTENTVKKPERAVANGHPKTQEDNVVNDKSNGVDAPKKSFAHIVQDLAQNGATFNAKASPAKPKSKPVTKPSAARESKAPAPVSEHSSAATIDQQAEGYTIFVANLLMDATPEQLNETFKGFGAITKDGIQVRSYRLKGNCFGFVTFASAEAVKLVLQAHKESAIRIGNRRVSIEEKRGNNDNGRPAMRNGGYRNDNGYRNDGYRPRGNGSNGGRGYGRNGSERRGESRNGEAHNGDGKVHQNGTVEASR

SEQ ID NO: 102144 - DNA, 1135 bp, Arabidopsis thaliana
  misc_feature (1)..(1135): Ceres Seq. ID no. 13609525
  misc_feature (1)..(1135): Ortholog of  Ceres SEQ ID NO 12612330 as cited in SEQ ID NO 56418
  misc_feature (1)..(1135): Ortholog of  Ceres SEQ ID NO 13664295 as cited in SEQ ID NO 61486
  misc_feature (1)..(1135): Ortholog of  Ceres SEQ ID NO 15179147 as cited in SEQ ID NO 0
taacaatgtctataaaatcagtacaggtctattcttgttcactagcttcgaaattttagtcgaagaaacaaaaaaaaatggcgacggtacaattgtccacccaatttagctgccaaaccagagtttcaatctcaccgaactctaaatctatctccaagcctccgtttctggtaccggtgacctcaattattcaccgcccgatgatctccaccggaggaatcgctgtttccccccgtagagttttcaaagtccgagccacagatacgggagagataggatcagctctattggcggcggaggaagcaattgaagacgtggaagagacggagcggctaaagagatcgctcgtggattcgttgtacggaacagatcgaggtttaagcgcatcgagcgaaaccagagctgaaatcggagatctaatcacacagctcgagtctaagaaccctactccagctccgacggaagctcttttccttctcaacggcaaatggatcctcgcctacacatcgttcgtgaatttgttcccgttgctatcacgaggaatcgtaccgttaataaaagtcgatgagatctctcaaaccattgattcagataacttcaccgtccagaactctgttcgtttcgctggtcctttaggtacaaactcgattagcaccaacgctaaattcgaaatccgaagccctaaacgcgtccagattaagtttgagcaaggcgtaattgggacgcctcagctaacggattctattgagataccggaatatgtagaggttcttggtcaaaagattgatcttaacccgatcagagggttacttacctcggtgcaagacacagcctcgtctgtggctagaaccatatcaagccaaccaccgttgaaattctctttgccggcggacaatgcgcagtcttggctactcacgacttatctagacaaagacattcggatctctagaggagacggtggaagtgtctttgtgcttatcaaagaaggaagccctctcttgaatccttgaacttggtcaaaatatatgtctctctcttgtcgttgtgttaagtgagacaaatatatagtgtggttgtaggtttacttcttaatcgttgttattaactcgatgataaggaatataatgtttttaac

SEQ ID NO: 102145 - protein, 310 aa, Arabidopsis thaliana; identical to SEQ ID NO: 37403
  peptide (1)..(310): Ceres Seq. ID no. 13609526

SEQ ID NO: 102146 - protein, 269 aa, Arabidopsis thaliana; identical to SEQ ID NO: 37404
  peptide (1)..(269): Ceres Seq. ID no. 13609527

SEQ ID NO: 102147 - DNA, 1101 bp, Arabidopsis thaliana
  misc_feature (1)..(1101): Ceres Seq. ID no. 13609528
  misc_feature (1)..(1101): Ortholog of  Ceres SEQ ID NO 13594209 as cited in SEQ ID NO 59089
  misc_feature (1)..(1101): Ortholog of  Ceres SEQ ID NO 13502874 as cited in SEQ ID NO 66298
agacgagagaacgagcttaggaaacgagctcaaaaccctaatatctgatatctccgacatagaagggattcaaaactactcagatttctttccgttgttctcaagattcgatttccaaggattggttaagcagatgaaaggccatgtgaagaagcttgatctcttgttcgatagagttatggagagtcacgtcaaaatggtgggaaagaagagcgaagaagaagaagatttcttgcaatacttacttagagttaaagatgatgatgagaaagctcctctgtccatgactcatgtcaagtctctcctcatggatatggttcttggtggtgtcgacacatcggttaacgcatccgaattcgccatggcagagattgtgagcagaccggaagtgttaaacaagatccgactagaacttgaccaagttgttggcaaagacaacatcgttgaggaatcacatttacctaagcttccttacctacaagcggttatgaaagagactcttaggcttcaccctacgcttcctcttcttgttcctcacagaaacagcgaaacctcggtggttgcgggatacactgtgcctaaagactccaagattttcatcaacgtttgggcgattcatagagatcctaagaattgggatgaaccaaacgagttcaaacctgagaggtttttggagaattcgcttgatttcaatggaggtgattttaagtacttgccttttgggtcaggaaggaggatttgtgcggcgattaacatggctgagagacttgttctgttcaacattgcttcacttcttcactcttttgattggaaagcacctcaaggacagaagtttgaggttgaagagaagtttggtcttgttcttaagttgaagtctccacttgtggctattcctgttccaaggttgtccgatccaaaactctatacagcttaagtaagtaagaaggaaatttggtttgagcttatgagaggaagttgaattgagttttcttgtttaaagtttatttttctttattcgtgtttggagtttgatgctttgtaaaaaaagatgtgtcaagttaaatttaattttcttatatataataaaataaagttttagtc

SEQ ID NO: 102148 - protein, 310 aa, Arabidopsis thaliana
  peptide (1)..(310): Ceres Seq. ID no. 13609529
DERTSLGNELKTLISDISDIEGIQNYSDFFPLFSRFDFQGLVKQMKGHVKKLDLLFDRVMESHVKMVGKKSEEEEDFLQYLLRVKDDDEKAPLSMTHVKSLLMDMVLGGVDTSVNASEFAMAEIVSRPEVLNKIRLELDQVVGKDNIVEESHLPKLPYLQAVMKETLRLHPTLPLLVPHRNSETSVVAGYTVPKDSKIFINVWAIHRDPKNWDEPNEFKPERFLENSLDFNGGDFKYLPFGSGRRICAAINMAERLVLFNIASLLHSFDWKAPQGQKFEVEEKFGLVLKLKSPLVAIPVPRLSDPKLYTA

SEQ ID NO: 102149 - protein, 266 aa, Arabidopsis thaliana
  peptide (1)..(266): Ceres Seq. ID no. 13609530
MKGHVKKLDLLFDRVMESHVKMVGKKSEEEEDFLQYLLRVKDDDEKAPLSMTHVKSLLMDMVLGGVDTSVNASEFAMAEIVSRPEVLNKIRLELDQVVGKDNIVEESHLPKLPYLQAVMKETLRLHPTLPLLVPHRNSETSVVAGYTVPKDSKIFINVWAIHRDPKNWDEPNEFKPERFLENSLDFNGGDFKYLPFGSGRRICAAINMAERLVLFNIASLLHSFDWKAPQGQKFEVEEKFGLVLKLKSPLVAIPVPRLSDPKLYTA

SEQ ID NO: 102150 - protein, 251 aa, Arabidopsis thaliana
  peptide (1)..(251): Ceres Seq. ID no. 13609531
MESHVKMVGKKSEEEEDFLQYLLRVKDDDEKAPLSMTHVKSLLMDMVLGGVDTSVNASEFAMAEIVSRPEVLNKIRLELDQVVGKDNIVEESHLPKLPYLQAVMKETLRLHPTLPLLVPHRNSETSVVAGYTVPKDSKIFINVWAIHRDPKNWDEPNEFKPERFLENSLDFNGGDFKYLPFGSGRRICAAINMAERLVLFNIASLLHSFDWKAPQGQKFEVEEKFGLVLKLKSPLVAIPVPRLSDPKLYTA

SEQ ID NO: 102151 - DNA, 1402 bp, Arabidopsis thaliana
  misc_feature (1)..(1402): Ceres Seq. ID no. 13609546
  misc_feature (1)..(1402): Ortholog of  Ceres SEQ ID NO 14316017 as cited in SEQ ID NO 67028
aacaaatatctcctgctcttacatctgagtctttttctttctaaccttctgattcatgagtaatcatatgtccattatgaagttcttgaatcaaatcctctgtctctctcttatcctctccatatccatgactactctttcctttgctcagacatgttctaaatacaagttctccagcaacaatgtctttgactcttgcaacgatcttccttttcttgattccttcctccattacacttacgagtcttccaccgggagcctccacattgcttatcgccacactaagctcacctctggtaaatgggttgcttgggctgtgaacccaacgtctacgggaatggtgggagctcaagccatcgttgcttatccacaatcagatggtactgtcagggtttacacttctcccatcagaagctaccagacgagtctactagagggtgatctgagtttcaatgtctctggtttgtctgcaacttaccagaacaatgagatcgttgtgttggcaagtctgaagcttgcacaggatcttgggaatggtggaaccattaacacagtgtggcaagatgggtcaatgtctgggaacagtcttctgcctcatccaacttctggcaacaatgttcgatcagtgtcaactctcaatctggtatccggtgtttcagcagctgcaggaggagctggaggaagttccaagcttcgcaaacgcaatattcatggaatattgaatggagtgagctggggaatcatgatgccactaggggcaatcattgctcgatacttgagagtagccaaatcagcagaccctgcttggttctacattcacgtttctgccaggcttctgcttacatcatcggtgttgccggatgggccactggtctcaaactcggtggcgactcaccagggattcagtacagcacccaccgtgccatcgggatcgctctcttctctctagcgacagttcaggtgtttgcgatgtttctgaggccaaaaccagagcacaagcataggctctactggaacatttaccaccacacgatcggctacacgataatcatcctaggggtggtgaacgttttcaaagggctaggcatattgagtcccaagaagcagtggaaaaatgcctacatcggtatcattgttgttctcgccattgtggccaccctactcgaagccttcacctggtatgtagtcattaaaagaaggaaactggaggctaaaacggctcagcatggagcatctaacggcactcggtctcagtatgcttaagattagcaacagacttgcttccttttctctttgtgcatagagacacagttatttatctgcttatctatctgttcccatatgcaatgatgattttttacattcatgatttaggatttataatgccatttttatttgatca

SEQ ID NO: 102152 - protein, 297 aa, Arabidopsis thaliana
  peptide (1)..(297): Ceres Seq. ID no. 13609547
MSNHMSIMKFLNQILCLSLILSISMTTLSFAQTCSKYKFSSNNVFDSCNDLPFLDSFLHYTYESSTGSLHIAYRHTKLTSGKWVAWAVNPTSTGMVGAQAIVAYPQSDGTVRVYTSPIRSYQTSLLEGDLSFNVSGLSATYQNNEIVVLASLKLAQDLGNGGTINTVWQDGSMSGNSLLPHPTSGNNVRSVSTLNLVSGVSAAAGGAGGSSKLRKRNIHGILNGVSWGIMMPLGAIIARYLRVAKSADPAWFYIHVSARLLLTSSVLPDGPLVSNSVATHQGFSTAPTVPSGSLSSL

SEQ ID NO: 102153 - protein, 293 aa, Arabidopsis thaliana
  peptide (1)..(293): Ceres Seq. ID no. 13609548
MSIMKFLNQILCLSLILSISMTTLSFAQTCSKYKFSSNNVFDSCNDLPFLDSFLHYTYESSTGSLHIAYRHTKLTSGKWVAWAVNPTSTGMVGAQAIVAYPQSDGTVRVYTSPIRSYQTSLLEGDLSFNVSGLSATYQNNEIVVLASLKLAQDLGNGGTINTVWQDGSMSGNSLLPHPTSGNNVRSVSTLNLVSGVSAAAGGAGGSSKLRKRNIHGILNGVSWGIMMPLGAIIARYLRVAKSADPAWFYIHVSARLLLTSSVLPDGPLVSNSVATHQGFSTAPTVPSGSLSSL

SEQ ID NO: 102154 - protein, 290 aa, Arabidopsis thaliana
  peptide (1)..(290): Ceres Seq. ID no. 13609549
MKFLNQILCLSLILSISMTTLSFAQTCSKYKFSSNNVFDSCNDLPFLDSFLHYTYESSTGSLHIAYRHTKLTSGKWVAWAVNPTSTGMVGAQAIVAYPQSDGTVRVYTSPIRSYQTSLLEGDLSFNVSGLSATYQNNEIVVLASLKLAQDLGNGGTINTVWQDGSMSGNSLLPHPTSGNNVRSVSTLNLVSGVSAAAGGAGGSSKLRKRNIHGILNGVSWGIMMPLGAIIARYLRVAKSADPAWFYIHVSARLLLTSSVLPDGPLVSNSVATHQGFSTAPTVPSGSLSSL

SEQ ID NO: 102155 - DNA, 975 bp, Arabidopsis thaliana
  misc_feature (1)..(975): Ceres Seq. ID no. 13609550
  misc_feature (1)..(975): Ortholog of  Ceres SEQ ID NO 15174082 as cited in SEQ ID NO 61896
  misc_feature (1)..(975): Ortholog of  Ceres SEQ ID NO 13655598 as cited in SEQ ID NO 64077
cacacaaatagaaataacttgtaatcaaccaaagtcgaaaaacagagttattttgtcggatcaaaatggtgaagattgagataggaagtgtgggtgactcctttagtgtagcatctcttaaggcttacttgtctgaatttatcgcaactcttctctttgtgtttgctggcgttggctctgctcttgcttttgccaagctcacatccgatgcagccttggaccccgctggtcttgtcgctgtcgctgtggctcacgcctttgcccttttcgttggtgtttccatagccgccaacatctccggcggacaccttaaccccgccgtgacactcggtctcgccgtcggtggcaacatcacagtaataaccggtttcttttactggattgctcaatgccttggctccatcgtcgcgtgtctcctcctcgtcttcgttaccaatggcgagagcgtaccgactcatggagtagcggccggtttaggagctattgaaggagtagtgatggagattgtggtgacctttgctctggtctacacagtctacgccacagcggctgatccaaagaaaggttcactcgggaccattgctccaattgctatcggtttcatcgttggtgccaacatcctcgcagcgggtccctttagcggtggttccatgaacccggccaggtcatttggaccagctgttgtcagtggtgacttctctcagatatggatctactgggtgggtccactagtcggtggtgcacttgctggactcatctacggagacgtcttcatcggatcctacgctccagctcccaccacagaaagctacccttgatcaatcctatagcgttttaatttgcttggcttgctttttgttgtatgaaaatgtttggtcctcgtttcttccaaaaatgaatgattgaatgtggagaaaaagatcaaagttgtactttgtgttggttataaataagaattgtatattttcaaatttt

SEQ ID NO: 102156 - protein, 250 aa, Arabidopsis thaliana; identical to SEQ ID NO: 38676
  peptide (1)..(250): Ceres Seq. ID no. 13609551

SEQ ID NO: 102157 - DNA, 1183 bp, Arabidopsis thaliana
  misc_feature (1)..(1183): Ceres Seq. ID no. 13609552
  misc_feature (1)..(1183): Ortholog of  Ceres SEQ ID NO 14302919 as cited in SEQ ID NO 20338
  misc_feature (1)..(1183): Ortholog of  Ceres SEQ ID NO 13595497 as cited in SEQ ID NO 51127
  misc_feature (1)..(1183): Ortholog of  Ceres SEQ ID NO 14314046 as cited in SEQ ID NO 59316
tctctctctctctataagaaccctagaagaaggtttctcttgtcctccatacacttagcacaactgataaatcttttgaggtaaaatcagctttagatcaaggtttttctagtcatctctactcataaagatcaaagcttttgctattctcattttctaccaagagacaatatcatgatgatgggtaaagaggatttgggtttaagtcttagcttgggatttgcacaaaaccatcctctccagctaaatcttaaacccacttcttcaccaatgtccaatctccagatgtttccatggaaccaaacccttgtttcttcctcagatcaacaaaagcaacagtttcttaggaaaatcgacgtgaacagcttgccaacaacggtggatttggaagaggagacaggagtttcgtctccaaacagtacgatctcgagcacagtgagtggaaagaggaggagtactgaaagagaaggtacctccggtggtggttgcggagatgaccttgacatcactctagatagatcttcctcacgtggaacctccgatgaagaggaagattacggaggtgagacttgtaggaagaagcttagactatccaaagatcaatccgcagttctcgaagacactttcaaagagcacaatactctcaatcccaaacagaagctggctttggctaagaagctaggtttaacagcaagacaagtggaagtgtggttccaaaacagaagagcaaggacaaagttaaagcagaccgaagtggattgcgagtatttgaaaagatgtgttgagaaattaacggaagagaatcggcggctcgagaaagaggcagcggaactaagagcattaaagctttcaccgcggttgtatggtcagatgagtccaccgaccacacttttgatgtgtccatcgtgtgaacgtgtggccggaccatcctcatctaaccacaaccagcgatctgtctcattgagtccatggctccaaatggcccatgggtcaacctttgatgtgatgcgtcctaggtcttaactttaatgctgcttctatgggttgtgtgtgggtcattgtactttttagattattgactctcagctaatgtatccttaaaagcctttttctacttttaaatttactttaatctaattaaattagttattcttgtcttcttgataacaaacaaatttataat

SEQ ID NO: 102158 - protein, 282 aa, Arabidopsis thaliana; identical to SEQ ID NO: 22674
  peptide (1)..(282): Ceres Seq. ID no. 13609553

SEQ ID NO: 102159 - protein, 281 aa, Arabidopsis thaliana; identical to SEQ ID NO: 22675
  peptide (1)..(281): Ceres Seq. ID no. 13609554

SEQ ID NO: 102160 - protein, 280 aa, Arabidopsis thaliana; identical to SEQ ID NO: 22676
  peptide (1)..(280): Ceres Seq. ID no. 13609555

SEQ ID NO: 102161 - DNA, 1127 bp, Arabidopsis thaliana
  misc_feature (1)..(1127): Ceres Seq. ID no. 13609560
  misc_feature (1)..(1127): Ortholog of  Ceres SEQ ID NO 14311579 as cited in SEQ ID NO 51717
atcaaacgtaaacttattgctttcttccttctggtagttccccaaaactcaaagtactctttttctgtgtaaacaaaaaaaaaatcaacggtactctttctcttctaagttgttgttccatggagaagagtttccagaaatcagctctccttgtgaccttgactctcttcttcttcattccagtttcaatctcggttccattcattctgtttcatgggattagagatcaatgctccaatggtggagtgagcagcttcgtacagctccttagcaacctctctagctcccatggatcttgcttagaaataggaaatggagagcaagattcggtgactatgccgcttacgcaacaagcgagtgtagcgtgtgagaaagttaaacagatgaaggatttgagtcaaggctacaacattgttgcacagtctcaaggaaacttggtagctagaggtctaatcgagttttgtgacaatgctcctccggtcttcaactatatatctttaggaggtcctcatgctggcatatccgacattcccaagtgtaattctacactttgcgagttgctgaaaacagcggtctacaccgacttcgtacaagatcatattgctccaagtggttatatcaagattcctacagatataaaagattacctggaacactccaagtatctgccaaagatcaacaacgagagacctaacgaaaggaacaccacttttaaagaccggttcactagcttgcacaacttggtccttgtcatgtttgagggtgatgcagtagtgattcctaaagaaagttcttggttcggatattacccggatggagcttccacacctcttttgtctcctcaacagacaaagctctatactgaggattggattggtctgaaaacattggatgctgccagaaaagttaagtttgtcagtgtccctggcgagcacctaagaatagcgcaagacgacgttgtaaaacacgtcgtgccttacctcaagaaccagcctgcgtctatgagtgaagatttggagatactgcatctatgattgagacttcattgttatgctctcttagaatcaaatttaaaagtgaagaactttagaggctcctttttcttaatcataaatccaaataatttc

SEQ ID NO: 102162 - protein, 304 aa, Arabidopsis thaliana; identical to SEQ ID NO: 36652
  peptide (1)..(304): Ceres Seq. ID no. 13609561

SEQ ID NO: 102163 - protein, 232 aa, Arabidopsis thaliana; identical to SEQ ID NO: 36653
  peptide (1)..(232): Ceres Seq. ID no. 13609562

SEQ ID NO: 102164 - protein, 216 aa, Arabidopsis thaliana; identical to SEQ ID NO: 36654
  peptide (1)..(216): Ceres Seq. ID no. 13609563

SEQ ID NO: 102165 - DNA, 2815 bp, Arabidopsis thaliana
  misc_feature (1)..(2815): Ceres Seq. ID no. 13609564
  misc_feature (1)..(2815): Ortholog of  Ceres SEQ ID NO 13598023 as cited in SEQ ID NO 66487
gcgacgactctttgaagcttccgttgctgacgtggatcactcctctccgccacaaaaacaaaacagaaaaacaaactcagacatgagcaagagctagccgtcactctcactctctgatgtctcacgaattccgatttcaattctaacttaaaccatatttctccgatcaaacatggcgtccgtatctccatctccgtcgtgttccactatacccataccacttcgacgaacatctttcgccgttgctgagttgagacgattaaaacaaagaagagcgatcccacctgtgtccgtcggtctcggacacttcgctgatgttgtacgcaatgacgttgatttcctgaagaacaaaatcggtatcggactccgttgggctaacgaggcttttcgtgtaccggaagtgactaaatccgctgaggaactgttttggcttaggcatcttgaggatcatacttctcagaatttgaagtcacaatcttggcctcagccttcctactcagggctcactggggtggatttgttcatggctgatgtcaaagccttggagacatatgctggttacttttacagtctttctaagatgtggtcaagaccacttcctgaagtttatgattcacaagctgttgcagattactttaattgcaggcctcatgtcgttgcctttaggcttctcgaggtattttctgcgttcacgattgctgccatcagattacgaacatcagcatcagttaagggcaaaagtttagaagcttcagagcagatttttgggatggtgttgaaagaaaccatgctacatttgggcccaacttttatcaaagttggtcaatcgctttccacgaggccagatatcattgggactgaaatctccaaggcactatctgaactgcatgaccgaatccctccctttccctggcctgaggctgtaaaaatccttgaaggggaattaggtggtcctgtcgaatcattctttagtcagttttcgcaagaaactgtagcagcagcatcctttggtcaggtctaccgaggaaggaccctcgatggtgcagatgttgcagtgaaagttcagcgccctgatctgagacatgcagtgctacgcgacatctacattctgcgacttgggttaggtgtattgcgaaaggtagcaaagagagaaaatgacattcgtgtatatgctgatgagcttggaatgggtttggctggagaattggactttactttagaggctgccaatgcctctgaatttcagctcacgcacgattttcctatatccgggttccaaaagtatatcagcatctaacgcgcaaaagagttttgaccatggaatggatggttggtgaaagcccaaccgatctactcgcaatatcttctggttactctgatcatgacaatgagagtcatgagaaacaaaaaattgaagcgagaaggcgtcttcttgatctggtgaacaaaggggtagaggcaactctagttcaactccttgatacaggtattttgcatgcagatccgcatcctggaaaccttcgttacacaacatcaagacaaatagggtttttggactttggtttagtttgtcggatgcaaagaaaacatcagcttgccatgctcgcatcaattgtgcatatcgtaaatggtgattgggcctgtcttgttgaatcgttgattgatatggatgtcatcacgccaggcgttaatacccgtcgttttactctggatctggaatatgcattgggagaggttaaacttataaacgggattcctgatatcgagttcaccaaggtgcttagtaaaatagtcaatgtggccctgaagtatcagctacgcatgccaccatacttcacacttgtcctccgttctcttgcttgcttggaaggtctggctgcagctggagatccaaattttaagacatttgaggcagcatacccttttgtggttcaaaagctcatcactgaaaattcagctgcaacaaggaagattcttcattcgtccttaaccgaaagaaggaattccgatgggaaagggttgctcttttcctgagtaaaagttctacgaggaaacaatcgccactgctaaagttatcaagggatgaaacttctgttgatagtagttccaatctaacggacaaagatgctgacaatgtaagtttggtcttgagacttttggcatccaaaaatggtgtggttcttagaagactcttgatggctgcgaacgggacttcactgatccggacatttatttcaagagaggcacttgtcatacgccagaaactttgcatgacgattgcaactacgatgtaccaatggatggttggaagccttggaattgaatcccttaaattcatttctctttcagacccaccaccatcttcaggaatcaacattacagtcaaagacttcaagattctaatcaatgacaagcgggtcagagtaatactgagaaagatactggagtctgcaaagagtgaccgagttttgatgctcagattctgctggacttcctttgtcatgtctctcaccaccactgcgcttgcttgccatcggtttgtgatctcggtctctgaaggttacgtcaactacttatctctgtctgctccagtcgcacttcgtacctgattacctgaacatcctacaccaacacagaaccagaatcactaatgtatattgttgtcaagacccaaagcaaagggttccttagtaagagggatagattctacagaaagactaaatattttcgtgtatagagtcgttccatatctaatcctatcagacgatcaatgcctgtcgtaacgatatatgactaatcataatatccgagacct

SEQ ID NO: 102166 - protein, 374 aa, Arabidopsis thaliana
  peptide (1)..(374): Ceres Seq. ID no. 13609565
MASVSPSPSCSTIPIPLRRTSFAVAELRRLKQRRAIPPVSVGLGHFADVVRNDVDFLKNKIGIGLRWANEAFRVPEVTKSAEELFWLRHLEDHTSQNLKSQSWPQPSYSGLTGVDLFMADVKALETYAGYFYSLSKMWSRPLPEVYDSQAVADYFNCRPHVVAFRLLEVFSAFTIAAIRLRTSASVKGKSLEASEQIFGMVLKETMLHLGPTFIKVGQSLSTRPDIIGTEISKALSELHDRIPPFPWPEAVKILEGELGGPVESFFSQFSQETVAAASFGQVYRGRTLDGADVAVKVQRPDLRHAVLRDIYILRLGLGVLRKVAKRENDIRVYADELGMGLAGELDFTLEAANASEFQLTHDFPISGFQKYISI

SEQ ID NO: 102167 - protein, 257 aa, Arabidopsis thaliana
  peptide (1)..(257): Ceres Seq. ID no. 13609566
MADVKALETYAGYFYSLSKMWSRPLPEVYDSQAVADYFNCRPHVVAFRLLEVFSAFTIAAIRLRTSASVKGKSLEASEQIFGMVLKETMLHLGPTFIKVGQSLSTRPDIIGTEISKALSELHDRIPPFPWPEAVKILEGELGGPVESFFSQFSQETVAAASFGQVYRGRTLDGADVAVKVQRPDLRHAVLRDIYILRLGLGVLRKVAKRENDIRVYADELGMGLAGELDFTLEAANASEFQLTHDFPISGFQKYISI

SEQ ID NO: 102168 - protein, 238 aa, Arabidopsis thaliana
  peptide (1)..(238): Ceres Seq. ID no. 13609567
MEWMVGESPTDLLAISSGYSDHDNESHEKQKIEARRRLLDLVNKGVEATLVQLLDTGILHADPHPGNLRYTTSRQIGFLDFGLVCRMQRKHQLAMLASIVHIVNGDWACLVESLIDMDVITPGVNTRRFTLDLEYALGEVKLINGIPDIEFTKVLSKIVNVALKYQLRMPPYFTLVLRSLACLEGLAAAGDPNFKTFEAAYPFVVQKLITENSAATRKILHSSLTERRNSDGKGLLFS

SEQ ID NO: 102169 - DNA, 995 bp, Arabidopsis thaliana
  misc_feature (1)..(995): Ceres Seq. ID no. 13609583
  misc_feature (1)..(995): Ortholog of  Ceres SEQ ID NO 13589868 as cited in SEQ ID NO 55521
  misc_feature (1)..(995): Ortholog of  Ceres SEQ ID NO 14312250 as cited in SEQ ID NO 59168
  misc_feature (1)..(995): Ortholog of  Ceres SEQ ID NO 15173326 as cited in SEQ ID NO 63793
  misc_feature (1)..(995): Ortholog of  Ceres SEQ ID NO 12617659 as cited in SEQ ID NO 65286
  misc_feature (1)..(995): Ortholog of  Ceres SEQ ID NO 15179979 as cited in SEQ ID NO 0
atttttaacgctcactggatttataagtagagattttttgtgtctcacaaaaacaaaaaaatcatcgtgaaacgttcgaaggccattttctttggacgaccatcggcgttaaggagagagcttagatctcgtgccgtcgtgcgacgttgttttccggcttgatcaaaatggggttgtcattcggaaagttgttcagcaggctctttgcgaagaaagagatgcgtattctgatggttggtctcgatgctgctggtaagacgactatcctctacaagctcaaacttggagagatcgtcaccactattccaaccattgggttcaacgttgagactgttgaatacaagaacatcagcttcaccgtgtgggatgttgggggtcaagacaagatccgtccattgtggagacattacttccagaacacacagggacttatctttgttgtggacagcaatgatcgtgaccgtgttgttgaagccagggacgagcttcacaggatgctgaatgaggatgaattgagggatgcagttctgcttgtatttgctaacaagcaagatcttcccaacgcgatgaacgctgctgagataactgacaagcttgggcttcattctcttcgtcaacgacactggtacattcagagcacatgtgccacctctggagaaggactctatgagggacttgactggctctccaacaacatcgcaagcaaggcatagatggaatgttagccagattcctcttctgcttgtttggtttacaaatcaaagacagaggtctgtttctctagtactaaaagatttattattatattcttcttcgtcacttatctcaaacgcagatcattttacactttgtacttccccttcaataacttgttacttctctcgtttgcttcctgaatttgagtatatcatttttacatctgcttttcatcaaagcataaagcatctttcgaaacaaaaattgaaccgaatttttctgtaaactgatcaaatgtg

SEQ ID NO: 102170 - protein, 181 aa, Arabidopsis thaliana; identical to SEQ ID NO: 22739
  peptide (1)..(181): Ceres Seq. ID no. 13609584

SEQ ID NO: 102171 - protein, 164 aa, Arabidopsis thaliana; identical to SEQ ID NO: 22740
  peptide (1)..(164): Ceres Seq. ID no. 13609585

SEQ ID NO: 102172 - protein, 160 aa, Arabidopsis thaliana; identical to SEQ ID NO: 22741
  peptide (1)..(160): Ceres Seq. ID no. 13609586

SEQ ID NO: 102173 - DNA, 1295 bp, Arabidopsis thaliana
  misc_feature (1)..(1295): Ceres Seq. ID no. 13609587
  misc_feature (1)..(1295): Ortholog of  Ceres SEQ ID NO 15169248 as cited in SEQ ID NO 55022
  misc_feature (1)..(1295): Ortholog of  Ceres SEQ ID NO 14315042 as cited in SEQ ID NO 56959
  misc_feature (1)..(1295): Ortholog of  Ceres SEQ ID NO 12608620 as cited in SEQ ID NO 60192
  misc_feature (1)..(1295): Ortholog of  Ceres SEQ ID NO 15173077 as cited in SEQ ID NO 64566
  misc_feature (1)..(1295): Ortholog of  Ceres SEQ ID NO 13662898 as cited in SEQ ID NO 66199
aaaataaaagtttctataagaagaaatctcgtctctgtttaattctctctttaacgttttgatccgtttccataagaacataacagagcaagaaaaaaaagaaagcacaagctttgttgttctgaagagaaaacaaacaaaacagagagtttaagacagagagaagctcatggatgtttttgctttcaatgcttctttatccatgtgtaaagatgttgccggaatcgcaggcaacatatttgcatttggactcttcgtttcaccaatgccaacgtttaggaggatcatgaggaacaaatcgacggagcaattctccggtttaccatacatttacgctctcttaaactgcttgatctgcctttggtatggcacacctttcatatcacacagcaatgccatgcttatgactgtgaattccgttggagctacgtttcagctttgctacattatcctcttcatcatgcatacagacaagaagaacaagatgaagatgcttggtttgctttttgtggtgtttgctgtggttggagtgattgtagctggaagtttgcagatacctgaccagctcacacggtggtactttgtcgggttcttgagctgcggttctcttgtttcaatgtttgcctcgccgttgtttgttattaacctagtgattcggactaagagcgttgagtttatgccgttttatctctcgctatcgactttcttgatgagtgcttccttccttctttacgggttattcaacagcgatgcctttgtttatacaccaaatggaataggaacgattcttggcattgtgcagctggctttgtactgttactaccacaggaattctatagaagaagaaacaaaagagcctttgattgtttcttacgtgtgaggttcgcgcaaagaagcaaatttatagtggggaaattaaaagaaaccagaaaatgtggtgacatcaagattctttgttgttgttgttattgttgtctactctgtgtagctcattgtgactatctaccggctttcattctctcatggcgtgaagatgtttattctctctgcttctgtcatgatcgaaggatggaagtctttttcagttttgatggctcaattgctgaagattatgtgaagacacatgacagattcactggtgtacgtgggttttgtttttgtgtggtggaaatctcatggtgggtcgataacgtttgtccatatattgtttgttttttttgaagattactctatttttttgttcataagattttttttctttgatatggaaatctctggtgggttgatttgaagac

SEQ ID NO: 102174 - protein, 236 aa, Arabidopsis thaliana; identical to SEQ ID NO: 36395
  peptide (1)..(236): Ceres Seq. ID no. 13609588

SEQ ID NO: 102175 - protein, 225 aa, Arabidopsis thaliana; identical to SEQ ID NO: 36396
  peptide (1)..(225): Ceres Seq. ID no. 13609589

SEQ ID NO: 102176 - protein, 204 aa, Arabidopsis thaliana; identical to SEQ ID NO: 36397
  peptide (1)..(204): Ceres Seq. ID no. 13609590

SEQ ID NO: 102177 - DNA, 1407 bp, Arabidopsis thaliana
  misc_feature (1)..(1407): Ceres Seq. ID no. 13609597
  misc_feature (1)..(1407): Ortholog of  Ceres SEQ ID NO 15179955 as cited in SEQ ID NO 0
aattccttcctttgccccatttttattttcttcttcatccataataacttcactctctcccccccccccccccccaacatgttcctgtgacgacgatacactctttcactgacttacccctacctcaaaatcaccttcttcttcatcgtctcagctcaggaattgctaactacctgtttttgaatttgagatctgtttttgtttctagaagaaaacagcttgttttcaccgtctctgatcctctgatttgatcggaatctaatgggtaaaaccaccgggaacagagattggactcagatctacgctatttacggaatcgaacaatggcagacactcgtcttccttctcttccatgctttcttcttctctcttctctctcttctcttcctcatctacttcgatcagatttgcttcttcctcgattccttcttcctctccggcgccgccagattagccgcgggtttcaccggtgctgtaaccgctctctccgcggtttgtctactcttcgccgcagctaatttcgtttactcagatgttccgcttcagtacgagatggctcaacgcatggttagctccgtcggtgactggtcttgtgtcaaaactgctctcgatctcggttgtggccgtggtatcctcctcaatgccgtcgctacacagcttaagaaaaccggtagctccggtcgggtcgtcgggttagaccgctctaaacgcaccactctctccactctccgcaccgctaaactcgaaggtgtgcaagagtatgtgacatgccgtgaaggagatgtgaagacgttgccgtttggcgataattacttcgacgtggtggtctcgtcggtgttcgttcacacggtggggaaagagcatggtcagaagtcggtggaagctgcggcggagagaatgagagtgctcggagagattgtgagagttgtgaagccaggaggtttgtgtgtggtttgggatctcttacacgtgccggagtacgtgcgtcgtcttcaagagctaaagatggaagatatacgagtctcggagcgagtcacggcgtttatggccggaagtcacatcgtttcgttccggaaacccagtgaactcgtcgccgggccccgtgaagtccgcctcgattggagatgatgacgtggtgttcaaaacgacagtgatgtgtgtcggttcgttatataaaaaacggcacgtagttgaagaagtctggaggttcgacactataattgtaatatattaattacgaatctactactactacactagaaaatcaaaatgtatgtggcgtctggggaggcgaagcggaaccagatgctttgatgaagaggcataacgctgcgtttgcgtttttgtcttgtatttgtataacctatagtttttattaacatattaagctgaatcttaatatgtgat

SEQ ID NO: 102178 - protein, 288 aa, Arabidopsis thaliana; identical to SEQ ID NO: 29768
  peptide (1)..(288): Ceres Seq. ID no. 13609598

SEQ ID NO: 102179 - protein, 191 aa, Arabidopsis thaliana; identical to SEQ ID NO: 29769
  peptide (1)..(191): Ceres Seq. ID no. 13609599

SEQ ID NO: 102180 - protein, 187 aa, Arabidopsis thaliana; identical to SEQ ID NO: 29770
  peptide (1)..(187): Ceres Seq. ID no. 13609600

SEQ ID NO: 102181 - DNA, 879 bp, Arabidopsis thaliana
  misc_feature (1)..(879): Ceres Seq. ID no. 13609601
  misc_feature (1)..(879): Ortholog of  Ceres SEQ ID NO 13662677 as cited in SEQ ID NO 63824
gtctctttgacttcatcgtcgattaagggagaaagagagagagagtgagagctgagaaaatcaccagaaagctacttgagagagagagatagagataagtgagctctgagaaaatccagcaatggcttcgaagcttgtagtgataattgtgtttatcctcgatctcatcgccgttgggttagccattgccgccgagcagagaagaagtgtcggcaaggttgaaacagacagagacaagcaatatgattactgtgtgtatggtactgacattgctacaagttatggagctggtgcatttgttcttctctttgtaagccaagtccttattatggctgctagtcgttgcttctgttgtggaaagtctcttaaccctggcggttcaagagcttgtgccattattctcttcctcatttgctgggtgtttttcttgatcgctgagatgtgtttgcttgcggcatcaatcagaaatgcgtaccacacacagtatagaaagatgtggaaagttgaagatccaccaagctgtgaagttataaggaaaggagtttttgcagctggtgctgcattcacactcttcaccgccattgtctctcagttctactacgtttgctactctcgtgctagagatgcgtaccagaatccctcctactaaaaatgtcaacttccacagcaagcaaacgtttaagcatcaagagttggaatttgtctttttgtgtttgtttagtattgtccagtgtttagttatcctatcaggatgtttaggttttatgttgtctcttaagcaaacactgatatgttatattctaagattcgtatattgttatgttctctgttgtaatgtgtgaatgaatactaaagaatagaaaaccatgatttgttgtg

SEQ ID NO: 102182 - protein, 175 aa, Arabidopsis thaliana; identical to SEQ ID NO: 35281
  peptide (1)..(175): Ceres Seq. ID no. 13609602

SEQ ID NO: 102183 - protein, 106 aa, Arabidopsis thaliana; identical to SEQ ID NO: 35282
  peptide (1)..(106): Ceres Seq. ID no. 13609603

SEQ ID NO: 102184 - DNA, 1068 bp, Arabidopsis thaliana
  misc_feature (1)..(1068): Ceres Seq. ID no. 13609604
  misc_feature (1)..(1068): Ortholog of  Ceres SEQ ID NO 12609177 as cited in SEQ ID NO 55753
  misc_feature (1)..(1068): Ortholog of  Ceres SEQ ID NO 12609935 as cited in SEQ ID NO 55757
  misc_feature (1)..(1068): Ortholog of  Ceres SEQ ID NO 13594206 as cited in SEQ ID NO 59075
  misc_feature (1)..(1068): Ortholog of  Ceres SEQ ID NO 13654038 as cited in SEQ ID NO 69261
  misc_feature (1)..(1068): Ortholog of  Ceres SEQ ID NO 14309346 as cited in SEQ ID NO 0
aattctaaattaagaatctctctaatctcttcccaaagaagaatcatcactgaggaagaataaaacatttggggagtttcttcgctaatccttcaaggtgtgacctgagaatcacaacacaaaacaatctcactcgaaattcctttgactcatcatcatcaccatgtggagaagaatcgtctcctctcagctcaaaaccctagccgccgatgtcgtcgctgcttctcctcgtcgatcgatagccgccaccaccagacctgtcggtttctatctcgccgccaatcgatcagccatttccgcatcttctttcgttatccctcgtcgtttcagctccgattcagtagagactcctgcgacgaagaaggtggaggatgtaatgcccattgcgactggacacgagaaggaagagcttgaagctgaacttgagggaaggaggctggatgatattgacttccctgaaggtccttttggaactaaggaagctcctgctattgtgaagtcctactatgacaagcgaattgtgggctgccctggtggtgaaggcgaggacgagcacgatgttgtctggttctggctggagaaaggaaagtcctttgaatgcccggtttgcactcagtactttgagctggaagtggttggtcctggtggtcctccggatggtcacggtgacgaagacgatgagcaccaccactgattccggcctctcccttgccgcaaatttttctttttttatttgcacattttcatatctttaaaaattttatgaatggaataaaacaaaatatctaccgttttggtgaaacacagttgaaaatgttttttgatctttttagaacaagactcggcatcagagtttcccaagtgccaaaactcttatgaccgttgtttttatttttgtaacactcttgaatcagaatcagaatcattcttggcttttgcttattatatgattcaccttttatttatttttatggttcgatgtcttttcatatagggacgttttgatcgtgtccttgattccttgtgaacggtcatataattcaatagattatagaaattccaattttc

SEQ ID NO: 102185 - protein, 176 aa, Arabidopsis thaliana; identical to SEQ ID NO: 22693
  peptide (1)..(176): Ceres Seq. ID no. 13609605

SEQ ID NO: 102186 - protein, 105 aa, Arabidopsis thaliana; identical to SEQ ID NO: 22694
  peptide (1)..(105): Ceres Seq. ID no. 13609606

SEQ ID NO: 102187 - DNA, 1169 bp, Arabidopsis thaliana
  misc_feature (1)..(1169): Ceres Seq. ID no. 13609620
  misc_feature (1)..(1169): Ortholog of  Ceres SEQ ID NO 15170609 as cited in SEQ ID NO 52683
aagaacaacagaaaatttcaaaatggtttctcagataatctcgtgtttatctcaatcttcgtctcttctatgtttatccgattcaaggaggttaattcttccgaagacttgtacttacggcggtttgagccggttttctccaggatttgctagccgccggttatttacggttaatcggaagaaatggagatcggcctgcattttcaactctggaaaggaacctggaggagagggaaagttacaaggaggtagctcagagtggccgatacttcagagatgggaagttccatggggatggcagacagtttcgttaacttcgtttgcttgtgcactaagttttgttttgacaggattaaccgagatggcagtcataccgtttttaggaatcgacgttgagaaactgaccttggacgataaggcggagattttgttcctggatcaaggcctaacaaccgcggtggtacttgctgtcatattcactgttgccaaaaccttcgacccacttcctgaagatattcttcgctatgatttgagacaacccgtcaacctgcaaaaaggatggcttgtgtggggtggaatcggtctggttggtgctgttggtgctattgcgttaacaggtgttgttttatccgtgttcaggacagaagcacctgaaagggaggtagactctttgatgaagcttcttccattaattggatcctcaaacataagcaccttaagcttagtgggcataactggaatccttgctccacttctggaggagaccgtgtttcgcggattcttcatggtctctcttaccaaatgggtcccgaccccaatagcgatcatcatcagctcagctgcgtttgcccttgcccatttcacacctggtgaattcccgcagctgtttattctaggaagtgttttgggattatcatatgcacaaacccgcaatctcattaccccaatggtcatacacggtttctggaactcgggagttattttgctactcacttttcttcagatccaagggtatgacattaaggagctattgcaggcaaactagctctgagccatgctctttgtgctgtccgcatttaacatcaaaaagcttcattatgtgctcgatgttagtaagatattttgtattcgagaacagatttcatacttaatgcaatttgggttttggt

SEQ ID NO: 102188 - protein, 347 aa, Arabidopsis thaliana
  peptide (1)..(347): Ceres Seq. ID no. 13609621
RTTENFKMVSQIISCLSQSSSLLCLSDSRRLILPKTCTYGGLSRFSPGFASRRLFTVNRKKWRSACIFNSGKEPGGEGKLQGGSSEWPILQRWEVPWGWQTVSLTSFACALSFVLTGLTEMAVIPFLGIDVEKLTLDDKAEILFLDQGLTTAVVLAVIFTVAKTFDPLPEDILRYDLRQPVNLQKGWLVWGGIGLVGAVGAIALTGVVLSVFRTEAPEREVDSLMKLLPLIGSSNISTLSLVGITGILAPLLEETVFRGFFMVSLTKWVPTPIAIIISSAAFALAHFTPGEFPQLFILGSVLGLSYAQTRNLITPMVIHGFWNSGVILLLTFLQIQGYDIKELLQAN

SEQ ID NO: 102189 - protein, 340 aa, Arabidopsis thaliana
  peptide (1)..(340): Ceres Seq. ID no. 13609622
MVSQIISCLSQSSSLLCLSDSRRLILPKTCTYGGLSRFSPGFASRRLFTVNRKKWRSACIFNSGKEPGGEGKLQGGSSEWPILQRWEVPWGWQTVSLTSFACALSFVLTGLTEMAVIPFLGIDVEKLTLDDKAEILFLDQGLTTAVVLAVIFTVAKTFDPLPEDILRYDLRQPVNLQKGWLVWGGIGLVGAVGAIALTGVVLSVFRTEAPEREVDSLMKLLPLIGSSNISTLSLVGITGILAPLLEETVFRGFFMVSLTKWVPTPIAIIISSAAFALAHFTPGEFPQLFILGSVLGLSYAQTRNLITPMVIHGFWNSGVILLLTFLQIQGYDIKELLQAN

SEQ ID NO: 102190 - protein, 227 aa, Arabidopsis thaliana; identical to SEQ ID NO: 23346
  peptide (1)..(227): Ceres Seq. ID no. 13609623

SEQ ID NO: 102191 - DNA, 1042 bp, Arabidopsis thaliana
  misc_feature (1)..(1042): Ceres Seq. ID no. 13609632
  misc_feature (1)..(1042): Ortholog of  Ceres SEQ ID NO 13594298 as cited in SEQ ID NO 57803
  misc_feature (1)..(1042): Ortholog of  Ceres SEQ ID NO 13503476 as cited in SEQ ID NO 61978
  misc_feature (1)..(1042): Ortholog of  Ceres SEQ ID NO 12578438 as cited in SEQ ID NO 62201
  misc_feature (1)..(1042): Ortholog of  Ceres SEQ ID NO 12617675 as cited in SEQ ID NO 64656
aaaacacaacatgaagattatgtgggaaacagcagttgtgttttgtctctgttcgttgtctttggtttcttcacacagcaggaaattcacaacaccaaacgtgacacgcctcacagatcaattcagtaagatcgccattgaaaatggcttctccagacgtttcggagctcacaatattcaggtcaatggctccctcgctaagctcactctcgacaaatcctccggagctgggttggtgtcaaagaacaagtatcactatggtttcttcagtgcaagactcaagcttcccgctggatttgcctctggtgttgtggttgctttctatttatcaaacgcagagacttatccgaaaagccacgacgagatagacatagaattgttgggtagaagtaggagagatgattggacgatccagacgaatgtatatgcaaatggaagtactagaacgggaagagaagagaagttttatttttggttcgatccaacgcaagcctttcacgactataccctcatttggaactcccaccatactgtatttttggtagacaacattccggttaggcagtttccaaaccggggagccttcacaagcgcgtacccgtctaaaccgatgtctctatacgtcaccgtttgggacggttcagagtgggccactaaaggtggtaagtaccccgtcaactacaagtacgcccctttcgtggtttccgttgctgacgtggagttaagtggctgttccgttaacaacggctcctctaccgggtccgggccatgtaccaagtcgggcgggtcgatttcgagtctggaccctgttgatggtcaggattttgccacgttgtcgaagaatcagatcaatgccatggattgggctaggagaaagctgatgttctattcttattgcagtgataagccaagatacaaagtcatgcctgctgagtgcaactgatttttttttttgttaaaacacacattgttactttctattgttttatgatataattttacgtaggatattagaggtttaaagtatgtttcaaacttcgcc

SEQ ID NO: 102192 - protein, 313 aa, Arabidopsis thaliana
  peptide (1)..(313): Ceres Seq. ID no. 13609633
KHNMKIMWETAVVFCLCSLSLVSSHSRKFTTPNVTRLTDQFSKIAIENGFSRRFGAHNIQVNGSLAKLTLDKSSGAGLVSKNKYHYGFFSARLKLPAGFASGVVVAFYLSNAETYPKSHDEIDIELLGRSRRDDWTIQTNVYANGSTRTGREEKFYFWFDPTQAFHDYTLIWNSHHTVFLVDNIPVRQFPNRGAFTSAYPSKPMSLYVTVWDGSEWATKGGKYPVNYKYAPFVVSVADVELSGCSVNNGSSTGSGPCTKSGGSISSLDPVDGQDFATLSKNQINAMDWARRKLMFYSYCSDKPRYKVMPAECN

SEQ ID NO: 102193 - protein, 310 aa, Arabidopsis thaliana
  peptide (1)..(310): Ceres Seq. ID no. 13609634
MKIMWETAVVFCLCSLSLVSSHSRKFTTPNVTRLTDQFSKIAIENGFSRRFGAHNIQVNGSLAKLTLDKSSGAGLVSKNKYHYGFFSARLKLPAGFASGVVVAFYLSNAETYPKSHDEIDIELLGRSRRDDWTIQTNVYANGSTRTGREEKFYFWFDPTQAFHDYTLIWNSHHTVFLVDNIPVRQFPNRGAFTSAYPSKPMSLYVTVWDGSEWATKGGKYPVNYKYAPFVVSVADVELSGCSVNNGSSTGSGPCTKSGGSISSLDPVDGQDFATLSKNQINAMDWARRKLMFYSYCSDKPRYKVMPAECN

SEQ ID NO: 102194 - protein, 307 aa, Arabidopsis thaliana
  peptide (1)..(307): Ceres Seq. ID no. 13609635
MWETAVVFCLCSLSLVSSHSRKFTTPNVTRLTDQFSKIAIENGFSRRFGAHNIQVNGSLAKLTLDKSSGAGLVSKNKYHYGFFSARLKLPAGFASGVVVAFYLSNAETYPKSHDEIDIELLGRSRRDDWTIQTNVYANGSTRTGREEKFYFWFDPTQAFHDYTLIWNSHHTVFLVDNIPVRQFPNRGAFTSAYPSKPMSLYVTVWDGSEWATKGGKYPVNYKYAPFVVSVADVELSGCSVNNGSSTGSGPCTKSGGSISSLDPVDGQDFATLSKNQINAMDWARRKLMFYSYCSDKPRYKVMPAECN

SEQ ID NO: 102195 - DNA, 1578 bp, Arabidopsis thaliana
  misc_feature (1)..(1578): Ceres Seq. ID no. 13609636
  misc_feature (1)..(1578): Ortholog of  Ceres SEQ ID NO 14304000 as cited in SEQ ID NO 53798
  misc_feature (1)..(1578): Ortholog of  Ceres SEQ ID NO 14303568 as cited in SEQ ID NO 65364
aaatcaatcataatgttttcgaattttttggaaagcttatacgatggaatcggagacgatgacgccgccgacgacgacgaagacaacaacaacgacgagaaaaccccgaaagcctcaacggaaagacacgatttctcgagaaacgccgttcgtttgtcaccggaagaggaggctcaagcgcgtggggttaaagatgatttgacggaacttggtcataccctcacgcgtcaatttcgtggtgtggctaactttctcgctccgttacctgatggatcttcttcttcttcctccgatctatcgaaccatcccaggtttaaccaatctcggtcttcagatcctggattgaatcaatcgcgttcttcagatcgggacgaatcgtgtgttggaagtgatacgccggagactggaattaggtttaggagctgggatttagaagaaaaattggcagaaggcaatgatccggaggatgaggaagaagaagaagaggaaacagatgaagaagaagaagaagaagaagagatcgctgcggttgctcttacagacgaagtgctagcatttgcgaggaacatagcaatgcatccagaaacttggttggattttcctcttgatcctgacgaagatcttgatgatttggaaatgagtgatgctcaaagaggtcatgctttagctattgagcgtcttgctccgaggttagctgcattgagaatagagctttgtccatgtcatatgagtgttggttacttctggaaagtctattttgttcttcttctttcaaggctcaataaacacgatgctcatcttttgtcttctccacaggtgatggaagctagagcattgtggatgaaagagcttcagaatcagacacattcttcaaaagaaagtagagatatgattcttgaggaagaagatattacaccatcaacttctaattactacaaccatgctcctcctgagtttctttctccaagaatatatgcttttgaacctccttcgattatgtatcgcgattttgaacacgggtttgaaaacgctcagttcatcgataaagctgttattgaggaaaaaccaatccagaagaacgacaaaaatagtgcaagccttagccaaacatctaaagatgttgttgatgatgatgatgatgattggccagaagaagaagattctgctaattcttgggctccaatgtttacagtgaatgaggatgatgtttctttcagtgatcttgaaggagacgacgatataagtagcttagcactcaagtctaagattacatcaaagggcacagaccaaaaaggaacatgaaacatcatctggcttgttgctttgccctgcctcacgagatcgaatcaatagaattgaacataagtactgtgtgctgagtcaaatcgtggaagtcttttgggtgagtttgattgttttgtggatttatgatgtttgctctcaaagagaaggaagaaagaaagaaaaaggttttgattgaaacatgtacagaagatttactttgacactgcaatttcattgtaatgttctctctcgccaaatgtaatgaaatattgaaaagcactatttcattcgcgt

SEQ ID NO: 102196 - protein, 433 aa, Arabidopsis thaliana
  peptide (1)..(433): Ceres Seq. ID no. 13609637
KSIIMFSNFLESLYDGIGDDDAADDDEDNNNDEKTPKASTERHDFSRNAVRLSPEEEAQARGVKDDLTELGHTLTRQFRGVANFLAPLPDGSSSSSSDLSNHPRFNQSRSSDPGLNQSRSSDRDESCVGSDTPETGIRFRSWDLEEKLAEGNDPEDEEEEEEETDEEEEEEEEIAAVALTDEVLAFARNIAMHPETWLDFPLDPDEDLDDLEMSDAQRGHALAIERLAPRLAALRIELCPCHMSVGYFWKVYFVLLLSRLNKHDAHLLSSPQVMEARALWMKELQNQTHSSKESRDMILEEEDITPSTSNYYNHAPPEFLSPRIYAFEPPSIMYRDFEHGFENAQFIDKAVIEEKPIQKNDKNSASLSQTSKDVVDDDDDDWPEEEDSANSWAPMFTVNEDDVSFSDLEGDDDISSLALKSKITSKGTDQKGT

SEQ ID NO: 102197 - protein, 429 aa, Arabidopsis thaliana; identical to SEQ ID NO: 21038
  peptide (1)..(429): Ceres Seq. ID no. 13609638

SEQ ID NO: 102198 - protein, 242 aa, Arabidopsis thaliana; identical to SEQ ID NO: 21039
  peptide (1)..(242): Ceres Seq. ID no. 13609639

SEQ ID NO: 102199 - DNA, 1404 bp, Arabidopsis thaliana
  misc_feature (1)..(1404): Ceres Seq. ID no. 13609659
  misc_feature (1)..(1404): Ortholog of  Ceres SEQ ID NO 14311407 as cited in SEQ ID NO 54067
  misc_feature (1)..(1404): Ortholog of  Ceres SEQ ID NO 14313107 as cited in SEQ ID NO 58915
  misc_feature (1)..(1404): Ortholog of  Ceres SEQ ID NO 15226556 as cited in SEQ ID NO 67908
atttccctttttctctgtaattttcaattcccaaaataaagaagctttcgtttctctctcgcattgacccttcttctccagttttatgttttgcctctctcccacttctgtaaataatcttctcacatccccgcacgattattctctagccgatcaacgaacacagagacgctaatgtatttgactcgattcgaatcattagtcctctaatcacaccgattgatttccacccacagatttcttgtctgaaatttagggttagcgaaggtttggatcaatgatgcaaggtgaagtacaattgcagccaccggattcacagaaactaagtgattccgctcctttgttaggagatcacaccaattcttcttcggcgtctccttctgctgcgtctgtggtggcaggaaatagcgatgagataaaggctgaagaagatttagagaacgatgcttcttcagctccttgttgtcgtatttgtttggaggacgatagtgaattgttaggcgatgaattgatttcaccttgtatgtgtaaaggcactcaacaattcgtgcatcgctcatgtctcgatcattggcgatcggttaaagaaggttttgctttctctcactgtactacttgcaaagcacagtttcatctgagagtcgaaccctttgaggataacaattcgtggcgtagaaaagctaaattcagactctttgtcgcaagagatgtgcttttggttttcttagctgtgcagactgttatcgctgtgatggccggattcgcatatatgatggacaaagacggagagtttcgcaactctttcaacgatgattgggatcgtattttgtcgaaacatcccatcccgttttattactgcattggggttatatccttctttgtgctgactggatttcttggaatcattctacattgctctgctctcaacggtaatgacccgaggatggctggatgccagaactgctgttatggatggggtgtcttggattgtttccctgcttcaatggaagcttgtttcgctcttgttgttgtttttgtcgtcatctttgccattcttggtttagcgtatgggtttcttgctgcaactatggctatccaaaggatatggcagagacattaccatattctcaccaagcgagagctcacaaaggagtacattgtggaggatcttcacggaagttacactcccccgaagctggatgcagagcacgaaggaagactgaaaatgctgaaacttctgtgaccgtgttttttaactgtcaaataaaggttgtaaggagtttcgggcacatgagagagacgagttcatacgtatatgttcacagagtgtctttcttttctttatcatgcgatgaaaagtacctaatggatattttgtcttatatatatttattataattatgg

SEQ ID NO: 102200 - protein, 321 aa, Arabidopsis thaliana; identical to SEQ ID NO: 25506
  peptide (1)..(321): Ceres Seq. ID no. 13609660

SEQ ID NO: 102201 - protein, 320 aa, Arabidopsis thaliana; identical to SEQ ID NO: 25507
  peptide (1)..(320): Ceres Seq. ID no. 13609661

SEQ ID NO: 102202 - protein, 239 aa, Arabidopsis thaliana; identical to SEQ ID NO: 25508
  peptide (1)..(239): Ceres Seq. ID no. 13609662

SEQ ID NO: 102203 - DNA, 1824 bp, Arabidopsis thaliana
  misc_feature (1)..(1824): Ceres Seq. ID no. 13609682
  misc_feature (1)..(1824): Ortholog of  Ceres SEQ ID NO 13594037 as cited in SEQ ID NO 55666
  misc_feature (1)..(1824): Ortholog of  Ceres SEQ ID NO 13657707 as cited in SEQ ID NO 66407
aaagaatcattttacctctaaagccaaagaccaacatgtctaattcaaaccaaccacttctttccaaaccaaagtctcttaagcacaagaatctatgccttgtcctctccttcgtagccattcttggctctgtggctttcttcacagcccaattaatctccgttaacaccaacaataatgatgattccttattaactacgagccagatttgccatggagctcacgaccaagactcatgccaagctctcttgtccgaattcacgacgttgtcgctctcaaagctcaaccgccttgacctattgcacgtgtttttgaagaactcggtgtggcggcttgagagcacgatgaccatggtgagcgaggctaggatccgctcgaacggtgttagagacaaggcaggttttgctgactgcgaggagatgatggacgtatcaaaggatcggatgatgagttcgatggaggaacttcgcggaggaaactataatcttgagtcatactcaaacgttcatacttggctgagcagtgtgcttacaaactacatgacatgtttagaaagtattagtgatgtctccgtcaactctaagcaaatagtcaagccacaactcgaggacttggtttctagggcaagagtggctctagccatctttgtctccgtcttgcctgccagagacgatctcaaaatgatcatttccaatcgcttcccgtcgtggctaactgctcttgacagaaagcttttagaatcttctcccaagacacttaaggtgaccgcgaacgttgtggtggcaaaagacggcaccggaaagttcaaaacagtgaatgaggcagtggcggcagcaccggagaacagcaatacaagatacgttatatacgtaaagaaaggggtttacaaagaaactattgacataggaaagaaaaagaagaacttaatgcttgttggtgatggcaaagacgcaacgatcataaccggtagtttgaatgtcattgatggatccaccaccttcagatcagccactgttgctgccaatggagacgggtttatggcacaagacatatggttccaaaacactgcagggccggcaaagcaccaggctgtggctctacgagtgagtgctgatcaaactgttataaatcgttgtcgcatagatgcgtatcaagacacgctctacactcacacgttgagacaattctaccgcgacagctacatcaccggtaccgtagatttcatcttcggaaactctgctgtggtattccagaactgcgacatcgtggcacgaaatcctggagctgggcaaaagaacatgttaacggctcaaggacgggaggatcagaaccagaacaccgccatttcgatccaaaaatgtaagataacggctagttcggatcttgctcctgtaaaaggatctgtgaaaacgttccttggtcgaccgtggaagttgtactcaagaacagtgatcatgcagtctttcattgacaaccacattgacccggctggttggttcccatgggatggtgagtttgcgctctccacattgtattatggagagtatgcaaataccggtcctggagcggatacgagtaagagagtgaattggaagggatttaaagttattaaagactcaaaagaggccgaacaattcactgtggcgaagcttattcaaggaggattatggttgaaacccactggagttactttccaagagtggctttgattttaatgtctacttgttcttgtactttgtgttgtgttacctctgttttagtttgatgtattttttctggtttgttttgtatgacttacccaataaataacatgctctgtttcgc

SEQ ID NO: 102204 - protein, 568 aa, Arabidopsis thaliana
  peptide (1)..(568): Ceres Seq. ID no. 13609683
RIILPLKPKTNMSNSNQPLLSKPKSLKHKNLCLVLSFVAILGSVAFFTAQLISVNTNNNDDSLLTTSQICHGAHDQDSCQALLSEFTTLSLSKLNRLDLLHVFLKNSVWRLESTMTMVSEARIRSNGVRDKAGFADCEEMMDVSKDRMMSSMEELRGGNYNLESYSNVHTWLSSVLTNYMTCLESISDVSVNSKQIVKPQLEDLVSRARVALAIFVSVLPARDDLKMIISNRFPSWLTALDRKLLESSPKTLKVTANVVVAKDGTGKFKTVNEAVAAAPENSNTRYVIYVKKGVYKETIDIGKKKKNLMLVGDGKDATIITGSLNVIDGSTTFRSATVAANGDGFMAQDIWFQNTAGPAKHQAVALRVSADQTVINRCRIDAYQDTLYTHTLRQFYRDSYITGTVDFIFGNSAVVFQNCDIVARNPGAGQKNMLTAQGREDQNQNTAISIQKCKITASSDLAPVKGSVKTFLGRPWKLYSRTVIMQSFIDNHIDPAGWFPWDGEFALSTLYYGEYANTGPGADTSKRVNWKGFKVIKDSKEAEQFTVAKLIQGGLWLKPTGVTFQEWL

SEQ ID NO: 102205 - protein, 557 aa, Arabidopsis thaliana; identical to SEQ ID NO: 22605
  peptide (1)..(557): Ceres Seq. ID no. 13609684

SEQ ID NO: 102206 - protein, 454 aa, Arabidopsis thaliana; identical to SEQ ID NO: 22606
  peptide (1)..(454): Ceres Seq. ID no. 13609685

SEQ ID NO: 102207 - DNA, 1771 bp, Arabidopsis thaliana
  misc_feature (1)..(1771): Ceres Seq. ID no. 13609686
  misc_feature (1)..(1771): Ortholog of  Ceres SEQ ID NO 14311183 as cited in SEQ ID NO 58495
  misc_feature (1)..(1771): Ortholog of  Ceres SEQ ID NO 13502874 as cited in SEQ ID NO 66298
  misc_feature (1)..(1771): Ortholog of  Ceres SEQ ID NO 12614124 as cited in SEQ ID NO 68392
actctaaacttgttcaaaactctgactaacattcttcttcacttatctcccatctttctctcttcaataataataaacatggatctcaccgacgtaatcatattcttgttcgctctctatttcatcaacctatggtggcgccggtacttttccgccggaagcagccagtgtagcttgaacattccaccgggaccaaaaggatggccactagtcggaaacctactccaagtcatattccaacgtcgccatttcgtcttcttaatgcgtgacctacgtaaaaagtatggtccaatattcaccatgcagatgggacaacgtacgatgattatcatcacggacgaaaaactcatccacgaggcactagtccaacgcggccctacattcgcttcccggcctccggactcgccgatccggctcatgtttagtgttgggaaatgcgctataaactcggcggagtacggatctttgtggaggactctgaggaggaactttgtgacagagctagtgaccgcgccgagagtgaagcagtgctcgtggataaggagttgggctatgcagaatcatatgaagaggattaaaacggagaatgttgagaaaggtttcgtggaggttatgagccaatgtaggctaacgatttgtagtatcttgatctgtctttgtttcggtgccaagatcagcgaggaaaagattaagaacattgagaatgttcttaaggacgttatgcttataacttctccgacgttacctgactttttgccggttttcactccgttgtttcggcgtcaagttagagaagctagagagctgaggaagacgcagctcgagtgtctcgtgccgttgataagaaaccgtcgtaagttcgttgatgcaaaggagaatcctaacgaagagatggttagtccgattggtgcagcttatgtggattctttgtttcgtttgaacttgatcgagagaggtggtgagcttggagatgaagagattgtgactttgtgctcggagattgtctctgccggtacggacacgagtgcaacgacgcttgaatgggcgttatttcatctagtgactgaccaaaacattcaagagaagttatatgaggaagttgttggagttgttggcaaaaacggcgtcgttgaagaggatgacgtggcgaaaatgccttatttagaagccatcgtgaaagagactctccgacgacatcctccgggacattttcttctctctcacgccgccgtgaaagacacggagctaggagggtatgatattccggcaggggcgtatgtggaaatttacactgcttgggttactgagaacccggatatttggtcggatcctggtaagtttcgacccgagaggtttttaaccggtggggacggggttgatgctgactggacggggacacgtggtgttacaatgttgccttttggtgcgggtcgtaggatctgcccggcttggtctttagggattctgcacatcaacttgatgcttgcaaggatgatccattcgtttaaatggatcccggttccggattctccacccgacccgactgagacgtacgccttcacggtcgttatgaaaaattctctcaaagcgcaaatcaggtcaaggacctaacggatatgtttagtttttgtaagcgtgtggggtaattaaaagttataattccttagtacgtcacattaatctttgctatttttaatgttgtttatgtctatctttatctattctcaaggagtgtaaaatatatataatcatatgcagtttctgttccttc

SEQ ID NO: 102208 - protein, 536 aa, Arabidopsis thaliana; identical to SEQ ID NO: 40997
  peptide (1)..(536): Ceres Seq. ID no. 13609687

SEQ ID NO: 102209 - protein, 510 aa, Arabidopsis thaliana; identical to SEQ ID NO: 40998
  peptide (1)..(510): Ceres Seq. ID no. 13609688

SEQ ID NO: 102210 - protein, 449 aa, Arabidopsis thaliana; identical to SEQ ID NO: 40999
  peptide (1)..(449): Ceres Seq. ID no. 13609689

SEQ ID NO: 102211 - DNA, 1173 bp, Arabidopsis thaliana
  misc_feature (1)..(1173): Ceres Seq. ID no. 13609694
  misc_feature (1)..(1173): Ortholog of  Ceres SEQ ID NO 13582332 as cited in SEQ ID NO 59890
  misc_feature (1)..(1173): Ortholog of  Ceres SEQ ID NO 13598278 as cited in SEQ ID NO 68456
atgacggcggatcaagaactacaaatcattgttcggcagggaaaagaaccaaatccaacagttcaagatgaaagaaattcagtcagtagcagccaagcagaagtatctcactctaacacatacaaacggtggctcagggtgactttatatacattctttgtcatttcaggccaaacagttgctacaattttgggcagagtatactatgacaacggaggaaacagtaaatggctagcaacggtagttcaacttgttggctttcctgtgctacttccatattatatcttgtcatttaaaacacatgcaacaactgatagagatggaaaaagaacctcacctaggaaccgtgtattggtttacgtagtgcttggacttcttgtaggagcagattgctatctgtactccattggacttctttacttacccgtttctacctattccctgatctgtgcatctcagttagccttcaatgctttcttctcttattttcttaactcacaaaaacttacccctatcattttaaattctcttttcctcctaactatatcttccaccctacttgcattcaataatgaggagacagactccacaaaagttacaaaaggagagtatgtcaaaggtttcatatgcaccgttgctgcgtctgctggttatggtctagtcttatccctacaacagctagcctttctaaaagtcctaaagaagcaaaatttctcagaagttatggatatgataatctacgtgagtctagtggccagttgtgttagcgtggtggggctttttgctagcagtgagtggaaaactttgagcagtgaaatggataactacaaacatgggaaggtatcctacattatgaacctagtgtggacagctgttacctggcaggtattctccatcggtggcacaggactgatcttcgagctctcctctctattctcaaatgcaataagcgttttgggactcccagtggttcctatcttggctgtaatcattttccatgacaaaatgaatgggttaaaggtgatttctatgatcctagctatttggggtttcacttcctatgtctaccaacaatatcttgatgacaaaaacttgaagaaaaatcatgaaatcacaacaacagaatcccctgacccaccagaagcagaagagtcaacttggcaatcaaaataa

SEQ ID NO: 102212 - protein, 390 aa, Arabidopsis thaliana
  peptide (1)..(390): Ceres Seq. ID no. 13609695
MTADQELQIIVRQGKEPNPTVQDERNSVSSSQAEVSHSNTYKRWLRVTLYTFFVISGQTVATILGRVYYDNGGNSKWLATVVQLVGFPVLLPYYILSFKTHATTDRDGKRTSPRNRVLVYVVLGLLVGADCYLYSIGLLYLPVSTYSLICASQLAFNAFFSYFLNSQKLTPIILNSLFLLTISSTLLAFNNEETDSTKVTKGEYVKGFICTVAASAGYGLVLSLQQLAFLKVLKKQNFSEVMDMIIYVSLVASCVSVVGLFASSEWKTLSSEMDNYKHGKVSYIMNLVWTAVTWQVFSIGGTGLIFELSSLFSNAISVLGLPVVPILAVIIFHDKMNGLKVISMILAIWGFTSYVYQQYLDDKNLKKNHEITTTESPDPPEAEESTWQSK

SEQ ID NO: 102213 - DNA, 1190 bp, Arabidopsis thaliana
  misc_feature (1)..(1190): Ceres Seq. ID no. 13609719
  misc_feature (1)..(1190): Ortholog of  Ceres SEQ ID NO 13582388 as cited in SEQ ID NO 56812
  misc_feature (1)..(1190): Ortholog of  Ceres SEQ ID NO 14305353 as cited in SEQ ID NO 57710
caacataactcttttgcttaagcctcaaaaaattgtcattaacccaatttcccagaaacttcaaaaacagttgggggaagaagaagaagatgaaacgacgaagaacccttttataaagtctcaatcttctaatccaagatctgccctttttcagattctatctcaaagctttcctcgatcttgtgatgtattgaagccggagactgagagagatgttgtgcttcaaaggctcggttaagcggaagaagcaatccggttctgttccggtttatctgaatgtctacgatctaactcctatgaatgcttatggttattggcttggacttggtgtttttcattctggtgttgaagttcatggagttgaatatgcatttggagcacatgaatcatcaagcacaggtatttttgaagtggaaccaaagaagtgtcctggtttcacgtttaggaaatcgattcttgtggggaaaaccgacttggttgcgaaagaagttcgtgtttttatggagaaattagctgaagagtatcaaggaaacaagtaccatctcatcacaaggaactgcaaccatttttgcaatgaagtttgtcttaaacttgctcagaaatcaatccctagatgggtgaatcgacttgctcgcttaggggttctctgcaactgtgtgttaccacctcgtttgaacgaggcaaaagtgagacgagtaggaaaaggagagctttcggaaagtgagaagaagaaactaagaaaccgatcacgatcagatcctttactgtcttcttctccgtcttcatcgacacctgataatcatcgttcacacattcgagcaaaatcaagtggtaatcatccttcttcttcttcttcttcgtcttcgggttctaagaaaaatcgaagacctaaagctcaagaccagaagtcgccaagcgtaagcatcaagacttgattgttatcatcattatttgaacatttaattattgtttatgaaaaggacaaaaagtaaaaagacaagaacagaggaacatgccaagcaaagtatcaatcatatatggggcatgctcgtgctttgttctaaggttattgaaaacctttttgggtgtgtagatcatttttctttgtacaattgcttataggagagagagaggtcatgagtatgtacaaaaagaatatgattcatatatttttctatgttttatctctc

SEQ ID NO: 102214 - protein, 240 aa, Arabidopsis thaliana; identical to SEQ ID NO: 29436
  peptide (1)..(240): Ceres Seq. ID no. 13609720

SEQ ID NO: 102215 - protein, 212 aa, Arabidopsis thaliana; identical to SEQ ID NO: 29437
  peptide (1)..(212): Ceres Seq. ID no. 13609721

SEQ ID NO: 102216 - protein, 144 aa, Arabidopsis thaliana; identical to SEQ ID NO: 29438
  peptide (1)..(144): Ceres Seq. ID no. 13609722

SEQ ID NO: 102217 - DNA, 1254 bp, Arabidopsis thaliana
  misc_feature (1)..(1254): Ceres Seq. ID no. 13609733
  misc_feature (1)..(1254): Ortholog of  Ceres SEQ ID NO 14313074 as cited in SEQ ID NO 59199
  misc_feature (1)..(1254): Ortholog of  Ceres SEQ ID NO 13655506 as cited in SEQ ID NO 64493
atttggttttgttgccccaaaatatcccaagaaaagatcaacttcttcttcttaccaaaactgtcggcgtcgtctcctctaagctcctcccatggaagcagaagaaggtcatcagcgtgaccgcctctgcgactattgcgactcctccgtggctcttgtctactgcaaagctgactccgccaagctctgcctcgcctgcgacaagcaagtccacgtcgccaaccaactcttcgccaaacacttcaggtcacttctctgcgactcctgcaacgaatctccctcttcccttttctgcgagactgaaaggtctgttctttgccagaactgcgactggcaacaccacaccgcctcttcctcccttcatagccgcagaccctttgaaggatttaccggctgtccctccgtgcctgagttgctggccatcgttggcctcgatgacctcactctcgattccggattgctttgggagtcacctgagatcgttagcctcaacgaccttattgtttcgggcgggtcgggtactcataacttccgggccacggatgttcctcctctgcctaagaatcgtcacgccacctgcgggaaatacaaagatgagatgatccgacagctccgtggactatccagatctgagcctggttgtctgaaatttgaaaccccagatgctgagatcgatgccgggttccaattcctagcgccggatttgttttctacatgcgagctggagagtggactgaaatggttcgatcagcaagatcatgaggactttccatattgctctctgctaaagaacttgtcggagtcagatgagaaacctgagaatgtagaccgagagtcatcggtgatggttcccgtttccggctgcttaaaccgatgtgaggaagagactgtgatggttccggttatcactagtacaaggtcgatgacacatgagatcaacagtcttgagaggaactctgctctctctcgctacaaagaaaagaagaagtctcgaaggtacgagaaacacatcaggtatgaatcacgcaaggttcgtgcagaaagcaggacaagaatcaggggacgtttcgccaaggcagcagatccatgaatgatgatgaggttactttgataatcaaaaatcttttgtattaatcgaatcatatagtgtgtatgatcagataagtttttgtattctaagcttaggagttatcactgtatatcgaccacactctcaaaattgtcacttaagaatagttttttttttgttttgcc

SEQ ID NO: 102218 - protein, 332 aa, Arabidopsis thaliana
  peptide (1)..(332): Ceres Seq. ID no. 13609734
MEAEEGHQRDRLCDYCDSSVALVYCKADSAKLCLACDKQVHVANQLFAKHFRSLLCDSCNESPSSLFCETERSVLCQNCDWQHHTASSSLHSRRPFEGFTGCPSVPELLAIVGLDDLTLDSGLLWESPEIVSLNDLIVSGGSGTHNFRATDVPPLPKNRHATCGKYKDEMIRQLRGLSRSEPGCLKFETPDAEIDAGFQFLAPDLFSTCELESGLKWFDQQDHEDFPYCSLLKNLSESDEKPENVDRESSVMVPVSGCLNRCEEETVMVPVITSTRSMTHEINSLERNSALSRYKEKKKSRRYEKHIRYESRKVRAESRTRIRGRFAKAADP

SEQ ID NO: 102219 - protein, 199 aa, Arabidopsis thaliana
  peptide (1)..(199): Ceres Seq. ID no. 13609735
LVLLPQNIPRKDQLLLLTKTVGVVSSKLLPWKQKKVISVTASATIATPPWLLSTAKLTPPSSASPATSKSTSPTNSSPNTSGHFSATPATNLPLPFSARLKGLFFARTATGNTTPPLPPFIAADPLKDLPAVPPCLSCWPSLASMTSLSIPDCFGSHLRSLASTTLLFRAGRVLITSGPRMFLLCLRIVTPPAGNTKMR

SEQ ID NO: 102220 - DNA, 777 bp, Arabidopsis thaliana
  misc_feature (1)..(777): Ceres Seq. ID no. 13609746
  misc_feature (1)..(777): Ortholog of  Ceres SEQ ID NO 14309373 as cited in SEQ ID NO 0
gttttccttaagagcttcatcgtcatcatccgagaattggagcagagatacgaagatttggcgaaaaatggggagcgagccaacaaaagtgatggtggcggtgaacgcttcgacgatcaaagactatcctaacccttcgattagctgcaaaagagcattcgaatggactctggagaagatcgtaaggtccaacacttccgatttcaagattctcttgctccacgtacaagtcgtcgacgaagacggttttgatgacgtggatagcatttatgcttcccctgaggatttccgagacatgagacaatctaacaaggcaaaaggtcttcaccttctcgagtttttcgttaataaatgtcatgagattggggttggttgcgaggcctggattaagacaggtgatcccaaggatgtcatatgccaagaagtgaagcgagttcgaccagattttctggtcgtgggaagtcgtggacttggccggtttcaaaaggtctttgtggggactgtgagtgcgttctgtgtgaaacatgcggagtgtccagttatgacgatcaaacgcaatgccgatgaaactcccagtgatccagctgatgactaaacaataacaacgtcccttccttctttgatctatacagagagagagtgcttttgtgtgtacaaaatccaaattcctacccctatatgtatttgtatctgtgtatgtatgtgtgtgtgcagcttgttccgttttctgaattggttttcaaactgaaccaaactgctatatatttggtttctttg

SEQ ID NO: 102221 - protein, 197 aa, Arabidopsis thaliana; identical to SEQ ID NO: 39014
  peptide (1)..(197): Ceres Seq. ID no. 13609747

SEQ ID NO: 102222 - protein, 175 aa, Arabidopsis thaliana; identical to SEQ ID NO: 39015
  peptide (1)..(175): Ceres Seq. ID no. 13609748

SEQ ID NO: 102223 - protein, 167 aa, Arabidopsis thaliana; identical to SEQ ID NO: 39016
  peptide (1)..(167): Ceres Seq. ID no. 13609749

SEQ ID NO: 102224 - DNA, 1293 bp, Arabidopsis thaliana
  misc_feature (1)..(1293): Ceres Seq. ID no. 13609750
  misc_feature (1)..(1293): Ortholog of  Ceres SEQ ID NO 13659644 as cited in SEQ ID NO 67118
  misc_feature (1)..(1293): Ortholog of  Ceres SEQ ID NO 14302856 as cited in SEQ ID NO 68824
aaaacttccgtatcctggagagtaaattcctttatggctacgaatgggttaatggcgtcgtccagtgtgtttcttcatcgcccgcgtatcgcatttgcttctagaacgaatcagactgtaggaaaatacggtaaaggccgtgttagtttcatgggcattgggacacgtcgtcttccggtggttttatccatgacggcgatggcggattccggtgaggaggccgtgaaatctgttttgcctggaaatggcatatccatcatggtgaatggatgtagtggcaaaatggggaaagctgtaattaaagcagcagactctgcaggagtaaatattgttcccatatcgtttggatctgctggtgaggatggtcagagagttgaggtctgtggaaaggagattactgtgcacggtccaactgaaagagaaaaggttctttcttcggtgtttgagaagcacccggagctaattgttgtcgactacacaattccctctgcagtaaatgataatgcggagctgtatagcaaagtaggtgttcctttcgtcatgggaacaactggtggagataggaacaaattgtatgaaactgttgaggaagcaaagatttatgctgtgatttctccacagatgggtaaacaggttgtagcatttcttgcggccatggagatcatggctgagcagtttccgggagccttttctggttattccttggatgtgatggagtctcatcaagctagcaaattggatgcatccggaacagcaaaagctgttatttcttgcttccaggaattgggtgtgtcttacgacatggatcagatacaattgattcgggatccaaaacagcaagtggagatggtgggtgtacctgaggagcatatctctggtcacgctttccatctttatcacttgacatcacccgatgaaactgtctccttcgagttccagcacaatgtctgcggccgatcaatttatgctgagggtactgttgatgccgtgctcttcctcgccaaaaagattcgattgaaagcagatcagcgaatctacaacatgatcgatgtcttgagagagggaaatatgcgttgagctttcgagttttgccagtgcattgaccaaatggtggttgtagaagagctgagattagatttaccaaatcatcagctgtgaaaattagatgtttggtttcccacttcttctgccttgagcacaggcttttgaaattccttggtatatacaagaacttgccattgtattgttcatgttttgacctctttacctcaatgttattctcctttctggatc

SEQ ID NO: 102225 - protein, 358 aa, Arabidopsis thaliana; identical to SEQ ID NO: 28449
  peptide (1)..(358): Ceres Seq. ID no. 13609751

SEQ ID NO: 102226 - protein, 347 aa, Arabidopsis thaliana; identical to SEQ ID NO: 28450
  peptide (1)..(347): Ceres Seq. ID no. 13609752

SEQ ID NO: 102227 - protein, 341 aa, Arabidopsis thaliana; identical to SEQ ID NO: 28451
  peptide (1)..(341): Ceres Seq. ID no. 13609753

SEQ ID NO: 102228 - DNA, 1593 bp, Arabidopsis thaliana
  misc_feature (1)..(1593): Ceres Seq. ID no. 13609767
  misc_feature (1)..(1593): Ortholog of  Ceres SEQ ID NO 14311535 as cited in SEQ ID NO 51559
  misc_feature (1)..(1593): Ortholog of  Ceres SEQ ID NO 15176200 as cited in SEQ ID NO 55188
aaggatgttgcaagtacggtggtcctggttacgcgactcctctcgccgctatgtctggtccatcggagaaacttatctacgtaaccgccgtctacaccggaactggaatagataaaccggattatttggcgacggtggatgtagatccaagctcgccttcgtattcaagtgttattcatagattaccaatgccttttgttggtgatgagcttcatcattctggttggaactcttgtagttcttgccatggtgatgcttctgttgatagacgttatctcgtgttaccgtctcttatatctggtcgcatttatgcgattgatactaaggaaaacccgagggctccgtctttgtataagtatgttgatcctaaagagattgctgataagactggattggcgtttcctcacacggctcattgcctcgccacgggcgagatcttggtgtcctgtcttggagatgaagaggggaatgctaaggggaatgggtttcttcttcttgactctgattttaacatcaagaataggtgggagaaaccaggacatagtcctttgtatgggtatgatttttggtaccaacctcggcacaagaccatgatcagcacatcttggggagcacctaaagccttctctaaaggtttcaatcttcagcacgttgctgatggcttgtatggaagtcatctacatgtttatagttggccaggaggtgaaataaaacaattaattgaccttggaccgactggtctcttacctttggagattagattcttgcatgatccatctaaagatacagggtttgttgggagtgccttgtcgagtaatatgataagatttttcaagaacagtgatgaaacatggagccatgaggttgttatatcggttaaaccgttgaaagtcgaaaactggatacttccagaaatgccggggctaatcaccgacttcttgatctccctcgatgaccgatttatttactttgtgaactggctccatggagacattcgtcagtacaacatagaggaccctaaaaaccctgtattaacagggcaaatttgggttggaggattactacaaaagggcagtcctgttaaggcggttggagaagacggaaacactttccaattcgaggttcctcagatcaaggggaaatctttacgaggtggacctcaaatgattcagctgagcctcgatgggaaacgattgtatgcaacaaactcgctgtttagcgcatgggatcgtcagttttatcctgaaatcatggagaaaggctcacacataattcagattgatgttgatacagaaaaaggtggtctcaccataaaccctgatttctttgtggactttggtgatgaaccagacggtccttcactagcccacgagatgagatatccaggtggagactgcacttccgatatctggatttgaatttggctttgtttagagtgtgttttgtgttaagtttaaattgagttttattatttgttgtgtgtttagtagagttgaataaaaaagggagtaagatgactcagacaattaacacttgtttgtacattttgactcctatgtgtcttaagtaataaaactttctacaattcgactt

SEQ ID NO: 102229 - protein, 471 aa, Arabidopsis thaliana
  peptide (1)..(471): Ceres Seq. ID no. 13609768
GCCKYGGPGYATPLAAMSGPSEKLIYVTAVYTGTGIDKPDYLATVDVDPSSPSYSSVIHRLPMPFVGDELHHSGWNSCSSCHGDASVDRRYLVLPSLISGRIYAIDTKENPRAPSLYKYVDPKEIADKTGLAFPHTAHCLATGEILVSCLGDEEGNAKGNGFLLLDSDFNIKNRWEKPGHSPLYGYDFWYQPRHKTMISTSWGAPKAFSKGFNLQHVADGLYGSHLHVYSWPGGEIKQLIDLGPTGLLPLEIRFLHDPSKDTGFVGSALSSNMIRFFKNSDETWSHEVVISVKPLKVENWILPEMPGLITDFLISLDDRFIYFVNWLHGDIRQYNIEDPKNPVLTGQIWVGGLLQKGSPVKAVGEDGNTFQFEVPQIKGKSLRGGPQMIQLSLDGKRLYATNSLFSAWDRQFYPEIMEKGSHIIQIDVDTEKGGLTINPDFFVDFGDEPDGPSLAHEMRYPGGDCTSDIWI

SEQ ID NO: 102230 - protein, 455 aa, Arabidopsis thaliana; identical to SEQ ID NO: 77464
  peptide (1)..(455): Ceres Seq. ID no. 13609769

SEQ ID NO: 102231 - protein, 409 aa, Arabidopsis thaliana; identical to SEQ ID NO: 77465
  peptide (1)..(409): Ceres Seq. ID no. 13609770

SEQ ID NO: 102232 - DNA, 1296 bp, Arabidopsis thaliana
  misc_feature (1)..(1296): Ceres Seq. ID no. 13609771
  misc_feature (1)..(1296): Ortholog of  Ceres SEQ ID NO 13647395 as cited in SEQ ID NO 20370
aactctctcgtctctctctattgttgattaaaatggaagtgatatggatgttcttaatctgttgcatctttggtatcataattataagtcatagcaatgactttgtcgaagctaagagcctttctaaagttgaagatttagaaatcgagaagagactaaggactatcaacaaacctgctgtcaagatcatcaagagtatagatggagaaagatacggatgtgtggatttcttcaagcaaccagcatttgatcacccttcaatgaagaatcacacataccattacaagatgcgtccaatatggaaaggaatgagagaaagaaagacaaacaataccaattttggttacctatgggagaatggtgtgggttgtcccattggtaccgtccccatgcaaagagtcactaaagaagatctattgagattagactcatttggcgataattataaacctcgtggctcttggaattataccactgatgattctaatagtaacaaccagaaacattttgcggtggctcggacggttggctcagacaagaggttcaatggagcaacaatggatctttgtttaaccgctcctaaggttaggctaaaccaatacagtgcttctcgacttcacattcagattggaaatgatttcctccaaaccggctttactgtaaatccaacattgtacaaggacagccaacctcggactttcgtctatacaaaatcaggtgaaaaatcatgttacaatagctactgcgacgttggaatgatacttgttcgtcaagatattccacttggtatggcattatcgccagtgtctgttcgtggtgctaggacaactcattatggagtcttcggtctaattaaggaccaaataaatggaaattggtggttgcaatttggtaatgctgcagaggaaattggattttggccgtcgagtaggtttcatcaaagctctggaaatttggtggagtggggtggagaagtgtacagcgcatcactgccgagtcctcaaatgggatttgggtattttgttgatggtcaaatgcgctacgatgcatatatcaaacggatatctgtaatcgacggttttaataagattgaccgcaaagtggcatataccgaaaaatttgtggacgacactcgtggctaccaagttatagacaaatacaatattcccggatactcaatactcggtcatataatgttttacggtggtccggggaatctctgaatatggttaattacatctctgtgaaatgaaaattaataaaacattacattgacttgattatacaataaatatc

SEQ ID NO: 102233 - protein, 406 aa, Arabidopsis thaliana
  peptide (1)..(406): Ceres Seq. ID no. 13609772
LSRLSLLLIKMEVIWMFLICCIFGIIIISHSNDFVEAKSLSKVEDLEIEKRLRTINKPAVKIIKSIDGERYGCVDFFKQPAFDHPSMKNHTYHYKMRPIWKGMRERKTNNTNFGYLWENGVGCPIGTVPMQRVTKEDLLRLDSFGDNYKPRGSWNYTTDDSNSNNQKHFAVARTVGSDKRFNGATMDLCLTAPKVRLNQYSASRLHIQIGNDFLQTGFTVNPTLYKDSQPRTFVYTKSGEKSCYNSYCDVGMILVRQDIPLGMALSPVSVRGARTTHYGVFGLIKDQINGNWWLQFGNAAEEIGFWPSSRFHQSSGNLVEWGGEVYSASLPSPQMGFGYFVDGQMRYDAYIKRISVIDGFNKIDRKVAYTEKFVDDTRGYQVIDKYNIPGYSILGHIMFYGGPGNL

SEQ ID NO: 102234 - protein, 396 aa, Arabidopsis thaliana
  peptide (1)..(396): Ceres Seq. ID no. 13609773
MEVIWMFLICCIFGIIIISHSNDFVEAKSLSKVEDLEIEKRLRTINKPAVKIIKSIDGERYGCVDFFKQPAFDHPSMKNHTYHYKMRPIWKGMRERKTNNTNFGYLWENGVGCPIGTVPMQRVTKEDLLRLDSFGDNYKPRGSWNYTTDDSNSNNQKHFAVARTVGSDKRFNGATMDLCLTAPKVRLNQYSASRLHIQIGNDFLQTGFTVNPTLYKDSQPRTFVYTKSGEKSCYNSYCDVGMILVRQDIPLGMALSPVSVRGARTTHYGVFGLIKDQINGNWWLQFGNAAEEIGFWPSSRFHQSSGNLVEWGGEVYSASLPSPQMGFGYFVDGQMRYDAYIKRISVIDGFNKIDRKVAYTEKFVDDTRGYQVIDKYNIPGYSILGHIMFYGGPGNL

SEQ ID NO: 102235 - protein, 391 aa, Arabidopsis thaliana
  peptide (1)..(391): Ceres Seq. ID no. 13609774
MFLICCIFGIIIISHSNDFVEAKSLSKVEDLEIEKRLRTINKPAVKIIKSIDGERYGCVDFFKQPAFDHPSMKNHTYHYKMRPIWKGMRERKTNNTNFGYLWENGVGCPIGTVPMQRVTKEDLLRLDSFGDNYKPRGSWNYTTDDSNSNNQKHFAVARTVGSDKRFNGATMDLCLTAPKVRLNQYSASRLHIQIGNDFLQTGFTVNPTLYKDSQPRTFVYTKSGEKSCYNSYCDVGMILVRQDIPLGMALSPVSVRGARTTHYGVFGLIKDQINGNWWLQFGNAAEEIGFWPSSRFHQSSGNLVEWGGEVYSASLPSPQMGFGYFVDGQMRYDAYIKRISVIDGFNKIDRKVAYTEKFVDDTRGYQVIDKYNIPGYSILGHIMFYGGPGNL

SEQ ID NO: 102236 - DNA, 1139 bp, Arabidopsis thaliana
  misc_feature (1)..(1139): Ceres Seq. ID no. 13609779
  misc_feature (1)..(1139): Ortholog of  Ceres SEQ ID NO 15175048 as cited in SEQ ID NO 59975
  misc_feature (1)..(1139): Ortholog of  Ceres SEQ ID NO 13597333 as cited in SEQ ID NO 63974
  misc_feature (1)..(1139): Ortholog of  Ceres SEQ ID NO 13599307 as cited in SEQ ID NO 0
  misc_feature (1)..(1139): Ortholog of  Ceres SEQ ID NO 15179517 as cited in SEQ ID NO 0
gtgtcactgttgctgttgccttggttgggttcggtttaaagttcgtggccaaacagtaaccttgagtcttgccgtcctctgtcatctatccacgcctgaacccgaaaaactctgaaagctgagctctggtaatggcgggtttagcaatttcacctcctctcggtctttccttctcttctcgaactcgaaaccctaaacccacttcctttctatctcacaatcaaaggaatcctataagacgtatagtttctgctctacagagtccatatggagattctctgaaagctggactttctagtaatgtttctggatccccaataaagattgacaacaaggctccaagatttggagtgatagaggcgaaaaagggaaaccccccagtaatgccttcagtgatgacccctggaggacctttagacctctcttctgtgttattccgtaaccgcataatcttcatcgggcaaccaattaacgcacaggttgctcagcgagtcatatctcagcttgtaacccttgcatctattgatgataaatccgacatcctgatgtacttgaattgtcccggtggcagtacttactccgtcctagcaatttatgactgtatgtcttggataaagcctaaagttggaacagtggcgtttggagtagctgcaagccaaggagcacttcttcttgctggaggtgaaaaaggaatgcgctatgcaatgccaaatactcgtgtcatgatacatcaaccacaaactggatgcggaggacatgtagaggacgtgaggagacaggtcaatgaagccatcgaagcccgacaaaaaattgacaggatgtatgcagctttcactggacaacctctggagaaagtgcagcaatacactgaaagagatcgtttcttatcagcatctgaggcgcttgagttcgggctcattgatggtctattggaaacagaatactgaagcagcatacaggacaatgcacaacaacagctcattgcaatgttcaaagcttccattttcatttgaatatgaacggttgtaactgatatttgtgcataaatcagtttggttttcttggttttattgtctactaaacagaatgagaaaactaaactgtttatttttttactgaaaaatctgaaagttgtgttc

SEQ ID NO: 102237 - protein, 271 aa, Arabidopsis thaliana; identical to SEQ ID NO: 22328
  peptide (1)..(271): Ceres Seq. ID no. 13609780

SEQ ID NO: 102238 - protein, 187 aa, Arabidopsis thaliana; identical to SEQ ID NO: 22329
  peptide (1)..(187): Ceres Seq. ID no. 13609781

SEQ ID NO: 102239 - protein, 183 aa, Arabidopsis thaliana; identical to SEQ ID NO: 22330
  peptide (1)..(183): Ceres Seq. ID no. 13609782

SEQ ID NO: 102240 - DNA, 1014 bp, Arabidopsis thaliana
  misc_feature (1)..(1014): Ceres Seq. ID no. 13609794
  misc_feature (1)..(1014): Ortholog of  Ceres SEQ ID NO 14308320 as cited in SEQ ID NO 59093
  misc_feature (1)..(1014): Ortholog of  Ceres SEQ ID NO 12590628 as cited in SEQ ID NO 0
aaagctgtgaccagaagatcagtgattgttcgatgaacgaagaggagccagacaaagaacacgtggcggattctactatgtcggcggcggcgattgatggtgtggcggctctgagatcggtgtttcagcgggtaaaccaggcggcggagaaagcgggtcgtgggtcggatcagatacgggtcgtagcggtgagtaagacgaaaccagtttctctgattcgccaagtatacgacgctggtcagaggtcttttggagagaattatgtgcaagagatcattgagaaggcacctcagcttccagaagatatagagtggcatttcattgggaatttgcagagcaacaaagtgaagcctttgctatctggtgttcctaaccttgtgaccgtggaaagtgttgatgatgaaaagattgcaaatatgcttgatcgtgtggttggtaatatcggaagaaagcccttgaaggtatttgtccaagtgaataccagtggtgaagactctaaattcggcgtggaaccctcgggatgcgtaggactggcgaaacacgtgaaggaagcttgctcgaatcttgagttttctggtttgatgacaatagggatggctgattacacttcaaccccagagaatttcaagttgcttgcgaaatgcagaagtgaagtgtgtaaggagcttggaataccggaggagcaatgtgagctatctatggggatgtctggtgactttgaactagcaattgaactgggaagcacaaatgtgagaataggatctactattttcggggcgagagagtatcctaagaagtaatgatgtaaactactgagtgatgagattgattctaagtttgaacatcaaaaccagtttcagggaagaataagagcttaggttttaatgttgaaatcatgtagatcttctctcttcttttgttttgcattgtatttggtgatgttgcttgtaagttgtaaccaaggtacattattactatttttctaatttcatggatataaacacatgaaagaag

SEQ ID NO: 102241 - protein, 265 aa, Arabidopsis thaliana
  peptide (1)..(265): Ceres Seq. ID no. 13609795
SCDQKISDCSMNEEEPDKEHVADSTMSAAAIDGVAALRSVFQRVNQAAEKAGRGSDQIRVVAVSKTKPVSLIRQVYDAGQRSFGENYVQEIIEKAPQLPEDIEWHFIGNLQSNKVKPLLSGVPNLVTVESVDDEKIANMLDRVVGNIGRKPLKVFVQVNTSGEDSKFGVEPSGCVGLAKHVKEACSNLEFSGLMTIGMADYTSTPENFKLLAKCRSEVCKELGIPEEQCELSMGMSGDFELAIELGSTNVRIGSTIFGAREYPKK

SEQ ID NO: 102242 - protein, 255 aa, Arabidopsis thaliana
  peptide (1)..(255): Ceres Seq. ID no. 13609796
MNEEEPDKEHVADSTMSAAAIDGVAALRSVFQRVNQAAEKAGRGSDQIRVVAVSKTKPVSLIRQVYDAGQRSFGENYVQEIIEKAPQLPEDIEWHFIGNLQSNKVKPLLSGVPNLVTVESVDDEKIANMLDRVVGNIGRKPLKVFVQVNTSGEDSKFGVEPSGCVGLAKHVKEACSNLEFSGLMTIGMADYTSTPENFKLLAKCRSEVCKELGIPEEQCELSMGMSGDFELAIELGSTNVRIGSTIFGAREYPKK

SEQ ID NO: 102243 - protein, 240 aa, Arabidopsis thaliana
  peptide (1)..(240): Ceres Seq. ID no. 13609797
MSAAAIDGVAALRSVFQRVNQAAEKAGRGSDQIRVVAVSKTKPVSLIRQVYDAGQRSFGENYVQEIIEKAPQLPEDIEWHFIGNLQSNKVKPLLSGVPNLVTVESVDDEKIANMLDRVVGNIGRKPLKVFVQVNTSGEDSKFGVEPSGCVGLAKHVKEACSNLEFSGLMTIGMADYTSTPENFKLLAKCRSEVCKELGIPEEQCELSMGMSGDFELAIELGSTNVRIGSTIFGAREYPKK

SEQ ID NO: 102244 - DNA, 1531 bp, Arabidopsis thaliana
  misc_feature (1)..(1531): Ceres Seq. ID no. 13609798
  misc_feature (1)..(1531): Ortholog of  Ceres SEQ ID NO 15173355 as cited in SEQ ID NO 61844
acctttctttctctctttctctcaaaatccaaaatgttgtaatttgcaattcttcagtttccgtttctctcctgagaaatttattgacttcaaaaaccctaaaaagacttgtgattgttcgtttctctaactcgaatgttgatcgtacgacggtgagtgatcgtagtacaatgacgaagaaatcacagccgcagattccgcctccattgtcccgtcgcggcggcgtcgtgtggctgggatggaaactcgtaatcgctttctccgtcgcgctttgccttcttgctcttcttcgaatccaactacagtacaattccttcacgacattgtcgtttccactctccgtcgcgagatctcagacaccgcttcacaaatactccggtgatcgtcccaagctcgctttccttttcttagctcgccgtgatctcccacttgattttatgtgggatagattcttcaagggagtggatcatgcgaatttctcaatttatatacattcagtacctggtttcgtgttcaatgaagaaactacacgatcacagtatttctataatcgccaattgaacaatagcattaaggtagtatggggagaatcaagcatgattgaagcagaaagattgttgcttgcatctgctttagaggatcactccaatcaaagatttgttcttctctctgacagatgtgctccattatatgactttggctatatatacaaatatcttatctcttcaccgaggagttttgtggatagttttcttcatactaaagagacacggtacagtgtgaaaatgtctcctgtcatacctgaagagaaatggcgaaaaggatcccagtggatagctttgatcagaagtcatgcagaggtcattgtaaatgatggtatcgtattcccagtttttaaggaattctgcaagagatgtccacctttaggtaccaatgaggcatggttgtttcttaaacagaagcgacgcaactgcatccccgatgaacactatgtgcaaacattgcttacgatgcaaggactagagagtgaaatggaacgaagaacagtgacatacactgtatggaacgtttcaggtacaaaatatgaagccaaatcttggcatcccgtcactttcacattggaaaactccggccctgaggaaataaaagaaataaagaaaatagaccatgtctattacgagtctgaatctcgaacggaatggtgtaaggcggattcgaaacccgtcccatgctttctctttgcaaggaagttcacgaatgaagctgctatgcgcattgtgagtgaaggactaataggatcatcagcaaacaaaaccttataactttgcaacagtgtaagcaagtaggtcaagcaacagagcgtatacatagagtaggaatagcattgatacattacaaacatccctcatgaggtttaatggtttatgattatatatgacgcttagtaaaaactaataatcattcttcatggataatcttgtgtttgggtgttaaaatttctatgtgtatatgtctgaagaaactggcttcg

SEQ ID NO: 102245 - protein, 439 aa, Arabidopsis thaliana
  peptide (1)..(439): Ceres Seq. ID no. 13609799
LSFSLSLKIQNVVICNSSVSVSLLRNLLTSKTLKRLVIVRFSNSNVDRTTVSDRSTMTKKSQPQIPPPLSRRGGVVWLGWKLVIAFSVALCLLALLRIQLQYNSFTTLSFPLSVARSQTPLHKYSGDRPKLAFLFLARRDLPLDFMWDRFFKGVDHANFSIYIHSVPGFVFNEETTRSQYFYNRQLNNSIKVVWGESSMIEAERLLLASALEDHSNQRFVLLSDRCAPLYDFGYIYKYLISSPRSFVDSFLHTKETRYSVKMSPVIPEEKWRKGSQWIALIRSHAEVIVNDGIVFPVFKEFCKRCPPLGTNEAWLFLKQKRRNCIPDEHYVQTLLTMQGLESEMERRTVTYTVWNVSGTKYEAKSWHPVTFTLENSGPEEIKEIKKIDHVYYESESRTEWCKADSKPVPCFLFARKFTNEAAMRIVSEGLIGSSANKTL

SEQ ID NO: 102246 - protein, 383 aa, Arabidopsis thaliana; identical to SEQ ID NO: 43231
  peptide (1)..(383): Ceres Seq. ID no. 13609800

SEQ ID NO: 102247 - protein, 294 aa, Arabidopsis thaliana; identical to SEQ ID NO: 43232
  peptide (1)..(294): Ceres Seq. ID no. 13609801

SEQ ID NO: 102248 - DNA, 1761 bp, Arabidopsis thaliana
  misc_feature (1)..(1761): Ceres Seq. ID no. 13609817
  misc_feature (1)..(1761): Ortholog of  Ceres SEQ ID NO 14307257 as cited in SEQ ID NO 54628
gcagcagcaaatactatcatcacccatctccttagttctattttataattcctcttctttttgttcatagctttgtaattatagtcttatttctctttaaggctcaataagaggagatgggtgaaaccgctgccgccaataaccaccgtcaccaccaccatcacggccaccaggtctttgacgtggccagccacgatttcgtccctccacaaccggcttttaaatgcttcgatgatgatggccgcctcaaaagaactgggactgtttggaccgcgagcgctcatataataactgcggttatcggatccggcgttttgtcattggcgtgggcgattgcacagctcggatggatcgctggccctgctgtgatgctattgttctctcttgttactctttactcctccacacttcttagcgactgctacagaaccggcgatgcagtgtctggcaagagaaactacacttacatggatgccgttcgatcaattctcggtgggttcaagttcaagatttgtgggttgattcaatacttgaatctctttggtatcgcaattggatacacgatagcagcttccataagcatgatggcgatcaagagatccaactgcttccacaagagtggaggaaaagacccatgtcacatgtccagtaatccttacatgatcgtatttggtgtggcagagatcttgctctctcaggttcctgatttcgatcagatttggtggatctccattgttgcagctgttatgtccttcacttactctgccattggtctagctcttggaatcgttcaagttgcagcgaatggagttttcaaaggaagtctcactggaataagcatcggaacagtgactcaaacacagaagatatggagaaccttccaagcacttggagacattgcctttgcgtactcatactctgttgtcctaatcgagattcaggatactgtaagatccccaccggcggaatcgaaaacgatgaagaaagcaacaaaaatcagtattgccgtcacaactatcttctacatgctatgtggctcaatgggttatgccgcttttggagatgcagcaccgggaaacctcctcaccggttttggattctacaacccgttttggctccttgacatagctaacgccgccattgttgtccacctcgttggagcttaccaagtctttgctcagcccatctttgcctttattgaaaaatcagtcgcagagagatatccagacaatgacttcctcagcaaggaatttgaaatcagaatccccggatttaagtctccttacaaagtaaacgttttcaggatggtttacaggagtggctttgtcgttacaaccaccgtgatatcgatgctgatgccgttttttaacgacgtggtcgggatcttaggggcgttagggttttggcccttgacggtttattttccggtggagatgtatattaagcagaggaaggttgagaaatggagcacgagatgggtgtgtttacagatgcttagtgttgcttgtcttgtgatctcggtggtcgccggggttggatcaatcgccggagtgatgcttgatcttaaggtctataagccattcaagtctacatattgatgattatggaccatgaacaacagagagagttggtgtgtaaagtttaccatttcaaagaaaactccaaaaatgtgtatattgtatgttgttctcatttcgtatggtctcatctttgtaataaaatttaaaacttatgttataaattataaaaccgtgtgttttc

SEQ ID NO: 102249 - protein, 493 aa, Arabidopsis thaliana; identical to SEQ ID NO: 40482
  peptide (1)..(493): Ceres Seq. ID no. 13609818

SEQ ID NO: 102250 - protein, 409 aa, Arabidopsis thaliana; identical to SEQ ID NO: 40483
  peptide (1)..(409): Ceres Seq. ID no. 13609819

SEQ ID NO: 102251 - protein, 376 aa, Arabidopsis thaliana; identical to SEQ ID NO: 40484
  peptide (1)..(376): Ceres Seq. ID no. 13609820

SEQ ID NO: 102252 - DNA, 2491 bp, Arabidopsis thaliana
  misc_feature (1)..(2491): Ceres Seq. ID no. 13609821
  misc_feature (1)..(2491): Ortholog of  Ceres SEQ ID NO 15170768 as cited in SEQ ID NO 52641
atggagaacacagacgtcgtctcgggtctgcataatttcttgagtaaaccctccgccaaagatttcatcaaatcaatcaaaagtttcattgtttcgatcttgaacactgcaccagaccctgaaaaagattgtgatgcagttcaggacttcttttacaagatggagtctgctttcagggctcatccactttggtctggttgttccgatgatgagttagacaatgcgggagatggcctggagaagtatgtcatgacaaagttatttccccgggtttttgcatcaaacaccgaggatgttatatccgatgagaaactctttcagaagatttccttggttcaacagttcatatctcctgaaaacttggatatacaaccaacttttcaaaaccaaacatcttggcttctagctcaaaaagagctccagaagataaatatgtacaatgctcctcgtgataagcttatgtgtatccttaggtgctgcaaagtcattaataacttacttctaaatgcttcaattgcttcaaaccagaatgaacctggagctgaccaatttcttcctgttctcatatatgttaccattaaggctaaccctccccagtttcactcaaacttgttgtatatacaaagatataggcgtcaatctaaactggttggcgaagctggctacttattcaccaacatactctctgcagagtcattcatctcaaatattgatgcaaaatccctctccatggatgaagctgactttgaaactaaaatgaaatctgcacatgcacgtctttctggtccgggaagccagtcttatcaaacggatcacggtgctgcattacccactgctcataatactaagagggaaaacatgcttctgcatacaaaatcaactgatagtttctctggtaccaatgaaacactgagtgaaacaccaataaagaaagctgaccccattaccgatttggaaaataagggcgctgctacgcttttgaatgatagaagtgaggcaaccaaaatatttcaagaatatccttacatgtttgccagtgttggtgatttaaagataggagatgttgaagacttgcttaataattataaacagctagttttcaaatatgtttgcctttccaaaggcttgggtgatgcaacatctttaactccatgcatttcaccattgcaagcgtctaaagtctctgagaatcatacaacattgtcttcagattttcaaacgaaaagcgaaactgacaggagcgttgataatttgtttcgagctctacaagggtattattgtaatttcgcttcattttctgctcctctgccattcccacaccactcagaggaacagagcttaacggcgactatggaagggattggactgcgaagttgcggagatgatattctccgtctcggattcaagctacgcggtggtaccggtggccggattcagattctccagcgagctatggtgataaaaatgagagaccgtagcaagaacaggaaaccattgcagagaggacgaatgctcagtatcgaagcgattcaagcggttcaagccctgaagcgagccaatccacttcttcctcctcctcccgttccttctacttccacgacttcttcttcctcagctctgcttgatcgtgtaatcatttctaaattccgtcggctcttgaaattcgatatggtcgccgttctcagagaacttctacgccaaaacgagtgctctctagctctcaaggtttttgaagagattagaaaggagtattggtacaagcctcaggtgagaatgtacacagatatgatcactgtaatggcggataatagtttgatggaagaggtcaattatctttactcagctatgaaatcagaaaagggtttaatggctgagattgaatggttcaacactctcttgacgattctcttgaatcataagctttttgatcttgtcatggattgctatgcctttatgcaatctattggctatgagcctgatagagcctcctttagggttttagtcttaggtcttgaatcaaatggtgaaatgggtttatcagctattgttaggcaagatgctcatgagtattatggtgaatcactcgagtttatcgaagaagatgaagaaatctctagtgggactagtgtgttgatctaatgatggagcgaaagagttgagagcttgtagctctttcttcatggttctatattcagtcgagctcgaggtttgatcatatcgtaatactaataccttccgagtatgcccgatgagatgatgcgtcgttagccaaaccatatcatgtaggcttgtaacataggaatgttaccgagtatgcgagttttgattgcctgaacttggatctgttccaagtcactcaagtcactcatgtctatggagacatttatagcttcaaattccattacaattgaagttttgatatttgtaaagctcttgttgatgttataagtacaatttgagtaatcaaatatttataaagttcagtcacctt

SEQ ID NO: 102253 - protein, 712 aa, Arabidopsis thaliana
  peptide (1)..(712): Ceres Seq. ID no. 13609822
MENTDVVSGLHNFLSKPSAKDFIKSIKSFIVSILNTAPDPEKDCDAVQDFFYKMESAFRAHPLWSGCSDDELDNAGDGLEKYVMTKLFPRVFASNTEDVISDEKLFQKISLVQQFISPENLDIQPTFQNQTSWLLAQKELQKINMYNAPRDKLMCILRCCKVINNLLLNASIASNQNEPGADQFLPVLIYVTIKANPPQFHSNLLYIQRYRRQSKLVGEAGYLFTNILSAESFISNIDAKSLSMDEADFETKMKSAHARLSGPGSQSYQTDHGAALPTAHNTKRENMLLHTKSTDSFSGTNETLSETPIKKADPITDLENKGAATLLNDRSEATKIFQEYPYMFASVGDLKIGDVEDLLNNYKQLVFKYVCLSKGLGDATSLTPCISPLQASKVSENHTTLSSDFQTKSETDRSVDNLFRALQGYYCNFASFSAPLPFPHHSEEQSLTATMEGIGLRSCGDDILRLGFKLRGGTGGRIQILQRAMVIKMRDRSKNRKPLQRGRMLSIEAIQAVQALKRANPLLPPPPVPSTSTTSSSSALLDRVIISKFRRLLKFDMVAVLRELLRQNECSLALKVFEEIRKEYWYKPQVRMYTDMITVMADNSLMEEVNYLYSAMKSEKGLMAEIEWFNTLLTILLNHKLFDLVMDCYAFMQSIGYEPDRASFRVLVLGLESNGEMGLSAIVRQDAHEYYGESLEFIEEDEEISSGTSVLI

SEQ ID NO: 102254 - protein, 659 aa, Arabidopsis thaliana
  peptide (1)..(659): Ceres Seq. ID no. 13609823
MESAFRAHPLWSGCSDDELDNAGDGLEKYVMTKLFPRVFASNTEDVISDEKLFQKISLVQQFISPENLDIQPTFQNQTSWLLAQKELQKINMYNAPRDKLMCILRCCKVINNLLLNASIASNQNEPGADQFLPVLIYVTIKANPPQFHSNLLYIQRYRRQSKLVGEAGYLFTNILSAESFISNIDAKSLSMDEADFETKMKSAHARLSGPGSQSYQTDHGAALPTAHNTKRENMLLHTKSTDSFSGTNETLSETPIKKADPITDLENKGAATLLNDRSEATKIFQEYPYMFASVGDLKIGDVEDLLNNYKQLVFKYVCLSKGLGDATSLTPCISPLQASKVSENHTTLSSDFQTKSETDRSVDNLFRALQGYYCNFASFSAPLPFPHHSEEQSLTATMEGIGLRSCGDDILRLGFKLRGGTGGRIQILQRAMVIKMRDRSKNRKPLQRGRMLSIEAIQAVQALKRANPLLPPPPVPSTSTTSSSSALLDRVIISKFRRLLKFDMVAVLRELLRQNECSLALKVFEEIRKEYWYKPQVRMYTDMITVMADNSLMEEVNYLYSAMKSEKGLMAEIEWFNTLLTILLNHKLFDLVMDCYAFMQSIGYEPDRASFRVLVLGLESNGEMGLSAIVRQDAHEYYGESLEFIEEDEEISSGTSVLI

SEQ ID NO: 102255 - protein, 629 aa, Arabidopsis thaliana
  peptide (1)..(629): Ceres Seq. ID no. 13609824
MTKLFPRVFASNTEDVISDEKLFQKISLVQQFISPENLDIQPTFQNQTSWLLAQKELQKINMYNAPRDKLMCILRCCKVINNLLLNASIASNQNEPGADQFLPVLIYVTIKANPPQFHSNLLYIQRYRRQSKLVGEAGYLFTNILSAESFISNIDAKSLSMDEADFETKMKSAHARLSGPGSQSYQTDHGAALPTAHNTKRENMLLHTKSTDSFSGTNETLSETPIKKADPITDLENKGAATLLNDRSEATKIFQEYPYMFASVGDLKIGDVEDLLNNYKQLVFKYVCLSKGLGDATSLTPCISPLQASKVSENHTTLSSDFQTKSETDRSVDNLFRALQGYYCNFASFSAPLPFPHHSEEQSLTATMEGIGLRSCGDDILRLGFKLRGGTGGRIQILQRAMVIKMRDRSKNRKPLQRGRMLSIEAIQAVQALKRANPLLPPPPVPSTSTTSSSSALLDRVIISKFRRLLKFDMVAVLRELLRQNECSLALKVFEEIRKEYWYKPQVRMYTDMITVMADNSLMEEVNYLYSAMKSEKGLMAEIEWFNTLLTILLNHKLFDLVMDCYAFMQSIGYEPDRASFRVLVLGLESNGEMGLSAIVRQDAHEYYGESLEFIEEDEEISSGTSVLI

SEQ ID NO: 102256 - DNA, 966 bp, Arabidopsis thaliana
  misc_feature (1)..(966): Ceres Seq. ID no. 13609833
  misc_feature (1)..(966): Ortholog of  Ceres SEQ ID NO 15226909 as cited in SEQ ID NO 61336
  misc_feature (1)..(966): Ortholog of  Ceres SEQ ID NO 15179474 as cited in SEQ ID NO 0
aactgatataggaagatccaacaatggattcatcggcggacatagcaatattagtggcagatgaatgtaaccaaaaggtgaatacaacggcagagaaagcatcgaatacagcggaggttgggtggttgatgatgtttgggattgaggagaagaagattgaaagtctgatgaggaaatttgaagctaaatctcagtttgctgtggcggtttctagtggcttttttctgcttaactatgtttcatccttgtactataagtcacgtttgaacctcatgctggaaatctagtttaggcatgatgttactttcatttgcttctctaatcaccagagggcatgttgctttaagtttcgagttctacaagctttggttttatactcttttgggttagtttttaagtacagtttcttgtaagttaatggaaacggtgtcgtagtaagaaaaaacaaatcatcgtagtaattaagcctaatccgatgcattaattaatctctgaaatttgttggtttgcacaaaaaaaaaaattccattgttgttgttccacggaactctaaaatggagagtggcgatgagagtccggtggttctaattacgggatgttctcagggaggaattggtcacgcgctggcccgtgagttcactgagaagggatgtcgagtggtggcgacgagtcgatcacggagtacgatgacggatctggagcaagattcgaggttattcgtgaaggagcttgatgtgcaatcggaccagaatgtgagtaaggttttgtcggaggttattgataagttcggtaagatcgacgttcttgttaataacgccggagttcagtgcgttggacctctggcggagactccaatttccgccatggaaaacacattcaacaccaatgtttttggtaataaagatttgatttttagtttcaattattacatttattggagcttcaacagttctggtttttttgctt

SEQ ID NO: 102257 - protein, 137 aa, Arabidopsis thaliana
  peptide (1)..(137): Ceres Seq. ID no. 13609834
MESGDESPVVLITGCSQGGIGHALAREFTEKGCRVVATSRSRSTMTDLEQDSRLFVKELDVQSDQNVSKVLSEVIDKFGKIDVLVNNAGVQCVGPLAETPISAMENTFNTNVFGNKDLIFSFNYYIYWSFNSSGFFA

SEQ ID NO: 102258 - protein, 93 aa, Arabidopsis thaliana
  peptide (1)..(93): Ceres Seq. ID no. 13609835
MTDLEQDSRLFVKELDVQSDQNVSKVLSEVIDKFGKIDVLVNNAGVQCVGPLAETPISAMENTFNTNVFGNKDLIFSFNYYIYWSFNSSGFFA

SEQ ID NO: 102259 - protein, 87 aa, Arabidopsis thaliana; identical to SEQ ID NO: 27228
  peptide (1)..(87): Ceres Seq. ID no. 13609836

SEQ ID NO: 102260 - DNA, 681 bp, Arabidopsis thaliana
  misc_feature (1)..(681): Ceres Seq. ID no. 13609837
  misc_feature (1)..(681): Ortholog of  Ceres SEQ ID NO 12608513 as cited in SEQ ID NO 58090
aatacacaaaaccctttcactaataacaatctccaaatggctaaatcatttgtacctctcatcgctgtgttatgcgttttggttctcccacttgcagccatggcggttggaacgccattccacattgaaggaagtgtttactgcgacacttgccgctttggattcgagacaatcgccacccaatatatccgcggggcaagagtgagaatagtatgcaaagacagagtgacactaaaatcggagttggttggggtggcggtgacgggacctgatgggaaatacaaagtcgccgtcagaggagaccgacaggaccagcaatgtctggcggagcttgttcacagtccactgtcccgctgccaagaggctgatcctggcagaagcaccgctaccgtgatcctcacgcgctccaacggagccgcctctactcgtcactacgccaacgccatgggtttcttcagggacgaaccgctccgtggctgcgccgctctccgcaaacgctacctcgcagacggcgataaccgggctatttgagtcatcttatgttcttgatgaaacagaacacaaaagtttatttagagtttttatttatttctattttattgtattgttgagtctctaaagatggtgagactatttagacatatctaagataaaccatataaaataaagtatttgcaacct

SEQ ID NO: 102261 - protein, 176 aa, Arabidopsis thaliana
  peptide (1)..(176): Ceres Seq. ID no. 13609838
NTQNPFTNNNLQMAKSFVPLIAVLCVLVLPLAAMAVGTPFHIEGSVYCDTCRFGFETIATQYIRGARVRIVCKDRVTLKSELVGVAVTGPDGKYKVAVRGDRQDQQCLAELVHSPLSRCQEADPGRSTATVILTRSNGAASTRHYANAMGFFRDEPLRGCAALRKRYLADGDNRAI

SEQ ID NO: 102262 - protein, 164 aa, Arabidopsis thaliana
  peptide (1)..(164): Ceres Seq. ID no. 13609839
MAKSFVPLIAVLCVLVLPLAAMAVGTPFHIEGSVYCDTCRFGFETIATQYIRGARVRIVCKDRVTLKSELVGVAVTGPDGKYKVAVRGDRQDQQCLAELVHSPLSRCQEADPGRSTATVILTRSNGAASTRHYANAMGFFRDEPLRGCAALRKRYLADGDNRAI

SEQ ID NO: 102263 - protein, 143 aa, Arabidopsis thaliana; identical to SEQ ID NO: 36943
  peptide (1)..(143): Ceres Seq. ID no. 13609840

SEQ ID NO: 102264 - DNA, 811 bp, Arabidopsis thaliana
  misc_feature (1)..(811): Ceres Seq. ID no. 13609847
  misc_feature (1)..(811): Ortholog of  Ceres SEQ ID NO 14304408 as cited in SEQ ID NO 58051
  misc_feature (1)..(811): Ortholog of  Ceres SEQ ID NO 13661769 as cited in SEQ ID NO 61435
  misc_feature (1)..(811): Ortholog of  Ceres SEQ ID NO 13600585 as cited in SEQ ID NO 0
atggtggattctcatggctccgacacggaatgttcctccaagaagaaaaaggagaaaacgaaagaaaagggggtatatcgtggggctcgcatgaggagctgggggaaatgggtctcggagattcgggagccccgtaagaaatcaagaatctggctcgggactttccccacggcggagatggcagcgcgtgcccatgatgttgcggcattgagtatcaaaggaagttccgcaatccttaacttccctgagctcgcggattttctgccaagaccagtctcgctcagccaacaggatatccaggccgcagccgccgaagccgctcttatggatttcaaaactgtaccattccatcttcaggatgactcaacgccgttgcaaactaggtgtgatactgagaagatcgaaaagtggtcatcctcatcgtcctcagcctcatcctcatcctcatcttcgtcctcgtcctcatcatctatgctttcgggggagctaggagatattgtggagttgccgagtcttgaaaacaatgtaaaatacgattgtgcgctgtatgactcgttggaggggctggtgtcgatgcccccatggttagatgctaccgaaaatgattttaggtatggagatgattcggtactgttggacccatgtctcaaagaaagctttttgtggaattatgagtaaggtttttttttggaaagaaatgtggttttttgtttcctcctctcttttatactttcgatctttttttctaagcatatatatcttctacatatgtaatacttttccattagtaaacaatgattcggtttcgggt

SEQ ID NO: 102265 - protein, 225 aa, Arabidopsis thaliana
  peptide (1)..(225): Ceres Seq. ID no. 13609848
MVDSHGSDTECSSKKKKEKTKEKGVYRGARMRSWGKWVSEIREPRKKSRIWLGTFPTAEMAARAHDVAALSIKGSSAILNFPELADFLPRPVSLSQQDIQAAAAEAALMDFKTVPFHLQDDSTPLQTRCDTEKIEKWSSSSSSASSSSSSSSSSSSSMLSGELGDIVELPSLENNVKYDCALYDSLEGLVSMPPWLDATENDFRYGDDSVLLDPCLKESFLWNYE

SEQ ID NO: 102266 - protein, 195 aa, Arabidopsis thaliana
  peptide (1)..(195): Ceres Seq. ID no. 13609849
MRSWGKWVSEIREPRKKSRIWLGTFPTAEMAARAHDVAALSIKGSSAILNFPELADFLPRPVSLSQQDIQAAAAEAALMDFKTVPFHLQDDSTPLQTRCDTEKIEKWSSSSSSASSSSSSSSSSSSSMLSGELGDIVELPSLENNVKYDCALYDSLEGLVSMPPWLDATENDFRYGDDSVLLDPCLKESFLWNYE

SEQ ID NO: 102267 - protein, 166 aa, Arabidopsis thaliana
  peptide (1)..(166): Ceres Seq. ID no. 13609850
MAARAHDVAALSIKGSSAILNFPELADFLPRPVSLSQQDIQAAAAEAALMDFKTVPFHLQDDSTPLQTRCDTEKIEKWSSSSSSASSSSSSSSSSSSSMLSGELGDIVELPSLENNVKYDCALYDSLEGLVSMPPWLDATENDFRYGDDSVLLDPCLKESFLWNYE

SEQ ID NO: 102268 - DNA, 1398 bp, Arabidopsis thaliana
  misc_feature (1)..(1398): Ceres Seq. ID no. 13609851
  misc_feature (1)..(1398): Ortholog of  Ceres SEQ ID NO 13598253 as cited in SEQ ID NO 62412
atccgttggtgaatctggacagtcccctcaaataaaagttgtgagagctgtttcgtcgctttgatcgaaatggcgtcgtcttctccaactcagctagctcacgtcccgattcctccagaaccaggaggaaggtcgccgacacaagaagctaatgagccaccagttccgatttacattgtgacggatccgtttcaacttcctgctgatttcctaaacccttctcctgaaaagaaattggttatcggttttgactgtgagggtgttgacctctgccgacatgggaaactttgtatcatgcagattgcattctctaatgcaatatacttggttgatgtcatcgaaggtggagaggtgattatgaaagcgtgtaagcctgcactcgagtctaattacatcacgaaagttattcacgattgcaagcgtgacagtgaggctctatacttccagtttgggataagattgcacaatgttgtggacactcagattgcttattctctgattgaagaacaagaagggcggaggagacctctagatgattacatatcgtttgtttcactccttgctgatccacgttactgcggtatatcctatgaagagaaagaagaagttcgagttctcatgcgccaggacccaaagttttggacatacaggcctatgactgagctcatgatccgcgcagctgctgatgatgtccgcttccttctgtatctctatcacaaaatgatgggaaagctaaatcagcggtcactatggcatcttgcagttcgtggtgctttgtactgtcggtgtctctgctgcatgaatgatgctgattttgctgattggccaaccgttcctccaattccagataacctgaagtcagaagatcaatgtcttgaagaagagatcctgtcagtgcttgatgttccaccaggaaagatgggacgtgtgattggaaggaaaggagcatcgatcctcgccattaaggaagcttgcaacgcggaaattctaattggaggggcaaagggtccacctgataagatatttgtgattggaccggtgagagaagtgcgtaaggcggaggctatactgagaggaagaatgatagactattgaaggaaatgagggtcctttgtaatctgtctcattgcccctataaaaaaaaatactaaaaccctcttaaaacttggaaactccatggttcagtacggacccgagagagtcgtcccctcttcaataaaagttacatcattaacttccgtttatactgtggaacttaccattccatttcccgcaagggacttcatagtttgatgaaacaaaaagaccatatcaagtatggtttattggcaaatgcaagagtagtttatctgattgaccgttaagattgattttatttactttgcgactcaaattgag

SEQ ID NO: 102269 - protein, 341 aa, Arabidopsis thaliana; identical to SEQ ID NO: 36191
  peptide (1)..(341): Ceres Seq. ID no. 13609852

SEQ ID NO: 102270 - protein, 266 aa, Arabidopsis thaliana; identical to SEQ ID NO: 36192
  peptide (1)..(266): Ceres Seq. ID no. 13609853

SEQ ID NO: 102271 - protein, 245 aa, Arabidopsis thaliana; identical to SEQ ID NO: 36193
  peptide (1)..(245): Ceres Seq. ID no. 13609854

SEQ ID NO: 102272 - DNA, 1311 bp, Arabidopsis thaliana
  misc_feature (1)..(1311): Ceres Seq. ID no. 13609859
  misc_feature (1)..(1311): Ortholog of  Ceres SEQ ID NO 13655992 as cited in SEQ ID NO 65504
  misc_feature (1)..(1311): Ortholog of  Ceres SEQ ID NO 13587581 as cited in SEQ ID NO 0
gtatttgcagaagaagaagagaaaaagtttgaaagaaaatgggagcagcgaagaatatctgggcattagccaacgccgaagatgcagctaacgacgccgaacaaatcccttattcttcgttcgtcgtcgacacgtctttgcctcttcctctcatgattcctcgtatcatagagttatgtaaagatctgttcaagaattggggagagcttgatgattcactcttctctgttgagagagtatctggaggcattacaaatcttttgctgaaggtttctgtgaaagaggacactaataaagaagtgtctgttacagtgagactgtatgggcctaacactgagtatgttattaaccgggagagagagattctggctatcaagtatctctcggctgccggatttggtgccaagttgcttggtggttttggaaatggcatggtgcaatcgttcatcaatgcaagaaccttagagccatcagacatgagagagccaaagattgctgcacaaattgccagagaacttggaaagtttcataaagtggacataccaggttccaaggaacctcagctgtgggttgatatcttgaagttctatgaaaaagcatctactcttacgtttgaagaacctgataagcagaagctctttgagactatttcgtttgaagaactccacaaagaaattattgagctaagggaattcacaggcttacttaacgcacctgtggtgtttgctcataacgatttactatcaggaaacttcatgctgaatgatgaagaagagaaactatacttgattgatttcgagtatggatcatacaactatagaggctttgacatcggaaatcacttcaatgaatatgcaggatacgactgtgattacagcctgtacccaagtaaagaggaacaatatcatttcatcaagcattacttacagccagacaaaccagacgaggtcagtatcgctgaagtagaatcagtctttgtagagacagatgcgtataaattagcatctcatttgtactgggcaatatgggcgatcatccaggcaaggatgtctcccattgagtttgaatatttgggttacttctttttgcggtacaatgaatacaagaagcagaagccacttactttttcacttgttacatctcacctctcagcatcgctgtagcctttggttggccaaaatggttaaatctttttttgttttttttgttgtgttgttatcaattcttgtaaaatttgtttgtgttgttagttaaaccttgtatgatttgtatgaatgaacttgatttgtggaagtagttgcactttatatt

SEQ ID NO: 102273 - protein, 374 aa, Arabidopsis thaliana
  peptide (1)..(374): Ceres Seq. ID no. 13609860
MGAAKNIWALANAEDAANDAEQIPYSSFVVDTSLPLPLMIPRIIELCKDLFKNWGELDDSLFSVERVSGGITNLLLKVSVKEDTNKEVSVTVRLYGPNTEYVINREREILAIKYLSAAGFGAKLLGGFGNGMVQSFINARTLEPSDMREPKIAAQIARELGKFHKVDIPGSKEPQLWVDILKFYEKASTLTFEEPDKQKLFETISFEELHKEIIELREFTGLLNAPVVFAHNDLLSGNFMLNDEEEKLYLIDFEYGSYNYRGFDIGNHFNEYAGYDCDYSLYPSKEEQYHFIKHYLQPDKPDEVSIAEVESVFVETDAYKLASHLYWAIWAIIQARMSPIEFEYLGYFFLRYNEYKKQKPLTFSLVTSHLSASL

SEQ ID NO: 102274 - protein, 336 aa, Arabidopsis thaliana
  peptide (1)..(336): Ceres Seq. ID no. 13609861
MIPRIIELCKDLFKNWGELDDSLFSVERVSGGITNLLLKVSVKEDTNKEVSVTVRLYGPNTEYVINREREILAIKYLSAAGFGAKLLGGFGNGMVQSFINARTLEPSDMREPKIAAQIARELGKFHKVDIPGSKEPQLWVDILKFYEKASTLTFEEPDKQKLFETISFEELHKEIIELREFTGLLNAPVVFAHNDLLSGNFMLNDEEEKLYLIDFEYGSYNYRGFDIGNHFNEYAGYDCDYSLYPSKEEQYHFIKHYLQPDKPDEVSIAEVESVFVETDAYKLASHLYWAIWAIIQARMSPIEFEYLGYFFLRYNEYKKQKPLTFSLVTSHLSASL

SEQ ID NO: 102275 - protein, 243 aa, Arabidopsis thaliana; identical to SEQ ID NO: 75472
  peptide (1)..(243): Ceres Seq. ID no. 13609862

SEQ ID NO: 102276 - DNA, 1599 bp, Arabidopsis thaliana
  misc_feature (1)..(1599): Ceres Seq. ID no. 13609867
  misc_feature (1)..(1599): Ortholog of  Ceres SEQ ID NO 15176002 as cited in SEQ ID NO 55243
acttcttccaccttcttcttctcttcttcttctcttcttcttctacttccgcaaaaaccctttgagaaagagaagcaaaattctctaatcgttctttctctgccctaatccacgtatcgtttggtgttcttcttcatcgaatcgacatggcttcagatgctgacatggaggactatggattcgagtattctgatgaggagcaagaggaacaagatgttgacattgagaaccagtattataactctaaaggtatggttgagactgaacctgaagaagcactttctggatttgctgaggttgttcagatggaacctgagaaagctgactggggtttcaaagctcttaagcagactgtgaagatctattatcgtctaggtaaatacaaagaaatgatggaagcctatacagagatgcttacatatatcaagtcagcagtcaccaggaattacagcgaaaaatgtataaacaatatcatggatttcgtctctggatctgctagccagaacactggcctgctgcaagagttctatcagaccactttgaaagcccttgaagaggctaagaatgagagactctggttcaagacaaatcttaaactctgcaacatctggtttgacattggtgaatacagacggatgactaagattctgaaggaactccataagtcttgtcaaaaggaagatggaactgatgatcagaagaaaggaagtcagctgcttgaggtttatgcaattgaaattcagatttacactgaaacgaaggacaacaaaaagcttaagcaactataccataaggcacttgccatcaagtctgccatacctcatcctaggatcatgggtataatccgcgagtgtggtggaaaaatgcacatggcagaacgtcagtgggaagaagcagcgacagacttctttgaggcttttaaaaattacgatgaagctggcaaccaaagacgtatacagtgcctgaagtatcttgttctggcgaatatgctgatggagtcagaagtgaatccgtttgatggccaagaggcaaagccgtacaaaaacgaccctgagattttggcaatgacaaatttgatcgcagcatatcaacgaaatgagatcatagagtttgagagaatactaaagagtaaccggaggacgataatggatgatccattcatcagaaactacatggaagatctgctgaagaaagtgagaacacaagtgttactgaagctgattaagccatacacaaagatagggattccgttcatatcaaaggaactgaacgtgccagagacggatgtgacggagttactagtgtcgctgatactcgacagcagaatcgatggtcacattgatgaaatgaaccgttacttactgagaggcgacagtggcaatggaaggaagttgcataaggcggttgataaatggaactcacagctcaagtctctttcttcaaatatcaccagccgagtctgttaacttggaaacctctcttttggatagattttgtgatttggcgttgattctttgtggattatctgtttctcttcacatagctggatttgatggagtttataaaccacttcaatgccaagaaaaaggatttgaaact

SEQ ID NO: 102277 - protein, 439 aa, Arabidopsis thaliana; identical to SEQ ID NO: 23813
  peptide (1)..(439): Ceres Seq. ID no. 13609868

SEQ ID NO: 102278 - protein, 433 aa, Arabidopsis thaliana; identical to SEQ ID NO: 23814
  peptide (1)..(433): Ceres Seq. ID no. 13609869

SEQ ID NO: 102279 - protein, 404 aa, Arabidopsis thaliana; identical to SEQ ID NO: 23815
  peptide (1)..(404): Ceres Seq. ID no. 13609870

SEQ ID NO: 102280 - DNA, 804 bp, Arabidopsis thaliana
  misc_feature (1)..(804): Ceres Seq. ID no. 13609871
  misc_feature (1)..(804): Ortholog of  Ceres SEQ ID NO 13594870 as cited in SEQ ID NO 51929
  misc_feature (1)..(804): Ortholog of  Ceres SEQ ID NO 12610679 as cited in SEQ ID NO 56077
  misc_feature (1)..(804): Ortholog of  Ceres SEQ ID NO 12635481 as cited in SEQ ID NO 0
atatcgcatctaaagcccccccaaaaaaaaaatcctattactcactcatacgctctctcgtcaaacaaaaaaaaaaaacctaaagaaacttcgacatgaaaggcggcgaatccaaagctgaagcaacgagcactgatcagagactcaaaaccagaggtagaaaggctgggaagaagacgaagaaggatccaaatcaacctaagagacctccaagtgctttcttcgtcttccttgaggatttccgaaaagagtttaacctagcgaatcctaataacaaatccgtcgctactgttggtaaggctgctggagctagatggaaggcaatgactgatgaagataaagctccttacgtcgctaaggctgagagcagaaagactgaatatattaagaatgtgcaacagtacaacttgaaactggctagtggaaccaatagagaagaggatgactctgacaaatccaagtctgaagttgatgaagcagtaagcgaagaggaggcagaagacgacgattgaagcatctaggtcttgctattgacttgactcagatttgagaatgtaaacttgcttaggtttatgaccaaaaacttttaaaaaactcttatttatgctttgtgtttgtgatatttgaacctcatttgctacatcaatgttgttttaggtcagtctgtagggataatatcacttgactgctatatttcccctatttccttatgttttactagtattcatatgttcttcaactttgtatgagttttagtatcagttttatttctacttatgcttatttgttgacttctgtttctac

SEQ ID NO: 102281 - protein, 138 aa, Arabidopsis thaliana; identical to SEQ ID NO: 35594
  peptide (1)..(138): Ceres Seq. ID no. 13609872

SEQ ID NO: 102282 - DNA, 731 bp, Arabidopsis thaliana
  misc_feature (1)..(731): Ceres Seq. ID no. 13609873
  misc_feature (1)..(731): Ortholog of  Ceres SEQ ID NO 13594870 as cited in SEQ ID NO 51929
  misc_feature (1)..(731): Ortholog of  Ceres SEQ ID NO 12610679 as cited in SEQ ID NO 56077
  misc_feature (1)..(731): Ortholog of  Ceres SEQ ID NO 12635481 as cited in SEQ ID NO 0
attactcactcatacgctctctcgtcaaacaaaaaaaaaaaacctaaaggaaacttcgacatgaaaggcggcgaatccaaagctgaagcaacgagcactgatcagagactcaaaaccagaggtagaaaggctgggaagaagacgaagaaggatccaaatcaacctaagagacctccaagtgctttcttcgtcttccttgaggatttccgaaaagagtttaacctagcgaatcctaataacaaatccgtcgctactgttggtaaggctgctggagctagatggaaggcaatgactgatgaagataaagctccttacgtcgctaaggctgagagcagaaagactgaatatattaagaatgtgcaacagtacaacttgaaactggctagtggaaccaatagagaagaggatgactctgacaaatccaagtctgaagttgatgaagcagtaagcgaagaggaggcagaagacgacgattgaagcatctaggtcttgctattgacttgactcagatttgagaatgtaaacttgcttaggtttatgaccaaaaacttttaaaaaactcttatttatgctttgtgtttgtgatatttgaacctcatttgctacatcaatgttgttttaggtcagtctgtagggataatatcacttgactgctatatttcccctatttccttatgttttactagtattcatatgttcttcaactttgtatgagttttagtatcagtttt

SEQ ID NO: 102283 - protein, 158 aa, Arabidopsis thaliana
  peptide (1)..(158): Ceres Seq. ID no. 13609874
ITHSYALSSNKKKKPKGNFDMKGGESKAEATSTDQRLKTRGRKAGKKTKKDPNQPKRPPSAFFVFLEDFRKEFNLANPNNKSVATVGKAAGARWKAMTDEDKAPYVAKAESRKTEYIKNVQQYNLKLASGTNREEDDSDKSKSEVDEAVSEEEAEDDD

SEQ ID NO: 102284 - protein, 138 aa, Arabidopsis thaliana; identical to SEQ ID NO: 35594
  peptide (1)..(138): Ceres Seq. ID no. 13609875

SEQ ID NO: 102285 - DNA, 1496 bp, Arabidopsis thaliana
  misc_feature (1)..(1496): Ceres Seq. ID no. 13609884
  misc_feature (1)..(1496): Ortholog of  Ceres SEQ ID NO 13597334 as cited in SEQ ID NO 64244
gcccagaattaaacgcaatccacttcaatccaaaatcccatactaaattaaaaccaacacacaggaagaaagaagaaacctctcatcttcccctctcttctgttgaagaaagcttaaacctttctgggtttcttttaactatggcgacaagggttagtttcttcttagctctggtaatgacggtggtgattcttgctccttctgtcgtctctggagaaaatgggttttccgatcttaaaatccgtactcacttgaaacgactcaacaagccagctctcaaatcgattaagagcccagatggagatatgattgactgtgttccaatcactgaccaaccagcttttgctcatcctctgctcattaatcacactgtccagatgtggccaagtttgaacccagaaagtgtatttagtgagagtaaagtttcatcaaaaaccaagaatcagcagtctaatgctatacatcagctttggcatgtgaatgggaaatgtccaaagaacacaattcccatcagaagaacgagaagacaagatctttacagagcgagttccgttgagaattacggtatgaagaatcagaagagtatccctaaacctaaatcttctgagccacctaatgtccttacacaaaatggtcatcagcacgcgataatgtatgtcgaagatggggttttctacggggctaaagcgaagataaatgtatggaagccggatgttgaaatgcctaatgagtttagcttagctcagatttgggttttaggtggaaatttcaactctgatcttaatagtattgaagctggctggcaggtcagcccacaattgtatggtgataataggaccagactcttcacttattggactagtgatgcataccaaggcacaggctgctataatcttctatgctcaggatttgttcaaatcaatagagaaatcgcaatgggtggatcaatctctcctttatcaaactatggaaactctcaatatgacatcaccatactcatctggaaggatccaaaagaaggacattggtggttacagtttggagagaaatacataataggatactggccagcttcactcttctcttacttatcagaaagtgcatcgatgatcgaatggggaggcgaagtggttaactcgcagtccgaggaaggacaacacacaaccactcagatgggaagtgggaggtttgcagaggaaggttggggaaaagcgagttacttcaagaacgttcaagtagttgatggatcgaatgaactgagaaacccggagaatcttcaagtgtttactgatcaagagaactgttacaatgtgaaaagtgggaatggaggttcttggggaagttacttctactatggtggtcctggtcgaaaccctaattgcccttaaagatttggtcgacttactcacattgcagatcattccaaatcaattgtataaaaaacatataatatatatatatacacattcttaagtatattattaatttcaggtttg

SEQ ID NO: 102286 - protein, 461 aa, Arabidopsis thaliana
  peptide (1)..(461): Ceres Seq. ID no. 13609885
PELNAIHFNPKSHTKLKPTHRKKEETSHLPLSSVEESLNLSGFLLTMATRVSFFLALVMTVVILAPSVVSGENGFSDLKIRTHLKRLNKPALKSIKSPDGDMIDCVPITDQPAFAHPLLINHTVQMWPSLNPESVFSESKVSSKTKNQQSNAIHQLWHVNGKCPKNTIPIRRTRRQDLYRASSVENYGMKNQKSIPKPKSSEPPNVLTQNGHQHAIMYVEDGVFYGAKAKINVWKPDVEMPNEFSLAQIWVLGGNFNSDLNSIEAGWQVSPQLYGDNRTRLFTYWTSDAYQGTGCYNLLCSGFVQINREIAMGGSISPLSNYGNSQYDITILIWKDPKEGHWWLQFGEKYIIGYWPASLFSYLSESASMIEWGGEVVNSQSEEGQHTTTQMGSGRFAEEGWGKASYFKNVQVVDGSNELRNPENLQVFTDQENCYNVKSGNGGSWGSYFYYGGPGRNPNCP

SEQ ID NO: 102287 - protein, 415 aa, Arabidopsis thaliana; identical to SEQ ID NO: 24820
  peptide (1)..(415): Ceres Seq. ID no. 13609886

SEQ ID NO: 102288 - protein, 403 aa, Arabidopsis thaliana; identical to SEQ ID NO: 24821
  peptide (1)..(403): Ceres Seq. ID no. 13609887

SEQ ID NO: 102289 - DNA, 937 bp, Arabidopsis thaliana
  misc_feature (1)..(937): Ceres Seq. ID no. 13609888
  misc_feature (1)..(937): Ortholog of  Ceres SEQ ID NO 13583408 as cited in SEQ ID NO 62616
  misc_feature (1)..(937): Ortholog of  Ceres SEQ ID NO 15179752 as cited in SEQ ID NO 63074
gttttgtcctccttctacgccgcacactatctcttcctctctctcagacgagatttcctcttcatctcaagagaaatggctgaatccaaggtagtggttccagagtctgtgctaaagaagatcaagaggcaagaggaatgggcattggccaagaaagatgaagctgtagctgctaagaagaagagtgttgaggcccgcaagcttatcttcaagagagctgagcagtatgccaaagaatacgctgagaaggataacgagttgatccgattgaagcgggaggctaagttgaaaggaggtttctacgttgaccctgaggctaagttgctctttatcattcgtatccgtggtatcaatgccattgacccaaaaaccaagaagattctgcagctcctgcgtttgagacagatcttcaatggtgtgtttcttaaggtgaacaaggcaacagtaaacatgctgcgccgagttgaaccatacgtgacttacggatacccaaacttgaagagcgttaaggaactgatctacaaaagaggttatggaaagctgaaccaccagaggatagcacttactgacaactccattgtggatcaggctctcggaaagcatgggatcatctgcgttgaggatctcatccacgagatcatgactgttggacctcacttcaaggaagccaacaacttcctgtggccattccaattgaaggcaccactcggtggccttaagaagaagagaaaccactacgtcgaaggtggtgatgctggaaacagggagaatttcatcaacgagcttgtcaggagaatgaattgatgaaagcttccttctttatctttgcaaatttcaaagattttgggaccgagtttttttttttttgttcaagttatcagagacttgtgatcttttatccgagataggctttttatgactaatcatgttattttcc

SEQ ID NO: 102290 - protein, 267 aa, Arabidopsis thaliana; identical to SEQ ID NO: 97854
  peptide (1)..(267): Ceres Seq. ID no. 13609889

SEQ ID NO: 102291 - protein, 242 aa, Arabidopsis thaliana; identical to SEQ ID NO: 23649
  peptide (1)..(242): Ceres Seq. ID no. 13609890

SEQ ID NO: 102292 - DNA, 1369 bp, Arabidopsis thaliana
  misc_feature (1)..(1369): Ceres Seq. ID no. 13609891
  misc_feature (1)..(1369): Ortholog of  Ceres SEQ ID NO 13598368 as cited in SEQ ID NO 62140
atgagattctctctttctcccgtacgtccgcatagtgtagtagtaccttcactaccaaaacaggacgtcgtttcttatataagtggtacgacgtcgaatcgtcaatgtcgatgtgtacttacacttccttctccttcagtttccacttcccgaccaccggttttacccaaaccggaaacctgggagagtttgctgctaaaccatgatcaaattccaggcgaattctcacccactggttcgagtatcccggttaagcttggccggagatggatggagtatcaggggcttcaaaattgggacggtcttttagacccattggacgacaatctccggcgagagattctccggtacggtcaatttgtcgaatcggcttatcaagcatttgatttcgatccttcctctccaacctacgggacatgccggtttccgaggagcacgttgttagagcgatccggtttacccaactccggttatcgactaacgaagaaccttcgtgccacgtcaggtattaacttgccacgttggattgagaaagcgccaagctggatggctacacaatctagctggattggttacgtggcagtttgccaggacaaagaagagatctcgcggcttgggcgtagagacgtcgtcatctccttccgtggaaccgccacgtgtctcgagtggttagagaaccttcgcgccacgctgactcatctccctaatgggcctactggagcaaatctaaacgggtctaactctgggcccatggttgagagcgggtttttaagcttgtatacttcaggtgttcacagtttgagagacatggtaagagaagagatcgcaaggctactccaatcttacggcgacgagccgttaagtgtaacgataaccggtcacagcctcggcgctgcgatcgcgacactagcagcttacgatatcaaaacgacgtttaaacgtgcgcctatggttaccgtaatatctttcggaggtccacgtgtcggaaacagatgctttcggaaactccttgagaagcaaggcacgaaggttctaagaatcgtgaactccgacgacgtcatcaccaaagttcctggagttgttttagaaaacagagagcaagataacgttaagatgacagcgtcgataatgccgagctggatacagagacgcgtggaggagacgccgtgggtttacgctgaaatcggtaaggagcttcggctgagtagccgtgactcgccgcacttgagcagcatcaatgtggccacgtgtcatgagctgaaaacgtatttacatttggtagacgggtttgtgagctccacgtgtccattcagagaaacagctcggagagttctccatagatgaagattcattgatccgacattcgtaa

SEQ ID NO: 102293 - protein, 447 aa, Arabidopsis thaliana
  peptide (1)..(447): Ceres Seq. ID no. 13609892
MRFSLSPVRPHSVVVPSLPKQDVVSYISGTTSNRQCRCVLTLPSPSVSTSRPPVLPKPETWESLLLNHDQIPGEFSPTGSSIPVKLGRRWMEYQGLQNWDGLLDPLDDNLRREILRYGQFVESAYQAFDFDPSSPTYGTCRFPRSTLLERSGLPNSGYRLTKNLRATSGINLPRWIEKAPSWMATQSSWIGYVAVCQDKEEISRLGRRDVVISFRGTATCLEWLENLRATLTHLPNGPTGANLNGSNSGPMVESGFLSLYTSGVHSLRDMVREEIARLLQSYGDEPLSVTITGHSLGAAIATLAAYDIKTTFKRAPMVTVISFGGPRVGNRCFRKLLEKQGTKVLRIVNSDDVITKVPGVVLENREQDNVKMTASIMPSWIQRRVEETPWVYAEIGKELRLSSRDSPHLSSINVATCHELKTYLHLVDGFVSSTCPFRETARRVLHR

SEQ ID NO: 102294 - protein, 357 aa, Arabidopsis thaliana; identical to SEQ ID NO: 72106
  peptide (1)..(357): Ceres Seq. ID no. 13609893

SEQ ID NO: 102295 - protein, 265 aa, Arabidopsis thaliana; identical to SEQ ID NO: 72107
  peptide (1)..(265): Ceres Seq. ID no. 13609894

SEQ ID NO: 102296 - DNA, 1299 bp, Arabidopsis thaliana
  misc_feature (1)..(1299): Ceres Seq. ID no. 13609902
  misc_feature (1)..(1299): Ortholog of  Ceres SEQ ID NO 15171268 as cited in SEQ ID NO 51297
  misc_feature (1)..(1299): Ortholog of  Ceres SEQ ID NO 15170521 as cited in SEQ ID NO 55668
  misc_feature (1)..(1299): Ortholog of  Ceres SEQ ID NO 13598249 as cited in SEQ ID NO 62509
  misc_feature (1)..(1299): Ortholog of  Ceres SEQ ID NO 13598595 as cited in SEQ ID NO 64671
  misc_feature (1)..(1299): Ortholog of  Ceres SEQ ID NO 13654241 as cited in SEQ ID NO 68348
acagggaaaagcagagcactctttatctcttcttctctctttcttctactctgtgatcaaactatcgaagaaaaaacaaaccctagatttatccgcccctcttcttcctctgatgataagaaagtcgaagactttgagaatctaaagctgaaaaattttgttttttttcattgagggaatcgaatcgagttatgtacaaggatcggagtggaggaggaataatgggtggtggtggatcatcgagatcggagatccttggtggagctattgatcggaaacgaatcaatgatgctttagacaaacatcttaagaaatcttcaccttctacatctagggttttcacttctaaggacaaagattctgtcccttctacttcaactgctaaatctcagcttcattctcgttcccccgatgttgaatctgacacggatagtgaaggatcagatgtgagtggttcagaaggtgatgatacctcttggatctcatggttttgtaatttgagagggaatgagtttttctgtgaagtagatgaagattatatacaagatgatttcaatctctgtggtttgagtggtcaagttccttactatgattatgcacttgatctcattttagatgttgaatcatcaaatggtgatatgtttactgaagaacagcatgagatggtggaatcagctgctgagatgttatatggtcttattcatgttcgttatattctcactactaaaggaatggctgctatgatggagaagtataagaattatgatttcgggagatgccccagagttttctgttgcggacagtcttgtcttccggttggccaatctgatatcccgaggtcgagcactgtgaagatatactgcccaaaatgcgaggatatttactacccgcgatctaaataccaagacattgatggagcttactttggaactactttccctcatttgtttctcatggcctatgggaacatgaaaccgcagaagccggctcaaaactacgttcctaagatctttggctttaaggtacacaacaaacaatgatactctctcctctcaacagtcttgtggttgaatacaatctcggtggctaaaccaccattcttctgatggtcacgggtttgaaatggatgatactaaactgcgtttggaggatgagaagagctaatgaagaaaggtcgacacttaaaagtttttcactatgtaatctcaaaagttctaagtagaatcttcaacatagaaccgttctttgatgggtcttgggaaattctttacctgtgagtaatcaattaaatcatttacc

SEQ ID NO: 102297 - protein, 282 aa, Arabidopsis thaliana
  peptide (1)..(282): Ceres Seq. ID no. 13609903
MYKDRSGGGIMGGGGSSRSEILGGAIDRKRINDALDKHLKKSSPSTSRVFTSKDKDSVPSTSTAKSQLHSRSPDVESDTDSEGSDVSGSEGDDTSWISWFCNLRGNEFFCEVDEDYIQDDFNLCGLSGQVPYYDYALDLILDVESSNGDMFTEEQHEMVESAAEMLYGLIHVRYILTTKGMAAMMEKYKNYDFGRCPRVFCCGQSCLPVGQSDIPRSSTVKIYCPKCEDIYYPRSKYQDIDGAYFGTTFPHLFLMAYGNMKPQKPAQNYVPKIFGFKVHNKQ

SEQ ID NO: 102298 - protein, 272 aa, Arabidopsis thaliana
  peptide (1)..(272): Ceres Seq. ID no. 13609904
MGGGGSSRSEILGGAIDRKRINDALDKHLKKSSPSTSRVFTSKDKDSVPSTSTAKSQLHSRSPDVESDTDSEGSDVSGSEGDDTSWISWFCNLRGNEFFCEVDEDYIQDDFNLCGLSGQVPYYDYALDLILDVESSNGDMFTEEQHEMVESAAEMLYGLIHVRYILTTKGMAAMMEKYKNYDFGRCPRVFCCGQSCLPVGQSDIPRSSTVKIYCPKCEDIYYPRSKYQDIDGAYFGTTFPHLFLMAYGNMKPQKPAQNYVPKIFGFKVHNKQ

SEQ ID NO: 102299 - DNA, 1237 bp, Arabidopsis thaliana
  misc_feature (1)..(1237): Ceres Seq. ID no. 13609940
  misc_feature (1)..(1237): Ortholog of  Ceres SEQ ID NO 13581947 as cited in SEQ ID NO 51812
gaaaaaaaaaatccaatttagaaaaccgcgcgttggagggaaagccatagaaaactaaaagataacaaacattttaacaaacccaaacccaaaaattctcaaggaggccgaagaagaagaagaagaaatgagcgttaatggtgagaacaaggtctcaggaggagatagttcatcttcagatcgacctgttagagtctacgccgatgggatcttcgatttgttccatttcggccacgctcgtgccatcgaacaagccaaaaaatcgttcccgaatacgtatctgcttgttggatgttgcaatgacgaaattacgaacaaattcaaggggaaaactgtgatgactgaatctgagcgatacgaatctcttcgacattgcaagtgggttgatgaagtgattccagatgcaccatgggttcttacaacagagtttcttgataagcataagatagattacgtagctcacgatgctcttccctatgcggatactagtggagctggaaatgatgtttatgagtttgtaaagtcgattgggaagtttaaggagactaaacgaacagaggggatatcgacatctgatataatcatgagaatagtgaaagattataaccagtatgtgttgcgtaatcctggaccgaggtattcaagagaagaactctcgtgtcagctcgaggtacgagaagaggcttagagtgaatatgagattgaagaaactacaagagaaagttaaagaacaacaagaaaagatacaaaccgtagcaaaaactgctgggatgcaccatgatgagtggcttgaaaatgctgatcgttgggtggctggatttcttgaaatgtttgaggaaggttgtcataaaatgggaacagccatcagagatgggattcagcaacggctaatgaggcaagaatcggaagagaaccggcgattgcttcaaaatggactgacgatttccaaagacaatgacgatgaacaaatgtctgatgacaacgagtttgcagaagaaagactgcgtcaatgtgagcaacaaagggattgaaacagtaaagaaatgagagattttgggtcatggttgaagtatttccagatacagaaccaaaatctactagatttcaccagtaatggtattaggcttgtttattcaactgtacatcaaactctgtttcaaaatctctacttgtgtctaaaactcaaatgcatcagaaatcaaaagcagtcatggatatatctatgatcaaacactcc

SEQ ID NO: 102300 - protein, 186 aa, Arabidopsis thaliana
  peptide (1)..(186): Ceres Seq. ID no. 13609941
MSVNGENKVSGGDSSSSDRPVRVYADGIFDLFHFGHARAIEQAKKSFPNTYLLVGCCNDEITNKFKGKTVMTESERYESLRHCKWVDEVIPDAPWVLTTEFLDKHKIDYVAHDALPYADTSGAGNDVYEFVKSIGKFKETKRTEGISTSDIIMRIVKDYNQYVLRNPGPRYSREELSCQLEVREEA

SEQ ID NO: 102301 - protein, 139 aa, Arabidopsis thaliana
  peptide (1)..(139): Ceres Seq. ID no. 13609942
MCCVILDRGIQEKNSRVSSRYEKRLRVNMRLKKLQEKVKEQQEKIQTVAKTAGMHHDEWLENADRWVAGFLEMFEEGCHKMGTAIRDGIQQRLMRQESEENRRLLQNGLTISKDNDDEQMSDDNEFAEERLRQCEQQRD

SEQ ID NO: 102302 - protein, 116 aa, Arabidopsis thaliana
  peptide (1)..(116): Ceres Seq. ID no. 13609943
MTESERYESLRHCKWVDEVIPDAPWVLTTEFLDKHKIDYVAHDALPYADTSGAGNDVYEFVKSIGKFKETKRTEGISTSDIIMRIVKDYNQYVLRNPGPRYSREELSCQLEVREEA

SEQ ID NO: 102303 - DNA, 1677 bp, Arabidopsis thaliana
  misc_feature (1)..(1677): Ceres Seq. ID no. 13609944
  misc_feature (1)..(1677): Ortholog of  Ceres SEQ ID NO 13596935 as cited in SEQ ID NO 63031
  misc_feature (1)..(1677): Ortholog of  Ceres SEQ ID NO 15179123 as cited in SEQ ID NO 0
atagaaatagaaggcgaagagataatttccaaaaacaagaaaaacctctaagctcaaaagatgttgttgagaacgatggcggcgacttccccgcggccaccaccgtcaacatccctaacatctcagcagccaccatcacccccctcacagcttcccctccgtacaatgccgggatcgtacggctggccgttggttggaccattatcggaccgtttagattccaaggacccgataagtttttccggacaagagctgagaagtataagagcactgtgttccgtacaaatattcctccgacgtttcctttcttcggcaacgttaaccctaacatcgtcgccgttcttgacgtcaagtcttttagccatctttttgacatggatctagttgataaaagagatgttctcatcggagacttccggcctagccttgggttctacggcggcgttcgtgttggagtttatctcgacactactgagccaaagcacgccaagataaaaggtttcgctatggaaacactaaaacgaagctcaaaagtatggctacaagagcttcgttcaaacctaaacattttctggggaacaatcgaatccgaaatctccaaaaacggtgccgcttcatatatcttccctctccaacgttgcatcttcagtttcctctgcgcctctctcgccggcgttgacgcttccgtatcgccggacatcgctgagaacggttggaaaacaatcaatacttggcttgcgttgcaagttattcccactgctaaacttggcgtagttcctcagcctcttgaagagattttacttcatacttggccttatccttctctcttaatcgccggaaattacaaaaagctttacaatttcatcgacgagaacgccggagattgtctccggttaggtcaagaagaattcgggttgacccgagatgaggctattcaaaatcttctctttgttttaggttttaatgcctacgggggcttttccgtcttcttaccttctttgatcgggagaataaccggcgacaattccggtttacaggagaggattagaaccgaagtcaggagagtttgcggatccgggtcggatcttaatttcaagacggttaacgaaatggagctggttaaatccgtggtttacgaaacgctgcgttttagtcctccggttccgctgcaattcgcacgtgcgaggaaagattttcagataagttcacacgatgctgtttttgaggtcaagaaaggtgagcttctttgtggttatcagccgcttgtgatgagagacgctaatgtttttgacgaaccggaggaatttaaaccggaccggtatgtaggtgagaccgggtctgaattgctgaattatctctactggtctaacggtccacaaaccggtaccccgagcgcgtcgaacaaacagtgtgcagctaaggacattgtcactctcacggcttccttgctcgttgccgatttatttctccggtatgatacgattactggtgactccggttcaattaaagctgttgttaaagctaaataagttaaagattgattagtgtttaatgttatgtaatcaatcttcaacggtttcatttgttcggagtgtataaattatatgtaaactaaaataatccgaattgaaactcaaattgttatgttagatggtgttgctatgttagagagatttt

SEQ ID NO: 102304 - protein, 508 aa, Arabidopsis thaliana
  peptide (1)..(508): Ceres Seq. ID no. 13609945
RNRRRRDNFQKQEKPLSSKDVVENDGGDFPAATTVNIPNISAATITPLTASPPYNAGIVRLAVGWTIIGPFRFQGPDKFFRTRAEKYKSTVFRTNIPPTFPFFGNVNPNIVAVLDVKSFSHLFDMDLVDKRDVLIGDFRPSLGFYGGVRVGVYLDTTEPKHAKIKGFAMETLKRSSKVWLQELRSNLNIFWGTIESEISKNGAASYIFPLQRCIFSFLCASLAGVDASVSPDIAENGWKTINTWLALQVIPTAKLGVVPQPLEEILLHTWPYPSLLIAGNYKKLYNFIDENAGDCLRLGQEEFGLTRDEAIQNLLFVLGFNAYGGFSVFLPSLIGRITGDNSGLQERIRTEVRRVCGSGSDLNFKTVNEMELVKSVVYETLRFSPPVPLQFARARKDFQISSHDAVFEVKKGELLCGYQPLVMRDANVFDEPEEFKPDRYVGETGSELLNYLYWSNGPQTGTPSASNKQCAAKDIVTLTASLLVADLFLRYDTITGDSGSIKAVVKAK

SEQ ID NO: 102305 - protein, 384 aa, Arabidopsis thaliana; identical to SEQ ID NO: 71298
  peptide (1)..(384): Ceres Seq. ID no. 13609946

SEQ ID NO: 102306 - protein, 340 aa, Arabidopsis thaliana
  peptide (1)..(340): Ceres Seq. ID no. 13609947
METLKRSSKVWLQELRSNLNIFWGTIESEISKNGAASYIFPLQRCIFSFLCASLAGVDASVSPDIAENGWKTINTWLALQVIPTAKLGVVPQPLEEILLHTWPYPSLLIAGNYKKLYNFIDENAGDCLRLGQEEFGLTRDEAIQNLLFVLGFNAYGGFSVFLPSLIGRITGDNSGLQERIRTEVRRVCGSGSDLNFKTVNEMELVKSVVYETLRFSPPVPLQFARARKDFQISSHDAVFEVKKGELLCGYQPLVMRDANVFDEPEEFKPDRYVGETGSELLNYLYWSNGPQTGTPSASNKQCAAKDIVTLTASLLVADLFLRYDTITGDSGSIKAVVKAK

SEQ ID NO: 102307 - DNA, 1202 bp, Arabidopsis thaliana
  misc_feature (1)..(1202): Ceres Seq. ID no. 13609948
  misc_feature (1)..(1202): Ortholog of  Ceres SEQ ID NO 14313666 as cited in SEQ ID NO 54618
  misc_feature (1)..(1202): Ortholog of  Ceres SEQ ID NO 13595351 as cited in SEQ ID NO 55934
  misc_feature (1)..(1202): Ortholog of  Ceres SEQ ID NO 13639645 as cited in SEQ ID NO 57488
atgagagaagagacagtttcttggaagtactttaaaagagatgttgttccgttcactgcgatgatcgctatagagtgtacaacggttggatccagcatactgtataaagctgctaccttgagaggatttagcttttatgtctttgtgttttacgcttatgttggtgctacacttgtccttcttctactttcacttatctttggaaggtcgagaagtttgcctacagccaagtcttctcttttcttcaagattttcttacttgcgcttctcgggctcacgtcgcgggtagctggttgtaaaggtatagaatatagttccccaactctttcctctgctatcagcaatcttacaccagctttcaccttcatccttgccatcttcttcaggatggaacaagtaatgttaagaagctctgcaactcaggctaaaatcattggcacaatagtttctatatctggtgctctggttattgttctgtataaaggcccaaaacttcttgttgctgcatcgtttacttcattcgagtcaagttggataattggaggccttttgctcggtctgcagtttttgcttctttcagtctggtttattcttcagactcatatcatggagatataccctgaagaaatagccgtagtcttctgctacaacttatgcgcaactctaatctcagggacagtatgtctacttgtagaaaaagacttgaattcttggcagcttaaaccaggtttctccctcgcttcagtcatatactcgggactctttgatacatcattgggctcagttatccacacatggggtctccatgtgaagggtccagtctacatatccttgttcaagccgctgtctatcgcaattgcagtcgccatggctgctatattcctcggcgacacacttcatcttgggagtgtgattggatcagtgatattgagctttgggttttacactgtgatttggggcaaagcaagagaggattcaaccaaaacagtaagtgattctgagcaatcacttttattgccttcacacgacagagaagaagattgaaaccttgtcatgaaaatatgttggagacaagtgtaatcgttttcttattttattcataattatggtcccattagatgatgatgatccctatttatcttgtaagttgtaagatcttatgacttgtacaaaaaaaatctaacatgatacattgaaatgtg

SEQ ID NO: 102308 - protein, 347 aa, Arabidopsis thaliana
  peptide (1)..(347): Ceres Seq. ID no. 13609949
MREETVSWKYFKRDVVPFTAMIAIECTTVGSSILYKAATLRGFSFYVFVFYAYVGATLVLLLLSLIFGRSRSLPTAKSSLFFKIFLLALLGLTSRVAGCKGIEYSSPTLSSAISNLTPAFTFILAIFFRMEQVMLRSSATQAKIIGTIVSISGALVIVLYKGPKLLVAASFTSFESSWIIGGLLLGLQFLLLSVWFILQTHIMEIYPEEIAVVFCYNLCATLISGTVCLLVEKDLNSWQLKPGFSLASVIYSGLFDTSLGSVIHTWGLHVKGPVYISLFKPLSIAIAVAMAAIFLGDTLHLGSVIGSVILSFGFYTVIWGKAREDSTKTVSDSEQSLLLPSHDREED

SEQ ID NO: 102309 - protein, 327 aa, Arabidopsis thaliana
  peptide (1)..(327): Ceres Seq. ID no. 13609950
MIAIECTTVGSSILYKAATLRGFSFYVFVFYAYVGATLVLLLLSLIFGRSRSLPTAKSSLFFKIFLLALLGLTSRVAGCKGIEYSSPTLSSAISNLTPAFTFILAIFFRMEQVMLRSSATQAKIIGTIVSISGALVIVLYKGPKLLVAASFTSFESSWIIGGLLLGLQFLLLSVWFILQTHIMEIYPEEIAVVFCYNLCATLISGTVCLLVEKDLNSWQLKPGFSLASVIYSGLFDTSLGSVIHTWGLHVKGPVYISLFKPLSIAIAVAMAAIFLGDTLHLGSVIGSVILSFGFYTVIWGKAREDSTKTVSDSEQSLLLPSHDREED

SEQ ID NO: 102310 - protein, 218 aa, Arabidopsis thaliana
  peptide (1)..(218): Ceres Seq. ID no. 13609951
MEQVMLRSSATQAKIIGTIVSISGALVIVLYKGPKLLVAASFTSFESSWIIGGLLLGLQFLLLSVWFILQTHIMEIYPEEIAVVFCYNLCATLISGTVCLLVEKDLNSWQLKPGFSLASVIYSGLFDTSLGSVIHTWGLHVKGPVYISLFKPLSIAIAVAMAAIFLGDTLHLGSVIGSVILSFGFYTVIWGKAREDSTKTVSDSEQSLLLPSHDREED

SEQ ID NO: 102311 - DNA, 978 bp, Arabidopsis thaliana
  misc_feature (1)..(978): Ceres Seq. ID no. 13609952
  misc_feature (1)..(978): Ortholog of  Ceres SEQ ID NO 13639246 as cited in SEQ ID NO 56576
aacccaacaacacactatctctcatttctcttcaaaaaaaaaaaaaaaccttgaaactatgagtttccatgaccaaatccaataagtccacccggtaccaattcggatcataaaagtttcgttataaacagcaaaatcatgctcaccaccacaatcttaatcttactcatagtgattcttatggtctctctccacctctactatcgttggtatctcctccgttctagccccttcaatcgcaccaccgctgcaagtacttttttcacggatccttcctccactcctggtggccttaacccctccatcatcaaatctcttccaattttcacgttctccgccgtaaccgcccttttcgcaatggaatgctccgtttgcctctcggagttcaaagataatgaatcgggtcgggttatgcccaattgcaagcatacatttcacgttcactgcattgatatgtggtttcattctcattcctcttgtcctctctgtcgatctcaaatcgaacctttcgccggtggagtaaaatcgtcgatggatgaagtcgcgatttcgatttctgacccggtttacggtgacacgaaccatcacgaaggaactgagactaccggtgattcggttcctgaagattcacagagaaaaccggcagcgattgaaatctcacagaggaatctcggagaaatagagaatgatttgtctcggagtcactcgtttagatcaccgaccgatgagccggatgatatctttcactcggaatttgagtcgagatctggagaagtgcttcttcttcttcttcttctatcagaattcctcatattttgtttccgacggtcagtagcatgcaagtgactgagttagatatcgaattgggaggagaagagactcgttcacttattcaatgttacatcacgtggattgtattaatggttgtaatttatctctttcttttttcagtttagagtttaatatgcaacatgttaa

SEQ ID NO: 102312 - protein, 235 aa, Arabidopsis thaliana
  peptide (1)..(235): Ceres Seq. ID no. 13609953
MLTTTILILLIVILMVSLHLYYRWYLLRSSPFNRTTAASTFFTDPSSTPGGLNPSIIKSLPIFTFSAVTALFAMECSVCLSEFKDNESGRVMPNCKHTFHVHCIDMWFHSHSSCPLCRSQIEPFAGGVKSSMDEVAISISDPVYGDTNHHEGTETTGDSVPEDSQRKPAAIEISQRNLGEIENDLSRSHSFRSPTDEPDDIFHSEFESRSGEVLLLLLLLSEFLIFCFRRSVACK

SEQ ID NO: 102313 - protein, 221 aa, Arabidopsis thaliana
  peptide (1)..(221): Ceres Seq. ID no. 13609954
MVSLHLYYRWYLLRSSPFNRTTAASTFFTDPSSTPGGLNPSIIKSLPIFTFSAVTALFAMECSVCLSEFKDNESGRVMPNCKHTFHVHCIDMWFHSHSSCPLCRSQIEPFAGGVKSSMDEVAISISDPVYGDTNHHEGTETTGDSVPEDSQRKPAAIEISQRNLGEIENDLSRSHSFRSPTDEPDDIFHSEFESRSGEVLLLLLLLSEFLIFCFRRSVACK

SEQ ID NO: 102314 - protein, 162 aa, Arabidopsis thaliana
  peptide (1)..(162): Ceres Seq. ID no. 13609955
MECSVCLSEFKDNESGRVMPNCKHTFHVHCIDMWFHSHSSCPLCRSQIEPFAGGVKSSMDEVAISISDPVYGDTNHHEGTETTGDSVPEDSQRKPAAIEISQRNLGEIENDLSRSHSFRSPTDEPDDIFHSEFESRSGEVLLLLLLLSEFLIFCFRRSVACK

SEQ ID NO: 102315 - DNA, 2145 bp, Arabidopsis thaliana
  misc_feature (1)..(2145): Ceres Seq. ID no. 13609956
  misc_feature (1)..(2145): Ortholog of  Ceres SEQ ID NO 15171762 as cited in SEQ ID NO 57846
  misc_feature (1)..(2145): Ortholog of  Ceres SEQ ID NO 12597287 as cited in SEQ ID NO 63982
ctctgtgccttttttcctcttttctcgttcccctctacttcatttagggtttatcatcctctaccaatccgccgattctatacatacacttttcatatatatacatacatcgtctccactctcgttggctcatttttcattcaccgccacgaagcaagaggagattcgtattagccaccatgtctttgagacctaacgctaagactgaggttcgccggaaccgctacaaagtggcggtggatgctgaggaaggaagacggaggagagaggacaacatggtcgagatccgtaagagtaagcgtgaagaaagcttacagaagaagcgtcgtgaaggccttcaagctaatcagctacctcaattcgctcctctcctgttcctgcttcatcaactgttggagaagagttggagagtttgcctgctatggttggtggtgtttggtcagatgatagaagtttacagcttgaagcgactactcagttccggaaattgctttctattgagcgtagtcctccgattgaagaagtgattgatgctggtgttgtgcctcggtttgtggaatttctcactagagaggattatccacagcttcagtttgaggctgcttgggcattgacaaacattgcttctgggacttcagagaatacaaaggtggtcattgaacatggtgctgttccgatttttgttcaactattggcttctcagagtgatgatgtccgtgagcaggctgtgtgggcattagggaatgttgctggtgattctccacggtgcagagatcttgtccttggtcaaggagctttgataccattactctctcagttgaatgagcatgctaaactctcgatgctgagaaatgctacttggaccctctctaatttctgcaggggcaagccacagcctccctttgaccaggtccgtccagcactcccagcccttgaacgcctgattcattcgactgatgaggaagtgttaacggatgcatgttgggctctctcttacctttccgatggcacaaatgacaaaatccaatctgtcattgaggcaggtgttgttcctcgactcgtcgagcttctccagcatcaatcaccatctgtgcttattcctgcccttcgtagtattggtaacattgtcactggagatgatctgcagacacagtgtgtaattagtcatggtgcacttcttagccttttgagccttctgactcacaatcataagaagagcatcaaaaaggaagcttgctggacaatctcaaatatcactgctggaaacagggaccagattcaggctgtgtgtgaagctggtttgatttgccctcttgtcaatctgcttcaaaatgcggagtttgatataaagaaagaagctgcgtgggcaatatcaaatgccacttcaggtggttctcctgaccaaatcaagtacatggtggaacagggagtcgtgaaccactgtgtgatcttttggtgtgccctgatccaaggattatcactgtgtgtctggaaggattggagaacattttgaaagttggggaagctgaaaaggtcacaggaaataccggggatgtaaacttttatgcacagctgatcgatgatgctgagggattagaaaagattgagaatctgcagagtcatgacaacagcgaaatctatgagaaggcagtgaagattcttgaaacgtactggttggaagaggaagatgaaactttaccacctggtgatccctctgcacaaggcttccagtttggaggaggtaatgatgcagccgtaccaccaggtggattcaacttccagtgaaggagctgaacatgacgatttgaagagtcgaaggagcttaaagagtttgggggcactggttaaaaagggtatgattagagagtctggtcttctgtgtaaaagtcagatggggtgccttacttagtctggcctggtccggtcagatccagtggttggtgggtttgagtcatggaataagcttgttgggggggagttgggtaggagtcatcaagggatatttatttttgggaaagggtttataagtttttaaagtgtgatctgatgagaatgtgtctctctgggtttttgttacatttgtactacacaacactgcaaagtcaaacataaaaaagttggtcaaactttatttggtcttattgg

SEQ ID NO: 102316 - protein, 363 aa, Arabidopsis thaliana
  peptide (1)..(363): Ceres Seq. ID no. 13609957
MVGGVWSDDRSLQLEATTQFRKLLSIERSPPIEEVIDAGVVPRFVEFLTREDYPQLQFEAAWALTNIASGTSENTKVVIEHGAVPIFVQLLASQSDDVREQAVWALGNVAGDSPRCRDLVLGQGALIPLLSQLNEHAKLSMLRNATWTLSNFCRGKPQPPFDQVRPALPALERLIHSTDEEVLTDACWALSYLSDGTNDKIQSVIEAGVVPRLVELLQHQSPSVLIPALRSIGNIVTGDDLQTQCVISHGALLSLLSLLTHNHKKSIKKEACWTISNITAGNRDQIQAVCEAGLICPLVNLLQNAEFDIKKEAAWAISNATSGGSPDQIKYMVEQGVVNHCVIFWCALIQGLSLCVWKDWRTF

SEQ ID NO: 102317 - protein, 223 aa, Arabidopsis thaliana
  peptide (1)..(223): Ceres Seq. ID no. 13609958
MLRNATWTLSNFCRGKPQPPFDQVRPALPALERLIHSTDEEVLTDACWALSYLSDGTNDKIQSVIEAGVVPRLVELLQHQSPSVLIPALRSIGNIVTGDDLQTQCVISHGALLSLLSLLTHNHKKSIKKEACWTISNITAGNRDQIQAVCEAGLICPLVNLLQNAEFDIKKEAAWAISNATSGGSPDQIKYMVEQGVVNHCVIFWCALIQGLSLCVWKDWRTF

SEQ ID NO: 102318 - DNA, 1161 bp, Arabidopsis thaliana
  misc_feature (1)..(1161): Ceres Seq. ID no. 13609977
  misc_feature (1)..(1161): Ortholog of  Ceres SEQ ID NO 12612330 as cited in SEQ ID NO 56418
  misc_feature (1)..(1161): Ortholog of  Ceres SEQ ID NO 13664295 as cited in SEQ ID NO 61486
  misc_feature (1)..(1161): Ortholog of  Ceres SEQ ID NO 15179147 as cited in SEQ ID NO 0
gaagaacaaacacaaaaatggcgacggtaccattgttcacccagtttccctgcaaaaccctaaatccaagctcatcaaacactaaacaccaatcgaaatctccgatcctactaccgattaactcaataaatcggcgatcggagattggagtctctgttcatcggccagatttcaaaatccgagcgacggacatcgacgacgaatggggtcaagatggagtggagagagtatttgcctcatcttcaaccgtatcggtagcagataaagcaatcgaatccgtggaggagacggagaggctaaagagatcactagcggattcgttgtacggaacagatcgaggtttaagcgtatcgagtgatacgagagctgagatcagcgagctcatcacacagctcgagtctaagaaccctactccagctcctaacgaagctctgtttctcctcaacggcaaatggatcctcgcctacacgtcgttcgtggggttgttcccattgctctcacgaagaattgaaccgttggttaaagtggatgagatctcacaaaccattgattccgatagcttcaccgttcaaaactctgtccggttcgctggtccgttttccacaacgtcgtttagcaccaacgctaagtttgaaatccgaagtcctaaacgtgtccagattaagttcgagcaaggtgttatagggactcctcagctaacggattcgattgaaataccggaatccgtggaggttcttggtcagaaaatcgatctcaatcccattaaaggtttacttacatcagtccaagacactgcttcttcagtggctagaaccatttcaaaccaaccaccattgaagttttctctgcctagtgacaacacgcagtcgtggctgctcacaacttatctcgacaaggaccttcggatctcgagaggcgatggtggaagcgtctatgtgctcatcaaagaaggaagctctctcttaaacccttaaatcatcataactctcatcacatccatagtaacatatatacaagtatagacccatctgtctatgtttactagtgttgtaactgttatatagcttctttacctgttggagagttataaacttataatggatgttactcttggtatactgtactacaatacatatacataactacatacttgaacaggcc

SEQ ID NO: 102319 - protein, 323 aa, Arabidopsis thaliana
  peptide (1)..(323): Ceres Seq. ID no. 13609978
RTNTKMATVPLFTQFPCKTLNPSSSNTKHQSKSPILLPINSINRRSEIGVSVHRPDFKIRATDIDDEWGQDGVERVFASSSTVSVADKAIESVEETERLKRSLADSLYGTDRGLSVSSDTRAEISELITQLESKNPTPAPNEALFLLNGKWILAYTSFVGLFPLLSRRIEPLVKVDEISQTIDSDSFTVQNSVRFAGPFSTTSFSTNAKFEIRSPKRVQIKFEQGVIGTPQLTDSIEIPESVEVLGQKIDLNPIKGLLTSVQDTASSVARTISNQPPLKFSLPSDNTQSWLLTTYLDKDLRISRGDGGSVYVLIKEGSSLLNP

SEQ ID NO: 102320 - protein, 318 aa, Arabidopsis thaliana; identical to SEQ ID NO: 26031
  peptide (1)..(318): Ceres Seq. ID no. 13609979

SEQ ID NO: 102321 - DNA, 666 bp, Arabidopsis thaliana
  misc_feature (1)..(666): Ceres Seq. ID no. 13609980
  misc_feature (1)..(666): Ortholog of  Ceres SEQ ID NO 13581902 as cited in SEQ ID NO 52223
  misc_feature (1)..(666): Ortholog of  Ceres SEQ ID NO 12585528 as cited in SEQ ID NO 62991
ttcactacaaaatttctcattcgcatcctccacaagaagaaaattcgatcggtcgattagtctttgtttgatttcgaaatggctcgtactaagcaaaccgcgaggaaatccacaggaggcaaagcaccaagaaagcaactcgcaaccaaggcggcaaggaaatctgctccggccaccggaggagtgaagaagccgcatagattccgtccaggaactgttgccttgagagagatcaggaagtatcagaagagcactgagcttctgatccgtaagcttcctttccagcgtctggttcgtgagatagctcaggatttcaagacggatctgaggtttcagagcagtgctgttgctgctttacaagaggctgctgaggcttaccttgttggtttgtttgaagacactaatctttgcgccattcacgctaagagggtcaccatcatgcctaaggatatccagctcgcgaggagaatcagaggagaaagagcttgaagactgttgttatggtttatatcttttgatttagttcgtcaatggaactctatttctggattttgatttgcgttttagtagtaatgggttcttgtaagtgttgagctttggctcgttttaattttcagttgttaggtactttggtttagttagccttgaagtgttcgatgaaatacc

SEQ ID NO: 102322 - protein, 136 aa, Arabidopsis thaliana; identical to SEQ ID NO: 8709
  peptide (1)..(136): Ceres Seq. ID no. 13609981

SEQ ID NO: 102323 - DNA, 642 bp, Arabidopsis thaliana
  misc_feature (1)..(642): Ceres Seq. ID no. 13609982
  misc_feature (1)..(642): Ortholog of  Ceres SEQ ID NO 13581889 as cited in SEQ ID NO 50900
  misc_feature (1)..(642): Ortholog of  Ceres SEQ ID NO 13581902 as cited in SEQ ID NO 52223
  misc_feature (1)..(642): Ortholog of  Ceres SEQ ID NO 12585528 as cited in SEQ ID NO 62991
atcgatcgcattctcaccgaatcaaatccaaaagagcaaatttacaatcttgcgaactcctaaaatggctcgtaccaagcaaacagctcgtaaatccaccggaggaaaggcaccaaggaagcaactcgcgaccaaagctgcgaggaaatcagctccagccaccggaggagtgaagaagccacacagattccgtccaggaacggtggcgttgagagaaatcaggaagtatcagaagagtactgagcttttgatccgtaagcttccgttccagagattggttcgtgagattgctcaagatttcaagacggatctgaggttccagagcagtgccgtcgcagctcttcaggaagcagctgaggcttatcttgttgggctctttgaagatactaatctctgtgcgattcatgctaagagggttacgattatgcctaaggatatccagcttgcgaggagaatcagaggagagagggcttaagtgaacgaagatgatgaagattaagaagactagtcgtttagttatggattagcttgtttggtttcaatggatatgtaaagctgtctcttttcgttttcgagtgttattagttttttacttagatgtgtcttccagatgttcgatgaaatgcctaaaggaaattttaa

SEQ ID NO: 102324 - protein, 157 aa, Arabidopsis thaliana
  peptide (1)..(157): Ceres Seq. ID no. 13609983
SIAFSPNQIQKSKFTILRTPKMARTKQTARKSTGGKAPRKQLATKAARKSAPATGGVKKPHRFRPGTVALREIRKYQKSTELLIRKLPFQRLVREIAQDFKTDLRFQSSAVAALQEAAEAYLVGLFEDTNLCAIHAKRVTIMPKDIQLARRIRGERA

SEQ ID NO: 102325 - protein, 136 aa, Arabidopsis thaliana; identical to SEQ ID NO: 8709
  peptide (1)..(136): Ceres Seq. ID no. 13609984

SEQ ID NO: 102326 - DNA, 1791 bp, Arabidopsis thaliana
  misc_feature (1)..(1791): Ceres Seq. ID no. 13609989
  misc_feature (1)..(1791): Ortholog of  Ceres SEQ ID NO 14312293 as cited in SEQ ID NO 58744
  misc_feature (1)..(1791): Ortholog of  Ceres SEQ ID NO 15177596 as cited in SEQ ID NO 59731
atggatcaccaaaaagctggtactctacaatttaataataaaagaagaagaataaatataggaataaatcgtcttttttggtgtaagctacatataaaattcaaaccgtcaaacacacatacacatcgaaacccttatatttcattttctttctgttttagagaagaaagtttctataattgattgataaatctgaacatcaaagctaagaatttctcttctttttttcttcttaattcatctttccctctccgaaacagaaattcaaaaacaaattcaacacgaaaacgatggcgtttcataacaatcactttaatcatttcaccgaccaacaacaacatcagcctcctcctccgccgcaacagcagcagcaacaacattttcaagaatcagcaccccctaattggctcctccgctccgacaacaacttcctcaatctccacacagctgcctctgccgccgctacaagctccgattctccttcttccgccgccgctaaccagtggctctcacgatcctcatccttcctccaacgaggcaacaccgcaaacaacaacaacaacgaaacatccggtgacgtcatcgaagacgttcccggcggagaggagtcaatgatcggagagaagaaggaggcggagaggtggcagaatgcgagacacaaggcggagatactgtctcatccactatacgagcaacttttgtcggcacacgtggcgtgcctgaggatcgcaacgccggtggatcagcttccgaggatagacgcacagcttgctcagtctcaaaacgtcgtggctaagtactcaactttagaagccgctcaaggactcctcgccggcgatgacaaggagcttgaccacttcatgacgcattatgtactattgctttgctctttcaaagaacaactgcaacagcatgttcgtgttcatgcaatggaagctgttatggcctgttgggagattgaacagtcgcttcaaagttttacaggggtatctcctggtgaaggcacaggagcaacaatgtctgaggatgaagatgagcaagtagagagtgatgctcatttgtttgatggaagcttagatgggttagggtttggtcctctagttcccactgagagcgagagatctttgatggaacgagtcagacaagaactcaaacatgaactcaagcagggttacaaggagaaaattgtggacataagagaggagatactgaggaagagaagagctggaaaattaccaggagacaccacctctgttctcaaatcatggtggcaatctcattctaagtggccttaccctactgaggaagataaggcgaggttggtgcaggagacgggtttgcagctcaaacagataaacaattggttcatcaatcaaagaaagaggaattggcatagcaatccatcttcttctaccgtctcaaagaataaacgccgaagcaatgcaggtgaaaacagcggaagagaccgttgagatcaagcttgcatgtagagatccaaaagctttatagaaaggtggaggcatgaagacaaagaattcttacacaacaaacgtaggacgtaattttgtgccagtacatggtatggctttcatatttggtaatgattagggccacacaaaattaaaccccaaagcatgatttgtaatatgaggttttagatggactttatgataggatcgtcagtcttcactgccatctccattctccaccatcaatccatcattatatcttgtgaataacatggaaatttctcgttatgcatttaatttgtgcaatcattggccgtaatct

SEQ ID NO: 102327 - protein, 393 aa, Arabidopsis thaliana
  peptide (1)..(393): Ceres Seq. ID no. 13609990
MAFHNNHFNHFTDQQQHQPPPPPQQQQQQHFQESAPPNWLLRSDNNFLNLHTAASAAATSSDSPSSAAANQWLSRSSSFLQRGNTANNNNNETSGDVIEDVPGGEESMIGEKKEAERWQNARHKAEILSHPLYEQLLSAHVACLRIATPVDQLPRIDAQLAQSQNVVAKYSTLEAAQGLLAGDDKELDHFMTHYVLLLCSFKEQLQQHVRVHAMEAVMACWEIEQSLQSFTGVSPGEGTGATMSEDEDEQVESDAHLFDGSLDGLGFGPLVPTESERSLMERVRQELKHELKQGYKEKIVDIREEILRKRRAGKLPGDTTSVLKSWWQSHSKWPYPTEEDKARLVQETGLQLKQINNWFINQRKRNWHSNPSSSTVSKNKRRSNAGENSGRDR

SEQ ID NO: 102328 - protein, 286 aa, Arabidopsis thaliana
  peptide (1)..(286): Ceres Seq. ID no. 13609991
MIGEKKEAERWQNARHKAEILSHPLYEQLLSAHVACLRIATPVDQLPRIDAQLAQSQNVVAKYSTLEAAQGLLAGDDKELDHFMTHYVLLLCSFKEQLQQHVRVHAMEAVMACWEIEQSLQSFTGVSPGEGTGATMSEDEDEQVESDAHLFDGSLDGLGFGPLVPTESERSLMERVRQELKHELKQGYKEKIVDIREEILRKRRAGKLPGDTTSVLKSWWQSHSKWPYPTEEDKARLVQETGLQLKQINNWFINQRKRNWHSNPSSSTVSKNKRRSNAGENSGRDR

SEQ ID NO: 102329 - protein, 203 aa, Arabidopsis thaliana
  peptide (1)..(203): Ceres Seq. ID no. 13609992
MTHYVLLLCSFKEQLQQHVRVHAMEAVMACWEIEQSLQSFTGVSPGEGTGATMSEDEDEQVESDAHLFDGSLDGLGFGPLVPTESERSLMERVRQELKHELKQGYKEKIVDIREEILRKRRAGKLPGDTTSVLKSWWQSHSKWPYPTEEDKARLVQETGLQLKQINNWFINQRKRNWHSNPSSSTVSKNKRRSNAGENSGRDR

SEQ ID NO: 102330 - DNA, 1135 bp, Arabidopsis thaliana
  misc_feature (1)..(1135): Ceres Seq. ID no. 13609993
  misc_feature (1)..(1135): Ortholog of  Ceres SEQ ID NO 15178299 as cited in SEQ ID NO 0
  misc_feature (1)..(1135): Ortholog of  Ceres SEQ ID NO 15226331 as cited in SEQ ID NO 0
gaaccaacctcccttaggcactttctacagagcagctaatcaaaaaaaaaaaaaaaaaaccttgttcttctcttcttcttcctctctcacaaatttgactttcatagaagaaaaaaatggtgactacatcgtcacgaaccaagtcaaacggaccggtgcttcgttcacaatcaccgtcaggtcgattttgcggtggttactcaagagccgttccgtcatcttcttcatcagctttcgcttcatcaacgagttctagcttttcatctccgtcgtcagcttttttcagcaatcaccgtcatcacgagagcaatcacagtcaccaccgatctgcgtcaccgactcgtgtgaatctctacacagcgcaaccgatgtctcagtcgtttcgttactctctcgatagcagatctatatctccgactaacaaatcgatctccgtttcgaagaatcagccaccgagccataatcacaagatctcaaggagatgtatgtgttctccgacgacgcatccaggatctttcagatgcagtctacataagaacgtagcgaatccacatggtcaaggtacagcttcgtatacaacgaatggattgaatatgcgtcgatctgcgatgactaattcgctggtgagaattggtggtgttgaaggagagtgggtgagaagagctttgactactttgattcgaccttcttcgcatcatctgaaaagacgagctgcttatcagccacgtcctagtcgactctcaatcatggcgaaagctgatgagaattgattttgatctggattttggttaattcaggtttgttttgtttgttgttcttctctctttaaacgaaaaccaccacaggatttagtagatccggcgaagaagtcttgttatgaagctgaggtctgcgaagaagaatcatcctcgagaaatcgagattttgtaaaaggaagaaacacacacctatcataatttttttgttgttgggtgaaagaagatgctagaatgcattgtacatacgttctcttttttactgtttttgttgctctctcttgcgtctttgtcgaaccccaaaaaaaaaaaaatgttcggagtctcaccaaaaattagagacctaaaatcgaaaatcaaagaactgaatctaatttctg

SEQ ID NO: 102331 - protein, 217 aa, Arabidopsis thaliana; identical to SEQ ID NO: 22246
  peptide (1)..(217): Ceres Seq. ID no. 13609994

SEQ ID NO: 102332 - protein, 133 aa, Arabidopsis thaliana; identical to SEQ ID NO: 22247
  peptide (1)..(133): Ceres Seq. ID no. 13609995

SEQ ID NO: 102333 - DNA, 1653 bp, Arabidopsis thaliana
  misc_feature (1)..(1653): Ceres Seq. ID no. 13609996
  misc_feature (1)..(1653): Ortholog of  Ceres SEQ ID NO 13656177 as cited in SEQ ID NO 64997
atatttaattttcttcagtcagagatttcgaaaccctagtcgatttcgagatccaactaactctgctccttatctcagcttgttgaatttgcgaagtatgggagacgctagagacaacgaagcctacgaggaggagctcttggactatgaagaagaagacgagaaggtcccagattctggaaacaaagttaacggcgaagctgtgaaaaaagggtacgtgggaatacacagttctggattcagagacttccttttgaaaccggagcttctcagagctattgttgactcaggatttgaacatccatctgaagtgcaacacgaatgtatccctcaagctatcttgggtatggatgttatctgccaagcaaagtctggtatggggaagactgctgtgtttgtcctgtctactctacaacagattgaaccatctcctggccaggtttctgcacttgtcttgtgccatacaagagagctagcttaccagatctgcaatgagtttgtgcgattcagtacctatctgcctgatacaaaagtttcggtgttctatggtggagtcaacattaaaattcacaaagacttgctgaagaatgaatgtcctcacattgttgttggtacccctggtcgagtgcttgcacttgccagggagaaagatctctctttgaagaatgtgaggcattttattcttgatgagtgtgataaaatgctcgagtcacttgacatgcgaagggatgtgcaggagattttcaagatgactcctcatgacaaacaagtaatgatgttctcagcaacgctcagcaaagagatacgcccagtctgcaagaagtttatgcaagatccaatggaaatatatgttgatgatgaagccaagttgactcttcatggacttgtccagcactacatcaaactgagcgagatggagaaaaatcgcaagttgaatgaccttcttgatgcgttggacttcaatcaagttgtcatttttgtgaagagcgtgagcagggctgcggagctgaacaagttactggtggaatgcaatttcccctcaatatgcatacactctggcatgtctcaagaagagaggttgactcgatacaaaagtttcaaggaagggcacaagaggatccttgtggcgactgacttggtaggaagagggattgacatagagcgtgtcaacattgttatcaactatgacatgccagattctgcggatacctatcttcatagggttgggagagctggtagatttggaaccaagggtcttgcaatcacatttgttgcatctgcttcagattcagaggtccttaatcaggttcaagagaggtttgaggtcgatataaaggagcttcctgagcagattgatacatcgacttacatgccgtcttaaacaagtagcatcatctctgaggaacgaacctcttcagatttcaaccttttaggtgttcaaaggggtcatggaggtccacaactatctctcacaccgtttgttgcttcgctattttagacttttctatgaggacaagtttttccatatatttagaccgttttgtaactcttgaaaaatgagattgagctactctccaaatcgcgcacagttgagagctctcctgttttttgtactagtgatggttatctttaaaatattaagatttcaggatt

SEQ ID NO: 102334 - protein, 459 aa, Arabidopsis thaliana; identical to SEQ ID NO: 30126
  peptide (1)..(459): Ceres Seq. ID no. 13609997

SEQ ID NO: 102335 - protein, 427 aa, Arabidopsis thaliana; identical to SEQ ID NO: 20810
  peptide (1)..(427): Ceres Seq. ID no. 13609998

SEQ ID NO: 102336 - protein, 344 aa, Arabidopsis thaliana; identical to SEQ ID NO: 20811
  peptide (1)..(344): Ceres Seq. ID no. 13609999

SEQ ID NO: 102337 - DNA, 1276 bp, Arabidopsis thaliana
  misc_feature (1)..(1276): Ceres Seq. ID no. 13610006
  misc_feature (1)..(1276): Ortholog of  Ceres SEQ ID NO 15170239 as cited in SEQ ID NO 54977
  misc_feature (1)..(1276): Ortholog of  Ceres SEQ ID NO 12615622 as cited in SEQ ID NO 62802
  misc_feature (1)..(1276): Ortholog of  Ceres SEQ ID NO 13596203 as cited in SEQ ID NO 68499
aacattgtcttttcgggttaatttcttcttcttcttccttttcttactaaattctcttagggttttagtcatacttaatggcttccaattcggagaaaaatcctcttctttcagatgagaaacccaaatcgacggaggagaataagagttctaagccggaatcagcttctgggagttcaacttcatcagctatgcctggcttgaatttcaatgcttttgatttctctaatatggctagtattctcaacgatcctagcatcagagaaatggctgagcaaatagctaaagatcctgcgtttaaccaattggctgagcagcttcagagatctattcctaacgctggccaggaaggtggtttccctaactttgatcctcaacagtatgtcaatacaatgcaacaggttatgcataaccctgagtttaagacaatggccgagaaacttggtaccgccttagttcaggatccacaaatgtctccttttttggatgctttctcgaatcctgaaacagcagaacactttactgagcgtatggcgcggatgaaagaagatccagagttgaaacctatactagatgagattgatgctggtggtccttctgccatgatgaagtactggaatgatccagaagtgctgaaaaagctgggtgaagcaatgggtatgcctgttgctggcttaccagaccagactgtttcagctgaacctgaggtagcagaagaaggtgaagaagaagagtctattgttcaccaaactgccagtcttggtgatgttgagggtttgaaagctgccttggcatctggtggtaacaaagatgaagaagattctgaaggaaggacagcattgcattttgcttgtggatacggcgagttgaaatgtgctcaagttcttatcgatgctggagcaagtgttaatgcggttgacaaaaacaagaacacacctctgcattatgctgctggttacgggaggaaagagtgtgtaagccttctcctggagaatggtgctgcagtcactctgcaaaacctagacgagaagacgccaattgatgtagcgaagctcaacagccagctggaggtggtgaagctgcttgagaaggatgctttcctttgagctctgctggttaaaggaaagctctaagctcatattgtctttgaggcatttgtcttgtgtgtgtcctgaaccagtttcacaggctttttgtgtacactttttattagttcctctcttcttctaaatttgtctcttatgttgttttaaaagtcaataaagaaagaaatagc

SEQ ID NO: 102338 - protein, 342 aa, Arabidopsis thaliana; identical to SEQ ID NO: 71908
  peptide (1)..(342): Ceres Seq. ID no. 13610007

SEQ ID NO: 102339 - protein, 304 aa, Arabidopsis thaliana; identical to SEQ ID NO: 71909
  peptide (1)..(304): Ceres Seq. ID no. 13610008

SEQ ID NO: 102340 - protein, 291 aa, Arabidopsis thaliana; identical to SEQ ID NO: 71910
  peptide (1)..(291): Ceres Seq. ID no. 13610009

SEQ ID NO: 102341 - DNA, 1293 bp, Arabidopsis thaliana
  misc_feature (1)..(1293): Ceres Seq. ID no. 13610010
  misc_feature (1)..(1293): Ortholog of  Ceres SEQ ID NO 15170659 as cited in SEQ ID NO 67270
ggagaagagatcacagagatctgagagcttgaaacaatggagtaccggaaaatcaaagatgaggacgatcatgacgttgcttctgatatcgagagtgtgaaaggaaaatctcataccgttgcttcgagtaacattgcaatggctactctgggtgttggatccagtgaacggatcaactggaaacgaaagggtgtagtaacatgtgcactgacgattctgacgagttctcaagcgatacttatcgtgtggtcgaaacgagctgggaagtatgagtatagtgttacaaccgccaactttttggttgaactctgaaatgtgcgttatctcttcttgctttgacaaggatatggaaaaatgaaggtgttactgacgacaacaggttaagcacaacatttgatgaagttaaagtctttccaattcccgcagcattgtatctttttaagaatttgttacagtattatatttttgcatatgtagacgccccaggctatcagatattgaagaacttgaacatcataagtaccggtgtcttgtacagaattatactgaagagaaaattgagcgagattcagtgggcgggtttcattctattgtgttgcggatgcaccactgctcagttgaattcaaattctgatcgtgttcttcagacatctcttcctggctggactatggcaattgtcatggctcttttaagtggtttcgccggagtgtacacagaggccattattaaaaagcgaccttcaaggaatataaatgtacagaacttctggctatatgtctttgggatggctttcaatgctgttgctatagtgatccaagattttgatgccgttgcaaataagggattcttccatggttactccttcatcacattactcatgattcttaaccatgctctcagtggcattgctgtgtcgatggtgatgaaatatgcagacaatatcgtgaaggtttattcgacatcagtggcgatgcttctcaccgcagttgtctctgtattcctcttcaattttcatctttccttagccttcttcttgggttcaacggtcgtctctgtttcagtatatttacattccgcagggaagctacgatagtaaagatcttcacacttacatctaccaagaaaacaccattattctagtacagagataaagcttttgaacgattacgattttgtttttcgtgtaggtatattcacatttgtgcttctgtattgatttttttttccgtctcatgaaaccttctattctcatttgtacgataccaaaacttatcaagaatagttacaatttc

SEQ ID NO: 102342 - protein, 141 aa, Arabidopsis thaliana
  peptide (1)..(141): Ceres Seq. ID no. 13610011
MAIVMALLSGFAGVYTEAIIKKRPSRNINVQNFWLYVFGMAFNAVAIVIQDFDAVANKGFFHGYSFITLLMILNHALSGIAVSMVMKYADNIVKVYSTSVAMLLTAVVSVFLFNFHLSLAFFLGSTVVSVSVYLHSAGKLR

SEQ ID NO: 102343 - protein, 137 aa, Arabidopsis thaliana
  peptide (1)..(137): Ceres Seq. ID no. 13610012
MALLSGFAGVYTEAIIKKRPSRNINVQNFWLYVFGMAFNAVAIVIQDFDAVANKGFFHGYSFITLLMILNHALSGIAVSMVMKYADNIVKVYSTSVAMLLTAVVSVFLFNFHLSLAFFLGSTVVSVSVYLHSAGKLR

SEQ ID NO: 102344 - protein, 102 aa, Arabidopsis thaliana
  peptide (1)..(102): Ceres Seq. ID no. 13610013
MAFNAVAIVIQDFDAVANKGFFHGYSFITLLMILNHALSGIAVSMVMKYADNIVKVYSTSVAMLLTAVVSVFLFNFHLSLAFFLGSTVVSVSVYLHSAGKLR

SEQ ID NO: 102345 - DNA, 1395 bp, Arabidopsis thaliana
  misc_feature (1)..(1395): Ceres Seq. ID no. 13610027
  misc_feature (1)..(1395): Ortholog of  Ceres SEQ ID NO 13646595 as cited in SEQ ID NO 20561
  misc_feature (1)..(1395): Ortholog of  Ceres SEQ ID NO 15171614 as cited in SEQ ID NO 60106
  misc_feature (1)..(1395): Ortholog of  Ceres SEQ ID NO 13597574 as cited in SEQ ID NO 64677
  misc_feature (1)..(1395): Ortholog of  Ceres SEQ ID NO 13597843 as cited in SEQ ID NO 64850
  misc_feature (1)..(1395): Ortholog of  Ceres SEQ ID NO 13597678 as cited in SEQ ID NO 65375
  misc_feature (1)..(1395): Ortholog of  Ceres SEQ ID NO 12779098 as cited in SEQ ID NO 67698
  misc_feature (1)..(1395): Ortholog of  Ceres SEQ ID NO 13596180 as cited in SEQ ID NO 67941
  misc_feature (1)..(1395): Ortholog of  Ceres SEQ ID NO 13591190 as cited in SEQ ID NO 68044
  misc_feature (1)..(1395): Ortholog of  Ceres SEQ ID NO 13595961 as cited in SEQ ID NO 68223
atggaccagcctcacgcgcttctagtggctagccctggcttgggtcacctcatccctatcctggagctcggcaaccgtctctcctccgtcctaaacatccacgtcaccattctcgcggtcacctccggctcctcttcaccgacagaaaccgaagccatacatgcagccgcgatgcgagccatgaagcccgcggtacgagatgccgtgaaattaatgaaacgaaaaccaacggtcatgattgttgactttttgggtacggaactgatgtccgtagccgatgacgtaggcatgacggctaaatacgtttacgttccaactcatgcgtggttcttggcagtcatggtgtacttgccggtgttagatacggtagtggaaggtgagtatgttgatattaaggagcctttgaagataccgggttgtaaaccggtcggaccgaaggagctgatggaaacgatgttagaccggtcgggccagcaatataaagagtgtgtacgagctggcttagaggtacctatgagcgatggtgttttggtaaatacttgggaggagttacaaggaaacactctcgctgcgcttagagaggacgaagaattgagccgggtcatgaaagtaccggtttatcctattgggccaattgttaggactaaccagcatgtagacaaacccaatagtatattcgagtggctagacgagcaacgggaaaggtcagtggtgtttgtgtgtttagggagcggtggaacgttgacgtttgagcaaacagtggaactcgctttgggtttagagttaagtggtcaaaggttcgtttgggttctacgtaggcccgcttcatatctcggggcgatctccagcgatgatgaacaggtaagtgccagtctacctgaaggtttcttggaccgcacgcgtggtgtggggattgtggttacgcaatgggcaccacaagttgagatcttgagccatagatcgatcggtgggttcttgtctcactgcggttggagttcggctttggaaagtttgactaaaggagttccgatcatcgcttggcctctttatgcggagcagtggatgaatgccacgttattgactgaggagatcggtgtggccgttcgtacatcggagttaccgtcggagagagtcatcggaagggaagaagtggcatctctggtgagaaagattatggcggaagaggatgaagaaggacagaaaattagggctaaagctgaggaggtgagggttagctccgaacgagcttggagtaaagacgggtcatcttataattctctattcgaatgggcaaaacgatgttatcttgtaccgtgattcgagaataacatcatgaacaacaatttctgtttaagatatcaactttttctatatgaatatatattaaggtgtgtt

SEQ ID NO: 102346 - protein, 438 aa, Arabidopsis thaliana
  peptide (1)..(438): Ceres Seq. ID no. 13610028
MDQPHALLVASPGLGHLIPILELGNRLSSVLNIHVTILAVTSGSSSPTETEAIHAAAMRAMKPAVRDAVKLMKRKPTVMIVDFLGTELMSVADDVGMTAKYVYVPTHAWFLAVMVYLPVLDTVVEGEYVDIKEPLKIPGCKPVGPKELMETMLDRSGQQYKECVRAGLEVPMSDGVLVNTWEELQGNTLAALREDEELSRVMKVPVYPIGPIVRTNQHVDKPNSIFEWLDEQRERSVVFVCLGSGGTLTFEQTVELALGLELSGQRFVWVLRRPASYLGAISSDDEQVSASLPEGFLDRTRGVGIVVTQWAPQVEILSHRSIGGFLSHCGWSSALESLTKGVPIIAWPLYAEQWMNATLLTEEIGVAVRTSELPSERVIGREEVASLVRKIMAEEDEEGQKIRAKAEEVRVSSERAWSKDGSSYNSLFEWAKRCYLVP

SEQ ID NO: 102347 - protein, 381 aa, Arabidopsis thaliana
  peptide (1)..(381): Ceres Seq. ID no. 13610029
MRAMKPAVRDAVKLMKRKPTVMIVDFLGTELMSVADDVGMTAKYVYVPTHAWFLAVMVYLPVLDTVVEGEYVDIKEPLKIPGCKPVGPKELMETMLDRSGQQYKECVRAGLEVPMSDGVLVNTWEELQGNTLAALREDEELSRVMKVPVYPIGPIVRTNQHVDKPNSIFEWLDEQRERSVVFVCLGSGGTLTFEQTVELALGLELSGQRFVWVLRRPASYLGAISSDDEQVSASLPEGFLDRTRGVGIVVTQWAPQVEILSHRSIGGFLSHCGWSSALESLTKGVPIIAWPLYAEQWMNATLLTEEIGVAVRTSELPSERVIGREEVASLVRKIMAEEDEEGQKIRAKAEEVRVSSERAWSKDGSSYNSLFEWAKRCYLVP

SEQ ID NO: 102348 - protein, 378 aa, Arabidopsis thaliana
  peptide (1)..(378): Ceres Seq. ID no. 13610030
MKPAVRDAVKLMKRKPTVMIVDFLGTELMSVADDVGMTAKYVYVPTHAWFLAVMVYLPVLDTVVEGEYVDIKEPLKIPGCKPVGPKELMETMLDRSGQQYKECVRAGLEVPMSDGVLVNTWEELQGNTLAALREDEELSRVMKVPVYPIGPIVRTNQHVDKPNSIFEWLDEQRERSVVFVCLGSGGTLTFEQTVELALGLELSGQRFVWVLRRPASYLGAISSDDEQVSASLPEGFLDRTRGVGIVVTQWAPQVEILSHRSIGGFLSHCGWSSALESLTKGVPIIAWPLYAEQWMNATLLTEEIGVAVRTSELPSERVIGREEVASLVRKIMAEEDEEGQKIRAKAEEVRVSSERAWSKDGSSYNSLFEWAKRCYLVP

SEQ ID NO: 102349 - DNA, 637 bp, Arabidopsis thaliana
  misc_feature (1)..(637): Ceres Seq. ID no. 13610031
  misc_feature (1)..(637): Ortholog of  Ceres SEQ ID NO 13504026 as cited in SEQ ID NO 58279
  misc_feature (1)..(637): Ortholog of  Ceres SEQ ID NO 15226827 as cited in SEQ ID NO 69141
gaaaagattctgacgctggtagtggtgagtggtgagcacggccaaaaggattttggtattgaaaaatggcatcaaaattggttcaacttcaatcaaaggcatgtcaggcttcaaagtttgtggccaagcatgggaattcgtactacaagcaattgttggagcagaacaagcaatacatccaagagcctgcaactatagagaagtgcagtgaattgtctaaacaattgctctacactcgtcttgctagcattcccgggcgctacgaaacatttaggaaagaagtagactacgcaaagaacttattgaagaacagagcgaatctgaaggtggaagatgcaggaatcgctgcattgtttggcttagaatgctttgcttggttttgcgcaggtgaaatcgtcggcagaggattcactttcaccggctactacccttgaaattgagacaacaaacaaccaggtcgccggaatattcttcctgacgcttgtaactccctccatatgattcctcacttgaactatatatacttcctcgaatccatttatattttcagttttttcctgaaacagaagtgttggagctaagggaaaaaaaaacattttggtaaagctcttaataagttgagaaaaatgcatttgat

SEQ ID NO: 102350 - protein, 122 aa, Arabidopsis thaliana; identical to SEQ ID NO: 29646
  peptide (1)..(122): Ceres Seq. ID no. 13610032

SEQ ID NO: 102351 - protein, 65 aa, Arabidopsis thaliana; identical to SEQ ID NO: 29647
  peptide (1)..(65): Ceres Seq. ID no. 13610033

SEQ ID NO: 102352 - DNA, 1561 bp, Arabidopsis thaliana
  misc_feature (1)..(1561): Ceres Seq. ID no. 13610034
  misc_feature (1)..(1561): Ortholog of  Ceres SEQ ID NO 15170420 as cited in SEQ ID NO 54814
  misc_feature (1)..(1561): Ortholog of  Ceres SEQ ID NO 14312785 as cited in SEQ ID NO 55622
  misc_feature (1)..(1561): Ortholog of  Ceres SEQ ID NO 13596925 as cited in SEQ ID NO 62299
cttgcgttttcgtcccacaatctttgtcgtggttttctgctgtcttcttctccgtcgaacttctccgaccacttcgtatagagagagagagtgacgaagagtttacggaatcgaatccaataatgagtactgcgtcggcttttagttcaatccaaggatgctggttcaagggcgaaaggaaaatgtgtagcggataagcgagccaagaggcttactttgggatcccatgtggcttcgccatcttcaatgagcttcagagtttcagctagtagttctgttaaacctgaaaaggatattaggattggtcttcttggtgcaagtggctacactggtgctgagatcgttaggcttcttgcaaatcatccgcatttccaggtcactttgatgactgctgatagaaaagctggccagtcaatggaaagcgttttcccacacctgagagctcaaaaactacctactttggtctcggtaaaggatgcagatttttctactgtggatgctgtattctgctgtttacctcacggaacaactcaggaaatcatcaaggaactgcctactgcattgaaaatcgttgatctttcagcggacttccggttgcgtaatattgcagaatatgaagaatggtatggtcagcctcacaaggcagtagagttacagaaagaagttgtgtatggtctaacagagatactaagggaggacataaaaaaggcacgacttgtggctaacccaggctgttacccgactacgattcaacttcctcttgttcctttactaaaggcaaatctcatcaaacatgaaaacatcattatcgatgcaaaatctggtgttagtggagcaggacgtggtgctaaggaggcaaatctttactctgagatagctgaaggcatttcttcttatggtgtcacccgtcatcgccatgttcctgaaattgaacagggattatctgatgttgcacagtcaaaagtaacagtcagttttacgccacatctcatgccaatgatccgtggaatgcaatcgactatatatgtggaaatggctcccggggttagaaccgaagatttacaccagcaattgaagacgtcttatgaggatgaagaatttgtcaaagtgttggatgaaggagttgttcctcggacacacaacgttagaggatccaactattgtcatatgagtgtctttcctgatcgaattcctggaagagctatcataatctcagtgattgataatcttgtgaaaggagcttcgggacaagcgttgcagaatcttaacataatgttgggatatcccgaaacaacggggctcctacaccagccgcttttcccttaaaaatcccacctttaaatcgatgaccaatctgaagctgttgagacggcaatgttaagcataaagatggttggttatatgattcatatttatagacaataaagcctcttcttttaccattacaaataaatggttttgttgtttgtttattaaggttttgatgaacctttattcttgttatctctattttctgaattgcaattttcgtttgagtcacaaaagaaagttgaacttattc

SEQ ID NO: 102353 - protein, 359 aa, Arabidopsis thaliana; identical to SEQ ID NO: 43181
  peptide (1)..(359): Ceres Seq. ID no. 13610035

SEQ ID NO: 102354 - protein, 313 aa, Arabidopsis thaliana
  peptide (1)..(313): Ceres Seq. ID no. 13610036
MTADRKAGQSMESVFPHLRAQKLPTLVSVKDADFSTVDAVFCCLPHGTTQEIIKELPTALKIVDLSADFRLRNIAEYEEWYGQPHKAVELQKEVVYGLTEILREDIKKARLVANPGCYPTTIQLPLVPLLKANLIKHENIIIDAKSGVSGAGRGAKEANLYSEIAEGISSYGVTRHRHVPEIEQGLSDVAQSKVTVSFTPHLMPMIRGMQSTIYVEMAPGVRTEDLHQQLKTSYEDEEFVKVLDEGVVPRTHNVRGSNYCHMSVFPDRIPGRAIIISVIDNLVKGASGQALQNLNIMLGYPETTGLLHQPLFP

SEQ ID NO: 102355 - protein, 303 aa, Arabidopsis thaliana
  peptide (1)..(303): Ceres Seq. ID no. 13610037
MESVFPHLRAQKLPTLVSVKDADFSTVDAVFCCLPHGTTQEIIKELPTALKIVDLSADFRLRNIAEYEEWYGQPHKAVELQKEVVYGLTEILREDIKKARLVANPGCYPTTIQLPLVPLLKANLIKHENIIIDAKSGVSGAGRGAKEANLYSEIAEGISSYGVTRHRHVPEIEQGLSDVAQSKVTVSFTPHLMPMIRGMQSTIYVEMAPGVRTEDLHQQLKTSYEDEEFVKVLDEGVVPRTHNVRGSNYCHMSVFPDRIPGRAIIISVIDNLVKGASGQALQNLNIMLGYPETTGLLHQPLFP

SEQ ID NO: 102356 - DNA, 1201 bp, Arabidopsis thaliana
  misc_feature (1)..(1201): Ceres Seq. ID no. 13610042
  misc_feature (1)..(1201): Ortholog of  Ceres SEQ ID NO 12615485 as cited in SEQ ID NO 62822
gagaaactgtgaggccaaaaagtttggttcttgagaaatgatggcggctcgtactcattgtatcaaccttatccccaaagtatgtcttccacaatccttcagaactggagaatcagtgactaatctcagatttgattgcgtctctaagtcatcgaagctttctctcaagacatcatgtggaagatcaagaacgcatcaccggaggcaaaatctcagcatccggtccgtgtttactggaatcgtggaggaaatgggtgaagtcaaggacttgggaatggccgatcacggaggattcgacctcaaaatcggagcgagagtggtgttagaggacgtgaagctcggtgacagtatcgccgtgaacggtacttgtttaacggtgacggagtttaacgcagaggagttcacagtagggttagcaccggagacgctgagaaaaacatcgttggaggagttaaagaaaggatctccggtgaatctggagcgtgcgttgcagccagtgagcaggatgggtggacacgtggttcagggacacgtggatgggacgggagtgattgaatcaatggaggtagagggtgattctttgtgggtgaaggtgaaagctgacaagggtttgttgaaatacattgtgcctaaaggatttgtggctgttgatgggactagcttgacggttgttgatgtgtttgatgaagagagctgtttcaatttcatgatgattgcttatacgcaacagaatgtagtgattccgactaagaagattgggcagaaagtgaatcttgaggttgatatcatggggaagtatgttgagaggcttctcaccagtggtggcttctccaaaggaaaagaaaatatttgatttgatgggacttgggagtgggagctttgttgagcggagcttgaccttttggcctggggttatatgtatcttaacctctgtttcttcgtaatggtgctagtgaacagtccacgcatttaggcgcggtgagaaaagtaaatcaaccttattgagtaatgatgatcaaatcattcgtgtaataaacccaagaatcaaattttgtaatatggcagtgccccttttaaaacttagattctgttatgcttttgttagaccttcatatgtatatctttaagtgtttcgagaagtttataagaaagggagttgtatacataagaccaagaggcatatataaatgtgtttttaccc

SEQ ID NO: 102357 - protein, 271 aa, Arabidopsis thaliana; identical to SEQ ID NO: 25759
  peptide (1)..(271): Ceres Seq. ID no. 13610043

SEQ ID NO: 102358 - protein, 270 aa, Arabidopsis thaliana; identical to SEQ ID NO: 25760
  peptide (1)..(270): Ceres Seq. ID no. 13610044

SEQ ID NO: 102359 - protein, 200 aa, Arabidopsis thaliana; identical to SEQ ID NO: 25761
  peptide (1)..(200): Ceres Seq. ID no. 13610045

SEQ ID NO: 102360 - DNA, 1889 bp, Arabidopsis thaliana
  misc_feature (1)..(1889): Ceres Seq. ID no. 13610046
  misc_feature (1)..(1889): Ortholog of  Ceres SEQ ID NO 13486771 as cited in SEQ ID NO 20321
  misc_feature (1)..(1889): Ortholog of  Ceres SEQ ID NO 13595840 as cited in SEQ ID NO 56647
  misc_feature (1)..(1889): Ortholog of  Ceres SEQ ID NO 13582260 as cited in SEQ ID NO 59799
  misc_feature (1)..(1889): Ortholog of  Ceres SEQ ID NO 15180619 as cited in SEQ ID NO 0
tccattaattctgctgctgcaaattctatcgaactggtgagttttgttaatctctttcctcgttcgtccttgtctgtatatcagatcgatctctattaccgttttagcttgttcttgatctttgtcaacataaaaacaatcaaacaaagtttcttctatgagttctggtctgaacgaagatttcctcgattgtatcgtgcgtttagaggagacacatgttcaacaaggcttcgatgagggttacgaagaaggtcttgtgtccggtcgtgaagacgctcgtcatctgggtttgaaactcgggttcgagacaggcgagctgattggattctacagaggttgctctgctctttggaattcagctctccgtattgatcctacacgcttctctcctcagctccataagcatctcaatgatttccatgtcttgctcgataaaatcccgcttttggatcccgaggacgaagctaaagacgggatcaaggatgatctcagagtcaaattcagcatcatttgtgcatctctcggcttttccaagaaacaatttgagtataaaggatacccgaatccttcctccaatctcgacttttaagacctccctccatcaaaacactcttgtattgtatgtatggctttcaaagtttctctcgtttcctcaaagtttgtatttttaagagaagtgtgtgtgtagacaatctatgttttattggcttgtccttttttctggacatgtgaatgctgaccacaagtctaaatctggtggataacttcttttttagccttataatgaacaaacaaactcacatctgtagatatatatttgtataggtggtcggaggagatgttgagagaaatgcttggttgttgcaaggtttacatatctgaagcgcggaataagacggccctcgaagccattgagagagctttaaagccttttccaccagctgcaattgtcaacaagtttgaagatgcggcttatggcagggttggttacactgttgtatcctcgcttgctaacgggtcgtcttcttccttgaagaatgcggtgtttgctatggttaagactgctctcgacactatcaatcttgagttgcactgtggatctcatccccgccttggagtggttgaccacatatgctttcaccccttatctcaaacctctatagaacaagtttcttccgtcgccaattcccttgcaatggatatcggctccattcttcgagttcctacatatctctatggagcagcagaaaaggagcagtgcaccctggattcgatcagaagaaagctggggtacttcaaggcaaacagggagggacatgaatgggcaggtgggtttgacctggagatggtgccactgaagccagacgcagggccacaagaggtgagcaaagccaaaggggttgtagcggttggggcgtgtgggtgggtaagtaactataacgtgcctgtcatgtcaaacgatctcaaggcagtgaggagaatagcgaggaagacgagcgagagaggagggggcttggcttcagtgcagacaatggcgctggtgcacggggaaggagtcatagaggttgcctgtaacttgttgaatccaagccaagtggggggagatgaagtacagggactgatcgagaggcttggcagagaggaaggtctgcttgtgggaaaagggtattatacggactatacacctgaccagatcgttgaaagatatatggacttgctcaacaattcataaatttcaaagtaaaaaaagtaaaaacagtatgatgttgtcattcttagaacgtattattaccgacatcgatcatttatcttcattttgtgtttagatgtgatatacattgccatgagtgacaattgaaattagcaaagattaaataaaaagtgaaatg

SEQ ID NO: 102361 - protein, 297 aa, Arabidopsis thaliana; identical to SEQ ID NO: 20322
  peptide (1)..(297): Ceres Seq. ID no. 13610047

SEQ ID NO: 102362 - protein, 293 aa, Arabidopsis thaliana; identical to SEQ ID NO: 20323
  peptide (1)..(293): Ceres Seq. ID no. 13610048

SEQ ID NO: 102363 - protein, 226 aa, Arabidopsis thaliana; identical to SEQ ID NO: 20324
  peptide (1)..(226): Ceres Seq. ID no. 13610049

SEQ ID NO: 102364 - DNA, 1249 bp, Arabidopsis thaliana
  misc_feature (1)..(1249): Ceres Seq. ID no. 13610058
  misc_feature (1)..(1249): Ortholog of  Ceres SEQ ID NO 15172553 as cited in SEQ ID NO 57496
atcagtttcagcgaaacgatggagcttctctgctcaccaacgtctctttcctcctccttcgctctctcttctgctcttttagtccctcgttcgttctccatgccagggacaaggagattcatggttctgtgtagttcccagaaggaaagtcagatgacagtgtcagtaactggagcaactggattcatagggagacgattggttcagagacttcgtgctgataaccacgctatccgggtcttaacacgctctaaatccaaagctgagcaaatatttcctgccaaggacttcccaggtattgtgattgcagaagaatcggagtggaagaactgtgtacaaggctctactgctgttgtgaacttggcaggactgcctattagtacaaggtggtctcccgagatcaagaaagagattaagggcagccggatccgtgtcacctccaaagttgttgacttaatcaataattcaccagcagaagctaggcctaccgttctagttagcgccacggctgttggttactatggtactagtgagacaggagtattcgacgaaaatagtccatcagggaaggactatcttgcagaggtttgcagagaatgggaaggaactgcattgaaagcaaataaggatgttagagtggcacttatccgcattggtgttgttcttggcaaagacggtggagctttggccatgatgataccctttttccaaatgtttgctggaggacctctgggttccggacaacaatggttctcttggattcacgtggatgacttggtgaacttaatttacgaggccctcactaatccatcttataaaggagttattaatgggactgcgccgaatccggttaggcttggggaaatgtgccagcagctaggcagtgttcttagccgaccatcgtggctaccagttcctgactttgcactcaaagctttgctcggagaaggtgccactgtagttctggagggacagaaggtattacctgtaagagccaaagagcttggttttgaattcaagtataaatacgtgaaggatgcactcagagccattatgcaataaggtgacacacataagcatctttgtaaaattggttttgatcacagaaaatccccagaaaaacaagatattcttttcttttcgtctctatatctttctttttgagtaaaactcgagaaatgtatttatggtaaaaagtgttttcggtgttatctcagaaaccagagatcacagatgtgttgaggatatt

SEQ ID NO: 102365 - protein, 353 aa, Arabidopsis thaliana; identical to SEQ ID NO: 40611
  peptide (1)..(353): Ceres Seq. ID no. 13610059

SEQ ID NO: 102366 - protein, 347 aa, Arabidopsis thaliana; identical to SEQ ID NO: 40612
  peptide (1)..(347): Ceres Seq. ID no. 13610060

SEQ ID NO: 102367 - protein, 320 aa, Arabidopsis thaliana; identical to SEQ ID NO: 40613
  peptide (1)..(320): Ceres Seq. ID no. 13610061

SEQ ID NO: 102368 - DNA, 1056 bp, Arabidopsis thaliana
  misc_feature (1)..(1056): Ceres Seq. ID no. 13610077
  misc_feature (1)..(1056): Ortholog of  Ceres SEQ ID NO 15173936 as cited in SEQ ID NO 61736
  misc_feature (1)..(1056): Ortholog of  Ceres SEQ ID NO 13596373 as cited in SEQ ID NO 67991
atggctgcagcgtcatcagtttcttctccaccgctttgcctcgccggtcgagtagctatagtcacaggatcttctcgaggaataggtcgtgccatagccatccaccttgccgagcttggggctagggtcgtcgttaattactcaactagccccgttgaggctgagaaggttgccacggcgattaccaccaactgttcaaaggacgcggaagtcgccggcaaaagtccacgtgtcattgtggtgaaggctgatatctcagagccgagccaggtaaagtcgcttttcgatgaggcagagcgagtcttcgagtcgccggttcatatcttggttaactcagcggctatagccgatcctaatcattccactatctcagacatgtcagtagaactttttgatcgcattatcagtgtgaacacaagaggtgcgtttatttgtgctagagaagctgcgaataggctaaaacgtggaggcggtggccggataattctcctctcaacatcactggttcaaaccttaaatacaaactatggctcatacacggcttcaaaggcagccgtagaagccatggccaagattcttgcaaaagagctcaaaggaacagagatcacagttaactgtgtttctccgggtcccgtcgccacagaaatgttttacacaggattgagcaatgagattgttgagaaagttaagtcacagaacttatttggtaggatcggtgagaccaaagacatcgcacctgttgttgggttcttagccagtgatgctggcgaatggatcaacggtcaagtcatcatggctaatggtggctgtctcttgtaaagaaagagagtggttattagtcttcttataaaatcaaaagctttcaaatttcaaacgttggatttgatctgatgaaaagaaacatcaataatccatgtatcaataaccagtcaaatacaacctcaagctctgctttatgtgctctgttctcggagataagaattagggtttgtgtactcttcttatcataacgttacaacatccctatacgtttaattatctattacgttattttgt

SEQ ID NO: 102369 - protein, 272 aa, Arabidopsis thaliana
  peptide (1)..(272): Ceres Seq. ID no. 13610078
MAAASSVSSPPLCLAGRVAIVTGSSRGIGRAIAIHLAELGARVVVNYSTSPVEAEKVATAITTNCSKDAEVAGKSPRVIVVKADISEPSQVKSLFDEAERVFESPVHILVNSAAIADPNHSTISDMSVELFDRIISVNTRGAFICAREAANRLKRGGGGRIILLSTSLVQTLNTNYGSYTASKAAVEAMAKILAKELKGTEITVNCVSPGPVATEMFYTGLSNEIVEKVKSQNLFGRIGETKDIAPVVGFLASDAGEWINGQVIMANGGCLL

SEQ ID NO: 102370 - protein, 147 aa, Arabidopsis thaliana
  peptide (1)..(147): Ceres Seq. ID no. 13610079
MSVELFDRIISVNTRGAFICAREAANRLKRGGGGRIILLSTSLVQTLNTNYGSYTASKAAVEAMAKILAKELKGTEITVNCVSPGPVATEMFYTGLSNEIVEKVKSQNLFGRIGETKDIAPVVGFLASDAGEWINGQVIMANGGCLL

SEQ ID NO: 102371 - DNA, 1306 bp, Arabidopsis thaliana
  misc_feature (1)..(1306): Ceres Seq. ID no. 13610084
  misc_feature (1)..(1306): Ortholog of  Ceres SEQ ID NO 14310037 as cited in SEQ ID NO 20603
aactgatcgtataatcattctcacggagacgagtgaccaaaacaaggtctcccgcttcttgcgaagattaaacgaatccatttagattttaaaaaccacacaaaaaaaatatgggtcggctcaagttcgcatgtccggttcttgagatcaatttaatctcagctcaagacttagcccctgtctcaagaaacatgaaaacgtattccgtcgcttggatcaacaccgatcctatgagaaaactcaccacgcgtgttgatcaatccaacagagctaaccctatatggaacgagaagtttgtgtttcgtgtcaacgacaagattctctacgttgacgcatcagcgattgtgattgagatctacgcagcggcttgggctaaagatgctcttgttggtactgtgaatgttcttctcagcgatctttttgctccttggtctggttttggtgatggtaacgacggtggtggtgggaataacaacatgaggcttgtgactcttcagattcgtcgtccttcagggaggctacaagggtttttacgtctcggtgttgcacttcttgacggtggtcaacggagtatgcctttatctattgaggttttcgatggaagtcgaaaaggagagaggaatagtgttaaaagagaccaagaggcttcaagaatgatgcatcgccgtacgaatagcgatcaaacggatttaaccacgtctacgaatgattacggtgtgaaaacaggggttgttactggcaatggaggagaggtggtggtggtggcggtattgttgttggtgcggatagtatggttaatggttcgctttgtagctctgatattggaccatcagcgtctgtggttgcggctgcgattgcgcaagggctttacaatagacagaaaacagcggttaaagcggctaacaaagaggacgcaagttcgatacttgaagggaaaacagagggaattgagcatagagttgaacggtggagagcagagaaaaatggcacgggtggagcgggtggagcggctggatcaagcgatgattctagcgggaaaggaggagcgggaaggagaagaaggaggaggagaagaaaggagaaacaacaagggaggagaaacggtggaggagagggtaagaaagggttgttttcatgttttggaaacgtgtttggatgtgagatttcgataacatgtggcggtggaagcggcggagaaggagacagcacaaagaagagatataataacaataaagtagtaaatcttagtgctgtagacgaaacgtttagtcattctgcgacttgagataagagaaaatgtttactt

SEQ ID NO: 102372 - protein, 353 aa, Arabidopsis thaliana
  peptide (1)..(353): Ceres Seq. ID no. 13610085
MGRLKFACPVLEINLISAQDLAPVSRNMKTYSVAWINTDPMRKLTTRVDQSNRANPIWNEKFVFRVNDKILYVDASAIVIEIYAAAWAKDALVGTVNVLLSDLFAPWSGFGDGNDGGGGNNNMRLVTLQIRRPSGRLQGFLRLGVALLDGGQRSMPLSIEVFDGSRKGERNSVKRDQEASRMMHRRTNSDQTDLTTSTNDYGVKTGVVTGNGGEVVVVAVLLLVRIVWLMVRFVALILDHQRLWLRLRLRKGFTIDRKQRLKRLTKRTQVRYLKGKQRELSIELNGGEQRKMARVERVERLDQAMILAGKEEREGEEGGGEERRNNKGGETVEERVRKGCFHVLETCLDVRFR

SEQ ID NO: 102373 - protein, 326 aa, Arabidopsis thaliana
  peptide (1)..(326): Ceres Seq. ID no. 13610086
MKTYSVAWINTDPMRKLTTRVDQSNRANPIWNEKFVFRVNDKILYVDASAIVIEIYAAAWAKDALVGTVNVLLSDLFAPWSGFGDGNDGGGGNNNMRLVTLQIRRPSGRLQGFLRLGVALLDGGQRSMPLSIEVFDGSRKGERNSVKRDQEASRMMHRRTNSDQTDLTTSTNDYGVKTGVVTGNGGEVVVVAVLLLVRIVWLMVRFVALILDHQRLWLRLRLRKGFTIDRKQRLKRLTKRTQVRYLKGKQRELSIELNGGEQRKMARVERVERLDQAMILAGKEEREGEEGGGEERRNNKGGETVEERVRKGCFHVLETCLDVRFR

SEQ ID NO: 102374 - protein, 313 aa, Arabidopsis thaliana
  peptide (1)..(313): Ceres Seq. ID no. 13610087
MRKLTTRVDQSNRANPIWNEKFVFRVNDKILYVDASAIVIEIYAAAWAKDALVGTVNVLLSDLFAPWSGFGDGNDGGGGNNNMRLVTLQIRRPSGRLQGFLRLGVALLDGGQRSMPLSIEVFDGSRKGERNSVKRDQEASRMMHRRTNSDQTDLTTSTNDYGVKTGVVTGNGGEVVVVAVLLLVRIVWLMVRFVALILDHQRLWLRLRLRKGFTIDRKQRLKRLTKRTQVRYLKGKQRELSIELNGGEQRKMARVERVERLDQAMILAGKEEREGEEGGGEERRNNKGGETVEERVRKGCFHVLETCLDVRFR

SEQ ID NO: 102375 - DNA, 1135 bp, Arabidopsis thaliana
  misc_feature (1)..(1135): Ceres Seq. ID no. 13610097
  misc_feature (1)..(1135): Ortholog of  Ceres SEQ ID NO 15170760 as cited in SEQ ID NO 52747
  misc_feature (1)..(1135): Ortholog of  Ceres SEQ ID NO 15168549 as cited in SEQ ID NO 56976
  misc_feature (1)..(1135): Ortholog of  Ceres SEQ ID NO 14314335 as cited in SEQ ID NO 57305
  misc_feature (1)..(1135): Ortholog of  Ceres SEQ ID NO 15177588 as cited in SEQ ID NO 60367
acaaacacaacatatccacaatacaaaacacaactttcatatataacaaaaaaagttatagaaatggccaaagacgtggaaggacctgagggatttcagacaagagactacgaagatccgccaccaactccgtttttcgatgcggacgagcttaccaagtggtctttatacagagccgtcattgccgagttcgtagccactctcctcttcttgtacatcaccgttttaactgtcatcggttacaagattcagtccgacacaaaagccggtggagttgactgcggcggcgtcggaatccttggcatcgcgtgggcttttggtggcatgatcttcatccttgtctactgcaccgccggtatctcaggtggtcacataaaccctgcggtgacgtttggtttgttcttagcccggaaggtatcgctgattagggcggtgctttacatggtggctcagtgtttgggtgctatttgtggagttggtttcgtcaaagcctttcaaagctcttactatgatcgttacggtggaggagccaactctctagcagacggctacaacacaggcaccggactagccgcagagatcattggaacattcgttctcgtctacacagtcttctccgctactgatcccaaacgtaacgctagagactcccacgttccggttttggcgccacttccgattgggtttgcggtgtttatggtacatttggccactattccgatcaccggaaccggcatcaacccggctaggagtttcggagctgccgtaatctataacaagagcaagccatgggatgaccactggatattctgggtgggaccattcattggagctgcgatagctgcattttatcaccaatttgtcctaagggcttcaggttccaagtcacttggatccttcagaagtgcagccaacgtttgagtttttgccacacaaaaaaaaacctatcataataacaacaattacaaaatggttgtgttattatgtatgtacaaaaattggcaactttgcttgtaaaactatgcactatatttcttcttgtttttctgttttcattgtggtgtaatactttgatatgtgccaatgccaatgtttgtgtactcgggaaaacaattaatgaaaaccaaattgtttt

SEQ ID NO: 102376 - protein, 306 aa, Arabidopsis thaliana
  peptide (1)..(306): Ceres Seq. ID no. 13610098
TNTTYPQYKTQLSYITKKVIEMAKDVEGPEGFQTRDYEDPPPTPFFDADELTKWSLYRAVIAEFVATLLFLYITVLTVIGYKIQSDTKAGGVDCGGVGILGIAWAFGGMIFILVYCTAGISGGHINPAVTFGLFLARKVSLIRAVLYMVAQCLGAICGVGFVKAFQSSYYDRYGGGANSLADGYNTGTGLAAEIIGTFVLVYTVFSATDPKRNARDSHVPVLAPLPIGFAVFMVHLATIPITGTGINPARSFGAAVIYNKSKPWDDHWIFWVGPFIGAAIAAFYHQFVLRASGSKSLGSFRSAANV

SEQ ID NO: 102377 - protein, 285 aa, Arabidopsis thaliana
  peptide (1)..(285): Ceres Seq. ID no. 13610099
MAKDVEGPEGFQTRDYEDPPPTPFFDADELTKWSLYRAVIAEFVATLLFLYITVLTVIGYKIQSDTKAGGVDCGGVGILGIAWAFGGMIFILVYCTAGISGGHINPAVTFGLFLARKVSLIRAVLYMVAQCLGAICGVGFVKAFQSSYYDRYGGGANSLADGYNTGTGLAAEIIGTFVLVYTVFSATDPKRNARDSHVPVLAPLPIGFAVFMVHLATIPITGTGINPARSFGAAVIYNKSKPWDDHWIFWVGPFIGAAIAAFYHQFVLRASGSKSLGSFRSAANV

SEQ ID NO: 102378 - protein, 198 aa, Arabidopsis thaliana
  peptide (1)..(198): Ceres Seq. ID no. 13610100
MIFILVYCTAGISGGHINPAVTFGLFLARKVSLIRAVLYMVAQCLGAICGVGFVKAFQSSYYDRYGGGANSLADGYNTGTGLAAEIIGTFVLVYTVFSATDPKRNARDSHVPVLAPLPIGFAVFMVHLATIPITGTGINPARSFGAAVIYNKSKPWDDHWIFWVGPFIGAAIAAFYHQFVLRASGSKSLGSFRSAANV

SEQ ID NO: 102379 - DNA, 758 bp, Arabidopsis thaliana
  misc_feature (1)..(758): Ceres Seq. ID no. 13610101
  misc_feature (1)..(758): Ortholog of  Ceres SEQ ID NO 15168856 as cited in SEQ ID NO 56354
atgacattatttatatcatttgtcaaaaggcccaaacgtctttttcagttgctctttcttggtgggaactgtttgagctcgagttctatgatgaacgtgagccggccggcgattcacccggttgatgctcttccggtggctcctactgccggagcgatcgatagaccaccagtgaggatgaaggatgtgcaaggcatgcccggaaccaccggcggtctcatcctccgtctctctcagttcgttcccgctcttatctccgtctccgtcatggtcactacctccgacttccgctccgccaccgcattctgttgcttggttcttgcggttagcctgcaaagcctgtggagcttgtctctttttattatcgatgcttatgctcttctggtgagaagaagccttcgaaatcactccgttgttcagtgtttcactattggagatggagtcacatcgacgctcacgtttgcagctgcatctgcttctgctggcataactgtactcatcaacgatcttggacaatgtaacgtgaatcactgcacaaggtttgagactgccacagcaatggccttcatcagctggtttgctgtgtctccttcctttattctcaacttctggtccttagccacccactaaatatatagcacacaagttgagttcagagaaatccatctttctagtataatgtaaataaagggtggagtataatgtatcgcttgattagcaaatgttttgagacagatattatattggaaaatcatagt

SEQ ID NO: 102380 - protein, 209 aa, Arabidopsis thaliana
  peptide (1)..(209): Ceres Seq. ID no. 13610102
MTLFISFVKRPKRLFQLLFLGGNCLSSSSMMNVSRPAIHPVDALPVAPTAGAIDRPPVRMKDVQGMPGTTGGLILRLSQFVPALISVSVMVTTSDFRSATAFCCLVLAVSLQSLWSLSLFIIDAYALLVRRSLRNHSVVQCFTIGDGVTSTLTFAAASASAGITVLINDLGQCNVNHCTRFETATAMAFISWFAVSPSFILNFWSLATH

SEQ ID NO: 102381 - protein, 180 aa, Arabidopsis thaliana
  peptide (1)..(180): Ceres Seq. ID no. 13610103
MMNVSRPAIHPVDALPVAPTAGAIDRPPVRMKDVQGMPGTTGGLILRLSQFVPALISVSVMVTTSDFRSATAFCCLVLAVSLQSLWSLSLFIIDAYALLVRRSLRNHSVVQCFTIGDGVTSTLTFAAASASAGITVLINDLGQCNVNHCTRFETATAMAFISWFAVSPSFILNFWSLATH

SEQ ID NO: 102382 - protein, 179 aa, Arabidopsis thaliana
  peptide (1)..(179): Ceres Seq. ID no. 13610104
MNVSRPAIHPVDALPVAPTAGAIDRPPVRMKDVQGMPGTTGGLILRLSQFVPALISVSVMVTTSDFRSATAFCCLVLAVSLQSLWSLSLFIIDAYALLVRRSLRNHSVVQCFTIGDGVTSTLTFAAASASAGITVLINDLGQCNVNHCTRFETATAMAFISWFAVSPSFILNFWSLATH

SEQ ID NO: 102383 - DNA, 1369 bp, Arabidopsis thaliana
  misc_feature (1)..(1369): Ceres Seq. ID no. 13610120
  misc_feature (1)..(1369): Ortholog of  Ceres SEQ ID NO 13595351 as cited in SEQ ID NO 55934
  misc_feature (1)..(1369): Ortholog of  Ceres SEQ ID NO 13595513 as cited in SEQ ID NO 56663
  misc_feature (1)..(1369): Ortholog of  Ceres SEQ ID NO 13639645 as cited in SEQ ID NO 57488
aacaactcatatcaattttttaaaaaaaactctccatatatctattacttctacgctaactagagagggagattattgctcttaagtgatggaggaagtaaagaagagggattgtatggagaaggcaaggccattcatttcaatggtagtgttgcaagtagggctagcaggaatggatattctctcaaaggctgttctaaacaaaggcatgagcaattacgtccttgttgtttaccgtcacgccgttgcaaccatcgttatggccccgttcgccttctatttcgacaagaaggtgagaccgaagatgacactgatgatattcttcaagatatcactccttggtttactcgagccagtgatcgaccagaacttatactatctcgggatgaaatatacgacagctacatttgcaaccgccatgtacaacgtcctacccgcaatcactttcgtccttgcctatatatttggcctcgaaagagtaaagctacggtgcattaggagcacgggtaaggtggttggaacattggctactgttggaggagccatgatcatgacacttgtcaaaggcccagttctcgatctgttttggaccaaaggagtctctgcacataacacagctgggaccgacattcatagcgccatcaaaggcgcagtattggtcacgattggttgttttagctatgcatgtttcatgattctccaagcgataacattaaggacttaccctgctgagctctctctcacagcatggatatgtcttatggggacaatagaaggaaccgccgtggcattagtgatggagaaaggaaatcccagcgcatgggccattggttgggacactaaacttcttacagccacctatagtgggatagtgtgctcagcattggcttactacgttggaggagtggtgatgaaaaccagaggtcctgtgtttgtgacagctttcagtcctctttgtatgatcatagtagcgattatgtcgaccatcatctttgctgagcaaatgtaccttggaagggttcttggtgctgtagttatatgtgcaggattataccttgtgatatggggcaaaggaaaagattacaaatataattccacgctgcaattagatgacgaatcagcacaaccaaagctagaactaagcggaaacgggaaggataatgttgatcatgaagtcattactataagcaagcaaggagaacaaagaagaacagctgtagaaacagtctaacttaacggtatcggcacaaatgtttttcatggaggagtaattaacgtatagcagtttcatttgttgtccattatgtttcagagcacaatgtcatagaattgctaactaccatgggagaataataattgtctaattaag

SEQ ID NO: 102384 - protein, 380 aa, Arabidopsis thaliana; identical to SEQ ID NO: 30041
  peptide (1)..(380): Ceres Seq. ID no. 13610121

SEQ ID NO: 102385 - protein, 371 aa, Arabidopsis thaliana; identical to SEQ ID NO: 30042
  peptide (1)..(371): Ceres Seq. ID no. 13610122

SEQ ID NO: 102386 - protein, 362 aa, Arabidopsis thaliana; identical to SEQ ID NO: 30043
  peptide (1)..(362): Ceres Seq. ID no. 13610123

SEQ ID NO: 102387 - DNA, 570 bp, Arabidopsis thaliana
  misc_feature (1)..(570): Ceres Seq. ID no. 13610124
  misc_feature (1)..(570): Ortholog of  Ceres SEQ ID NO 12783998 as cited in SEQ ID NO 61535
acgcgtctctcaattctcacattctcaaaatcactaaaatcaaactcaattttcatcaaatatctctaatggcgccgaaagcagcggagaagaaaccggcagagaagaaaccagccgggaaagctccggcggagaaactcccaaaggcggagaagaaaatcagcaaagacgccggaggaagcgagaagaagaagaagaaatcgaagaagagcgtcgagacttacaagatctacatcttcaaggttctgaaacaagttcatccagatgttggaatctctgggaaagctatggggattatgaacagtttcatcaatgacatcttcgagaaacttgctcaggaatcgtcaaagctcgctaggtacaataagaagccgacgattacatcgagggagattcaaaccgctgtgagacttgtgttgcctggagaactcgctaaacatgcggtttctgaaggcacgaaggcggttaccaaattcaccagttagggttttcctgtaaatttccggttaagtgtttggtttagactcggtttgtttagatgttttgagtttcgtgaattgtttgatgatc

SEQ ID NO: 102388 - protein, 160 aa, Arabidopsis thaliana; identical to SEQ ID NO: 21871
  peptide (1)..(160): Ceres Seq. ID no. 13610125

SEQ ID NO: 102389 - protein, 138 aa, Arabidopsis thaliana; identical to SEQ ID NO: 21872
  peptide (1)..(138): Ceres Seq. ID no. 13610126

SEQ ID NO: 102390 - DNA, 1232 bp, Arabidopsis thaliana
  misc_feature (1)..(1232): Ceres Seq. ID no. 13610130
  misc_feature (1)..(1232): Ortholog of  Ceres SEQ ID NO 15169372 as cited in SEQ ID NO 58778
accatccatccaacttgtaactctctttctctatttcttctccattctgtttgctctgcaacatcttttagggtttattattgttggtttcttcattttctttctctaaaatatttgcagaggaagagagagagagagagagagatcatgggaatatatggagtgatgacagggaaaaaaggaaagagtgggtttggatctgcttctactgctgaagatgttactcaagccattgatgccagtcatctcactgccatcatcacaggtggaacaagtgggattggattggaggcagctagagtgttagcaatgagaggagctcatgtcatcattgccgcaagaaacccaaaagctgctaatgagtctaaagagatgattcttcagatgaaccctaatgctcgcgtcgactatctccagatcgatgtctcttccatcaaatcagtcagatccttcgttgatcagtttcttgcccttaatgttcctctcaacattctcataaacaatgcaggtgttatgttttgtcctttcaagctcaccgaagatgggattgaatcacaattcgcaacaaaccacattggtcattttctgttgacgaatctgcttctggacaaaatgaaaagtaccgcaagagaaagtggagtccaaggaaggattgtgaatctgtcatctattgctcatacttatacttactctgaaggtatcaagttccaaggcatcaatgaccctgctggatattcggagagaagggcttatggacagtccaaactctcaaacttgttgcactccaatgcactctctcgtagactacaggaagaaggtgtgaacatcactataaattcggtgcaccctggtcttgtcaccactaatctctttcgctactccggttttagcatgaaggtcttcagggctatgactttcctcttttggaaaaatatacctcagggagcagcaacaacatgctacgttgcacttcatccagatctcgaaggcgtcaccggaaagtatttcggcgactgtaacatcgttgctccgagcaaatttgctaccaacaattctctcgccgataaactttgggatttcagtgtctttctcatcgattctatctctaaataatctatcatcatcaagacaaattcttagacattcaaaatttatttatccttcttgatattgttacattaatgccatatctttttcaccaccacatatttctttatggaataccataattt

SEQ ID NO: 102391 - protein, 370 aa, Arabidopsis thaliana
  peptide (1)..(370): Ceres Seq. ID no. 13610131
TIHPTCNSLSLFLLHSVCSATSFRVYYCWFLHFLSLKYLQRKREREREIMGIYGVMTGKKGKSGFGSASTAEDVTQAIDASHLTAIITGGTSGIGLEAARVLAMRGAHVIIAARNPKAANESKEMILQMNPNARVDYLQIDVSSIKSVRSFVDQFLALNVPLNILINNAGVMFCPFKLTEDGIESQFATNHIGHFLLTNLLLDKMKSTARESGVQGRIVNLSSIAHTYTYSEGIKFQGINDPAGYSERRAYGQSKLSNLLHSNALSRRLQEEGVNITINSVHPGLVTTNLFRYSGFSMKVFRAMTFLFWKNIPQGAATTCYVALHPDLEGVTGKYFGDCNIVAPSKFATNNSLADKLWDFSVFLIDSISK

SEQ ID NO: 102392 - protein, 321 aa, Arabidopsis thaliana
  peptide (1)..(321): Ceres Seq. ID no. 13610132
MGIYGVMTGKKGKSGFGSASTAEDVTQAIDASHLTAIITGGTSGIGLEAARVLAMRGAHVIIAARNPKAANESKEMILQMNPNARVDYLQIDVSSIKSVRSFVDQFLALNVPLNILINNAGVMFCPFKLTEDGIESQFATNHIGHFLLTNLLLDKMKSTARESGVQGRIVNLSSIAHTYTYSEGIKFQGINDPAGYSERRAYGQSKLSNLLHSNALSRRLQEEGVNITINSVHPGLVTTNLFRYSGFSMKVFRAMTFLFWKNIPQGAATTCYVALHPDLEGVTGKYFGDCNIVAPSKFATNNSLADKLWDFSVFLIDSISK

SEQ ID NO: 102393 - protein, 315 aa, Arabidopsis thaliana
  peptide (1)..(315): Ceres Seq. ID no. 13610133
MTGKKGKSGFGSASTAEDVTQAIDASHLTAIITGGTSGIGLEAARVLAMRGAHVIIAARNPKAANESKEMILQMNPNARVDYLQIDVSSIKSVRSFVDQFLALNVPLNILINNAGVMFCPFKLTEDGIESQFATNHIGHFLLTNLLLDKMKSTARESGVQGRIVNLSSIAHTYTYSEGIKFQGINDPAGYSERRAYGQSKLSNLLHSNALSRRLQEEGVNITINSVHPGLVTTNLFRYSGFSMKVFRAMTFLFWKNIPQGAATTCYVALHPDLEGVTGKYFGDCNIVAPSKFATNNSLADKLWDFSVFLIDSISK

SEQ ID NO: 102394 - DNA, 1158 bp, Arabidopsis thaliana
  misc_feature (1)..(1158): Ceres Seq. ID no. 13610137
  misc_feature (1)..(1158): Ortholog of  Ceres SEQ ID NO 12474685 as cited in SEQ ID NO 88
  misc_feature (1)..(1158): Ortholog of  Ceres SEQ ID NO 13638574 as cited in SEQ ID NO 51223
  misc_feature (1)..(1158): Ortholog of  Ceres SEQ ID NO 14311531 as cited in SEQ ID NO 51466
  misc_feature (1)..(1158): Ortholog of  Ceres SEQ ID NO 15170465 as cited in SEQ ID NO 52798
  misc_feature (1)..(1158): Ortholog of  Ceres SEQ ID NO 15177112 as cited in SEQ ID NO 55956
  misc_feature (1)..(1158): Ortholog of  Ceres SEQ ID NO 12610790 as cited in SEQ ID NO 56123
  misc_feature (1)..(1158): Ortholog of  Ceres SEQ ID NO 14315399 as cited in SEQ ID NO 57112
  misc_feature (1)..(1158): Ortholog of  Ceres SEQ ID NO 13655636 as cited in SEQ ID NO 63519
  misc_feature (1)..(1158): Ortholog of  Ceres SEQ ID NO 13655896 as cited in SEQ ID NO 64970
ctcagtgtcggctaatcagaggatcagtctcagtgttgatttcaggtgataaatctctttgctttgacaatggcagaggaaattagattctttgaactcaacaccggagcgaagataccatccgtcggtctaggaacgtggcaggccgatcctggtctcgtcggaaacgctgtcgacgctgctgtgaagattggttatcgtcacattgattgtgctcaaatctatggcaatgaaaaagagattgggttagtcctgaagaaattgtttgatggtggagttgttaagcgtgaggaaatgttcatcacatccaaactatggtgtacttatcatgatcctcaagaagtgcctgaggcacttaatagaactctacaggatctgcagcttgactacgtcgatctgtatctcattcactggcctgttagcctcaagaaaggatctactggctttaaaccagagaacattttgccaactgatattcctagcacatggaaagcaatggaatcactctttgattcaggcaaggcccgtgctattggtgtaagtaatttctcctcaaagaaactcgcagatctcttggtggtggctcgtgttcctcccgctgttaaccaggtggagtgtcacccttcatggcaacaaaacgtgctcagggatttctgcaaatctaaaggcgttcatctctcagggtactctcctttgggttctccaggaacaacgtggctaacgagcgatgttttgaagaaccctattcttggtggtgttgctgagaagctcggcaagactcctgcacaggttgcattacgctggggtctccaaatgggtcaaagtgttcttccaaaaagcacccatgaagacaggatcaaacagaatttcgatgttttcaactggtccatacccgaagacatgttatccaagttttctgagattggacagggtaggttggtgcgaggcatgtcatttgttcatgagacgagtccatataagagtcttgaagaactctgggacggtgagatatgagactcagctgatttgattgtcatagatttgtcattagtaatgcacgttgtttcattacaaaggtacaacattttacttataaactccctccagcagttccacgtgaaaagacattaatgttctaattatactgaattgatgatc

SEQ ID NO: 102395 - protein, 314 aa, Arabidopsis thaliana
  peptide (1)..(314): Ceres Seq. ID no. 13610138
MAEEIRFFELNTGAKIPSVGLGTWQADPGLVGNAVDAAVKIGYRHIDCAQIYGNEKEIGLVLKKLFDGGVVKREEMFITSKLWCTYHDPQEVPEALNRTLQDLQLDYVDLYLIHWPVSLKKGSTGFKPENILPTDIPSTWKAMESLFDSGKARAIGVSNFSSKKLADLLVVARVPPAVNQVECHPSWQQNVLRDFCKSKGVHLSGYSPLGSPGTTWLTSDVLKNPILGGVAEKLGKTPAQVALRWGLQMGQSVLPKSTHEDRIKQNFDVFNWSIPEDMLSKFSEIGQGRLVRGMSFVHETSPYKSLEELWDGEI

SEQ ID NO: 102396 - protein, 239 aa, Arabidopsis thaliana
  peptide (1)..(239): Ceres Seq. ID no. 13610139
MFITSKLWCTYHDPQEVPEALNRTLQDLQLDYVDLYLIHWPVSLKKGSTGFKPENILPTDIPSTWKAMESLFDSGKARAIGVSNFSSKKLADLLVVARVPPAVNQVECHPSWQQNVLRDFCKSKGVHLSGYSPLGSPGTTWLTSDVLKNPILGGVAEKLGKTPAQVALRWGLQMGQSVLPKSTHEDRIKQNFDVFNWSIPEDMLSKFSEIGQGRLVRGMSFVHETSPYKSLEELWDGEI

SEQ ID NO: 102397 - protein, 172 aa, Arabidopsis thaliana
  peptide (1)..(172): Ceres Seq. ID no. 13610140
MESLFDSGKARAIGVSNFSSKKLADLLVVARVPPAVNQVECHPSWQQNVLRDFCKSKGVHLSGYSPLGSPGTTWLTSDVLKNPILGGVAEKLGKTPAQVALRWGLQMGQSVLPKSTHEDRIKQNFDVFNWSIPEDMLSKFSEIGQGRLVRGMSFVHETSPYKSLEELWDGEI

SEQ ID NO: 102398 - DNA, 1197 bp, Arabidopsis thaliana
  misc_feature (1)..(1197): Ceres Seq. ID no. 13610149
  misc_feature (1)..(1197): Ortholog of  Ceres SEQ ID NO 13596110 as cited in SEQ ID NO 68647
aaaaaattttcattcttcctccactctctcaattccaaaacactgcgccgggaagacatggacaccgagatggagacagaacaaatataccaggtcgatgtcggaaatctcttggctttcaatcccaatcaccgcttcccatctgctccttcttcaaggggggagcttgtgaaggagatcctaacggagggaacaaaacttgttcaggaaatagccaataaacttttcaactttccttctactgaaacaaatgatggtcctattgtccaattgcctccgcctacaaccaaacttcctagagagaaacatattccaaggcctaagcctcctacgaagtgggaagagtttgcgcttaagaaaggtatacagaagcgcaagaaggaaaaagttgtatgggatgaacaaactaatcagtttaagcgtcgccatggttatgaccgtgttaacgatgataatgatgttcccatcattgaggcgaaagaatcagatgaaccaggagtagatccttttgccaagagactagatgataagaagaagagagttggaaagcaagaaaagaatagacttcagaatctgaaggctgctgaaaaagctggtgctttaccaagccatgtccaacttgctgcaacatcattgcccatatcaggaacgaaagctcaaccaaagaaaattggaaaggatgaacttggagatgtagcaggtttagccgctacttcaaccgctagtggtggaaaattcgataaaaagttgcctggagaaaaacctccaaagaagcagggcaaacatcacaagtatttaccggttgtatcagggcgtggggatgttaacgcagaaaaagaacagacaaataatgtactcagcaagatattctcaaagcattcgcatgagatcctcaatgttggcaaggcgataaacatgtacaacgtcaagaaggagaagaagaagtcaggaaggtcagacaagttgaaacctaagaaggacatcaccaagaagcctgccaacaaagccaagtgaagagactctcccatgtctaatttactcttctatctgtctccatcttctatcacaaaacaaattttgggttgctctgttaaagtaatactttatgagtacgtttattttaatcttattgacttcatattttgcaccataaaacaatttaaagctcgcaaggtctagaaatccagtttgattttc

SEQ ID NO: 102399 - protein, 337 aa, Arabidopsis thaliana
  peptide (1)..(337): Ceres Seq. ID no. 13610150
KKFSFFLHSLNSKTLRREDMDTEMETEQIYQVDVGNLLAFNPNHRFPSAPSSRGELVKEILTEGTKLVQEIANKLFNFPSTETNDGPIVQLPPPTTKLPREKHIPRPKPPTKWEEFALKKGIQKRKKEKVVWDEQTNQFKRRHGYDRVNDDNDVPIIEAKESDEPGVDPFAKRLDDKKKRVGKQEKNRLQNLKAAEKAGALPSHVQLAATSLPISGTKAQPKKIGKDELGDVAGLAATSTASGGKFDKKLPGEKPPKKQGKHHKYLPVVSGRGDVNAEKEQTNNVLSKIFSKHSHEILNVGKAINMYNVKKEKKKSGRSDKLKPKKDITKKPANKAK

SEQ ID NO: 102400 - protein, 318 aa, Arabidopsis thaliana
  peptide (1)..(318): Ceres Seq. ID no. 13610151
MDTEMETEQIYQVDVGNLLAFNPNHRFPSAPSSRGELVKEILTEGTKLVQEIANKLFNFPSTETNDGPIVQLPPPTTKLPREKHIPRPKPPTKWEEFALKKGIQKRKKEKVVWDEQTNQFKRRHGYDRVNDDNDVPIIEAKESDEPGVDPFAKRLDDKKKRVGKQEKNRLQNLKAAEKAGALPSHVQLAATSLPISGTKAQPKKIGKDELGDVAGLAATSTASGGKFDKKLPGEKPPKKQGKHHKYLPVVSGRGDVNAEKEQTNNVLSKIFSKHSHEILNVGKAINMYNVKKEKKKSGRSDKLKPKKDITKKPANKAK

SEQ ID NO: 102401 - protein, 314 aa, Arabidopsis thaliana
  peptide (1)..(314): Ceres Seq. ID no. 13610152
METEQIYQVDVGNLLAFNPNHRFPSAPSSRGELVKEILTEGTKLVQEIANKLFNFPSTETNDGPIVQLPPPTTKLPREKHIPRPKPPTKWEEFALKKGIQKRKKEKVVWDEQTNQFKRRHGYDRVNDDNDVPIIEAKESDEPGVDPFAKRLDDKKKRVGKQEKNRLQNLKAAEKAGALPSHVQLAATSLPISGTKAQPKKIGKDELGDVAGLAATSTASGGKFDKKLPGEKPPKKQGKHHKYLPVVSGRGDVNAEKEQTNNVLSKIFSKHSHEILNVGKAINMYNVKKEKKKSGRSDKLKPKKDITKKPANKAK

SEQ ID NO: 102402 - DNA, 1645 bp, Arabidopsis thaliana
  misc_feature (1)..(1645): Ceres Seq. ID no. 13610153
  misc_feature (1)..(1645): Ortholog of  Ceres SEQ ID NO 13638441 as cited in SEQ ID NO 58066
ctgtttcatattcatctctctcccctctctccctctatatctctctctcccttttcgacttgagagtttgggtcctttgggagaaagaagaagaagaagaaaaagattggattttgttcactttaacatcttcaatctctaaacccacctgagttttctccatttctctgtttggtttcttgtcagttttcaagaaagcgtccaaatcatagatcctctgttttctcttctctgtttgctttcattttctctggattcggatctgaccactaaagagaggtttatcgtttcagacaacaaaactcaaagatcgaatctatcttttgtccttagagtctggaaaaagcagctctcttttgatctcctctttagattcttcaaagctttagatgcttatctctctttctctctcagattccatttgaataaatgccattttgacagatcaaatatctcccacttttctctctctctctctctctctctctctctctgtttgagctccaccattatcgaaaactctgtttttttctttctttcttgattcgatcaacaatcgttgaaaacatgaacagaggaatcgaagttatgtcaccagcaacatatctagagacatcaaactggttgtttcaagaaaacagaggaaccaaatggacagctgaagaaaacaagaaattcgaaaacgctttagccttttacgacaaagatactcccgacagatggtccagagtcgctgccatgcttcccggtaaaacagtcggagatgtgatcaaacaatacagagagcttgaggaagacgttagcgacatcgaagctggtcttataccaatccctggttacgcctctgattcattcacacttgattggggtggctacgacggagcaagcggtaacaatgggtttaacatgaacggttactacttttccgccgccggaggaaagagaggatccgccgcacgaacggcggagcatgagaggaagaaaggtgttccatggacagaagaagaacacagacaatttctgatgggtttgaagaaatatggaaaaggagattggagaaacatagctcgtaactttgtgaccacaagaacgccaacgcaagtcgcaagtcacgctcaaaagtatttcatacggcaagtcaatggtggcaaagacaaacgccgttcaagcatccatgatatcacaaccgtcaacatccccgactctcctgacgctgcagccgcggataacgcaaccgcaaacgcaccttgctcgccaccttccgtaggaggaaaccagcgggagacatcggagtgggaaggtcaaacactatacgatgaaacagcagctgcgttttataatcaaaacgcgttttcagaaacgctacttggaatgtcttcgacgccctacatggcaaaacttcaggagcagagttttctgaacgcatcgcaattcgaatcgtacaatgcgtatctccaaatgtagctcacaaggtgaagatctcggagaagttacgagttatataatcattaataatttttgttttttctcttaatcggcgtgcatatacaaaaaacaaaattagctgctatttttttattacgagatacttatttgttgttttgtttaccatctttttccgtggttgattcaacgagttttcagc

SEQ ID NO: 102403 - protein, 298 aa, Arabidopsis thaliana
  peptide (1)..(298): Ceres Seq. ID no. 13610154
MNRGIEVMSPATYLETSNWLFQENRGTKWTAEENKKFENALAFYDKDTPDRWSRVAAMLPGKTVGDVIKQYRELEEDVSDIEAGLIPIPGYASDSFTLDWGGYDGASGNNGFNMNGYYFSAAGGKRGSAARTAEHERKKGVPWTEEEHRQFLMGLKKYGKGDWRNIARNFVTTRTPTQVASHAQKYFIRQVNGGKDKRRSSIHDITTVNIPDSPDAAAADNATANAPCSPPSVGGNQRETSEWEGQTLYDETAAAFYNQNAFSETLLGMSSTPYMAKLQEQSFLNASQFESYNAYLQM

SEQ ID NO: 102404 - protein, 291 aa, Arabidopsis thaliana; identical to SEQ ID NO: 72250
  peptide (1)..(291): Ceres Seq. ID no. 13610155

SEQ ID NO: 102405 - protein, 241 aa, Arabidopsis thaliana; identical to SEQ ID NO: 72251
  peptide (1)..(241): Ceres Seq. ID no. 13610156

SEQ ID NO: 102406 - DNA, 2171 bp, Arabidopsis thaliana
  misc_feature (1)..(2171): Ceres Seq. ID no. 13610157
  misc_feature (1)..(2171): Ortholog of  Ceres SEQ ID NO 15174875 as cited in SEQ ID NO 56464
atgtcaaggctttctcaattcataggacatcaaggcgttcctcagtcggttttgaacgaccctgcatatcgttacaatgtttggtcgtggaatctaattgaagctaacttgaagagcaaggacgtagaggtggaactgaatattgatgtgaaggctgtcttgtatgatactaaacaatcattctacaactgtaacttcagcaatggcgagtgcacattcaatgcaatgtcccttgttggaaattctgttgtcgtaacttcaccagcagcgagtcagggagtatccattgaagatgaatggtatatcaggttctcatatcaacctagagaaattgcatatgtaatcggcacaggtgtggtgatttgcttcatgttggtagctatacagttctgcaacaggtttcagtgcagtggtggagagggacatctaaccgaggatgattcagcgagaacacgtctacttgcagacaaagatgacgatggttcaagcatgggttcgtgtgacgattcttatgcaaacgatgatgctgacttagaagagtttatgggaaatgatggtgaagcaagtaaccgaagtagacgtctctgtgccatttgttttgatgttccaagagattgctttttcctcccttgtggtcattccgtctcctgttatgaatgcggaacaacgatgcaagaagctgatgggagttgtccaatatgtcgaaggaaaatgaagaaagtgaagcgaatctatacagtgcaaaggagcttgatttttcaaagcctggacttcagctatatggattcaatggtcaatctactcctagtggttattttgtaaactggactgaatctcgagtgttatctgtctcacagaattcttacaagggatggccatactacttaaatagaggaacgcatatgaatatatcttataacattttacctaaaggttctgcagttcggcttgtgatcactgaaggaatgccattcttctatcggtcgtcgctgaaggatattgcatttcgtgacaccgcttggtcatggaatctaattcaggggggtggtatgattcaattggatataagtaagtctaaaggttattatcttactgtggctaacttgaagaggaaggacatagaggtaattataatcaagttatgactttggattaagttttggtttctgttgtgtttctgcacagtccacagtacactgttttacttgacataatgtttgttcaggtggaactggatattgatgtgaaggctgtctngtatgatactaaacaatcatcctacaattgttccttcagcaatggcgagtgctcattcaaaatgaatgaaaggtcccctgttgaaaattatgctgtcgtaacttcaccagcactgggtcagggagtatccatcgatgatgaatggtanatcgagttgtcatatcaacctanattgattgcatatggaagcttcacaggtgtgttgctttccttcatgctggtagctatacacttctgcaacaagttaaagtgttgtggtggagagggatttttatccnaagatgattcagtgagaacatgtctacttgcagacaaaggtgacaatgattgttgtaatgatgtcgaagcaagtaacaaaagtctctgtgccatttgttttgatgctccaagagattgttgtttcctcccgtgtggccattgcgtctcctgttaccaatgcggaacaaagataaaaagaaccaaggggaggtgtccaatatgtcgaaagaaaataatgcatgtgaagcgaatctatacagcttaagatgtattattatctgtccaatgtgatgttgaatcgttagagcattaataaaaatcatataatttgatattgacaaggctcaggtctttctttgcattaattcgtttcatctcttaaccatctttgtgacaacaccattggttaactaccatagggtaggcaatatagtgaaccattgtttgttgactcacatcacaaaatggttcgaaacccgaatcgataattaaggatttcataaattaattgttaatttctgaataaattcggattttgtatatttcctccgtttcgtaatataagtagttttggaccaatttttttgtttcacaacgtaaattgtttttaactttctatgtaaataatatattattttaatattttttgattattt

SEQ ID NO: 102407 - protein, 273 aa, Arabidopsis thaliana
  peptide (1)..(273): Ceres Seq. ID no. 13610158
MSRLSQFIGHQGVPQSVLNDPAYRYNVWSWNLIEANLKSKDVEVELNIDVKAVLYDTKQSFYNCNFSNGECTFNAMSLVGNSVVVTSPAASQGVSIEDEWYIRFSYQPREIAYVIGTGVVICFMLVAIQFCNRFQCSGGEGHLTEDDSARTRLLADKDDDGSSMGSCDDSYANDDADLEEFMGNDGEASNRSRRLCAICFDVPRDCFFLPCGHSVSCYECGTTMQEADGSCPICRRKMKKVKRIYTVQRSLIFQSLDFSYMDSMVNLLLVVIL

SEQ ID NO: 102408 - protein, 198 aa, Arabidopsis thaliana
  peptide (1)..(198): Ceres Seq. ID no. 13610159
MSLVGNSVVVTSPAASQGVSIEDEWYIRFSYQPREIAYVIGTGVVICFMLVAIQFCNRFQCSGGEGHLTEDDSARTRLLADKDDDGSSMGSCDDSYANDDADLEEFMGNDGEASNRSRRLCAICFDVPRDCFFLPCGHSVSCYECGTTMQEADGSCPICRRKMKKVKRIYTVQRSLIFQSLDFSYMDSMVNLLLVVIL

SEQ ID NO: 102409 - protein, 188 aa, Arabidopsis thaliana
  peptide (1)..(188): Ceres Seq. ID no. 13610160
  misc_feature (15)..(15): Xaa is any aa, unknown or other
  misc_feature (64)..(64): Xaa is any aa, unknown or other
  misc_feature (72)..(72): Xaa is any aa, unknown or other
  misc_feature (108)..(108): Xaa is any aa, unknown or other
MFVQVELDIDVKAVXYDTKQSSYNCSFSNGECSFKMNERSPVENYAVVTSPALGQGVSIDDEWXIELSYQPXLIAYGSFTGVLLSFMLVAIHFCNKLKCCGGEGFLSXDDSVRTCLLADKGDNDCCNDVEASNKSLCAICFDAPRDCCFLPCGHCVSCYQCGTKIKRTKGRCPICRKKIMHVKRIYTA

SEQ ID NO: 102410 - DNA, 2005 bp, Arabidopsis thaliana
  misc_feature (1)..(2005): Ceres Seq. ID no. 13610179
  misc_feature (1)..(2005): Ortholog of  Ceres SEQ ID NO 14310556 as cited in SEQ ID NO 54965
ccaaacaatcttctttgctaccaaatttctggaatctagggttcgattatatctcttttagattatccattatttttgtaattcgttttagtttcgtttttatttccttttttagattaagaagagttcatattttagaataattaaaaaaaatggattctgcaagaagttggtttcacaagtttcaaccacgagataagcctcggaaaaaggatatgttctccggaagcacttacggcggtggcgtgacagaaaccaccgtccccgacggaggaaatgatacagaaacggcaacgaaacttccaccactaggcggtgacggagaagcactctcaaattcaacaaaacagaaagttgctgcagccaaacagtacattgagaatcattataaggaacagatgaagaacctcaacgagaggaaagagagacgaacaacgttagagaagaagctagcggatgcagatgtatgtgaagaagaccaaaccaatcttatgaagtttcttgagaagaaagaaacagagtacatgagactccaaaggcataaaatgggtgctgatgacttcgaactcttaactatgatcggtaaaggtgcttttggagaggttcgagttgttagagagatcaacacaggtcatgtttttgctatgaagaaactcaagaaatcagaaatgcttcgcagaggccaggtggagcatgtaagagcagagaggaatctattggcagaagtagatagtaactgtatagtgaagctttactgttcttttcaagacaatgagtatctttatctgataatggagtatttgcccggtggcgatatgatgactcttctgatgaggaaagacactttaagtgaagatgaagctaagttctatatcgccgaatctgttctcgctatagaatctatccataaccgcaactatatccacagagacataaagccggataacttgttgcttgatagatatggacatttaaggttatctgattttggactatgtaagccattggattgtagtgttattgacggagaagatttcacggtaggaaatgcgggtagcggaggaggttcagagagcgtatcaaccactcctaaacgctcgcagcaagaacagttggaacattggcagaagaatcgaagaatgcttgcttactcaaccgttggtacaccagactacattgcacctgaagtcttgttaaagaaaggatacggcatggaatgtgactggtggtcactaggagctataatgtacgaaatgctggttgggtatccacccttttacgccgacgacccaatgtctacttgtagaaagatagtgaattggaaaacacatttgaagttccctgaagaatcaaggctatcacgaggggcaagagatcttattggtaagctcttgtgtagcgttaaccaacgactaggctctactggtgcctcccaaattaaggcacatccttggttcgaaggtgtacaatgggaaaagatttaccaaatggaagctgcgttcattcctgaggtcaacgacgatttggatactcaaaactttgagaagttcgatgaggaagataatcaaactcaagcaccttctagaacagggccatggagaaaaatgttatcttcaaaagacataaattttgtcggctacacatacaaaaactttgaaatcgtcaacgattatcaagtccccggtatagccgaactaaaaaagaaagagtcaaaatcaaagagaccatcggttaagtcactattcgagagcgaatcagactcgtcatcttctggttcggagcaacagaccattaaccggagctattctaatccgacgcctcgtggaatggaacccaacctgagacgtctagattctgagtagatatatatctgttatgcctatgtatatgtaaaccaaattaaaccggaaaataatgagcttaaatgtactaaaaacgtaagtaaactgaagataactaactacactcttctttctttaatacaaagaaaaatagattgcaagtc

SEQ ID NO: 102411 - protein, 569 aa, Arabidopsis thaliana
  peptide (1)..(569): Ceres Seq. ID no. 13610180
MDSARSWFHKFQPRDKPRKKDMFSGSTYGGGVTETTVPDGGNDTETATKLPPLGGDGEALSNSTKQKVAAAKQYIENHYKEQMKNLNERKERRTTLEKKLADADVCEEDQTNLMKFLEKKETEYMRLQRHKMGADDFELLTMIGKGAFGEVRVVREINTGHVFAMKKLKKSEMLRRGQVEHVRAERNLLAEVDSNCIVKLYCSFQDNEYLYLIMEYLPGGDMMTLLMRKDTLSEDEAKFYIAESVLAIESIHNRNYIHRDIKPDNLLLDRYGHLRLSDFGLCKPLDCSVIDGEDFTVGNAGSGGGSESVSTTPKRSQQEQLEHWQKNRRMLAYSTVGTPDYIAPEVLLKKGYGMECDWWSLGAIMYEMLVGYPPFYADDPMSTCRKIVNWKTHLKFPEESRLSRGARDLIGKLLCSVNQRLGSTGASQIKAHPWFEGVQWEKIYQMEAAFIPEVNDDLDTQNFEKFDEEDNQTQAPSRTGPWRKMLSSKDINFVGYTYKNFEIVNDYQVPGIAELKKKESKSKRPSVKSLFESESDSSSSGSEQQTINRSYSNPTPRGMEPNLRRLDSE

SEQ ID NO: 102412 - protein, 548 aa, Arabidopsis thaliana
  peptide (1)..(548): Ceres Seq. ID no. 13610181
MFSGSTYGGGVTETTVPDGGNDTETATKLPPLGGDGEALSNSTKQKVAAAKQYIENHYKEQMKNLNERKERRTTLEKKLADADVCEEDQTNLMKFLEKKETEYMRLQRHKMGADDFELLTMIGKGAFGEVRVVREINTGHVFAMKKLKKSEMLRRGQVEHVRAERNLLAEVDSNCIVKLYCSFQDNEYLYLIMEYLPGGDMMTLLMRKDTLSEDEAKFYIAESVLAIESIHNRNYIHRDIKPDNLLLDRYGHLRLSDFGLCKPLDCSVIDGEDFTVGNAGSGGGSESVSTTPKRSQQEQLEHWQKNRRMLAYSTVGTPDYIAPEVLLKKGYGMECDWWSLGAIMYEMLVGYPPFYADDPMSTCRKIVNWKTHLKFPEESRLSRGARDLIGKLLCSVNQRLGSTGASQIKAHPWFEGVQWEKIYQMEAAFIPEVNDDLDTQNFEKFDEEDNQTQAPSRTGPWRKMLSSKDINFVGYTYKNFEIVNDYQVPGIAELKKKESKSKRPSVKSLFESESDSSSSGSEQQTINRSYSNPTPRGMEPNLRRLDSE

SEQ ID NO: 102413 - protein, 487 aa, Arabidopsis thaliana
  peptide (1)..(487): Ceres Seq. ID no. 13610182
MKNLNERKERRTTLEKKLADADVCEEDQTNLMKFLEKKETEYMRLQRHKMGADDFELLTMIGKGAFGEVRVVREINTGHVFAMKKLKKSEMLRRGQVEHVRAERNLLAEVDSNCIVKLYCSFQDNEYLYLIMEYLPGGDMMTLLMRKDTLSEDEAKFYIAESVLAIESIHNRNYIHRDIKPDNLLLDRYGHLRLSDFGLCKPLDCSVIDGEDFTVGNAGSGGGSESVSTTPKRSQQEQLEHWQKNRRMLAYSTVGTPDYIAPEVLLKKGYGMECDWWSLGAIMYEMLVGYPPFYADDPMSTCRKIVNWKTHLKFPEESRLSRGARDLIGKLLCSVNQRLGSTGASQIKAHPWFEGVQWEKIYQMEAAFIPEVNDDLDTQNFEKFDEEDNQTQAPSRTGPWRKMLSSKDINFVGYTYKNFEIVNDYQVPGIAELKKKESKSKRPSVKSLFESESDSSSSGSEQQTINRSYSNPTPRGMEPNLRRLDSE

SEQ ID NO: 102414 - DNA, 2304 bp, Arabidopsis thaliana
  misc_feature (1)..(2304): Ceres Seq. ID no. 13610183
  misc_feature (1)..(2304): Ortholog of  Ceres SEQ ID NO 12611963 as cited in SEQ ID NO 53414
cctttgataactttccggcaaaatctcagaacctccccatttttctttgccgattattgatcggaattgctttgttcgctcatctgccaacttccttcctactcggtgtaggaatcttacgtgtccaatcatctgtctatttttggaaacaaatcctcagtgattttgtactttacttatatcaaattcgataactagggtttatcgaatcggattgttgtttctccaattataataattcaagttggttcacacagtagcgtcgacttttcatagccgctgttgtcgaattttgaatttctcgattttcccggcgcttttgttacgattcaaggagtttgaacaagtagggcttctcgttgcggagatcatggatattgacggagtagacgacgatcttcatattttagatcctgagctcttgcagctccccggtttgtctccttctcccctcaaaccaacctctcttattgctgatgacctcttctctcagtggctctcactccctgaaactgccacattggtcaagtctttgattgatgatgctaaatctggaacaccaactaataaatccaagaatttgccttctgtgtttctgagcagcagcactcccccactatctccacgaagctcctctggttcccctcgtttctccaggcaaaggactagccctccttctctccactctcctcttagatcactcaaggagccaaagcgccaactcattcctcagttctactaccaacacgggcgtccaccagcaaaagaactaaaggagcaatgtctatccatggttgatcaagtttttagtaactatattgatggactacatgtagatgaattcaaatccattacgaaacaagtctgcaagctgccttcttttctttctcctgcacttttcagaaagatcgatcccaattgcactgatatagttacaagggatgcatttatcaagtattggattgatggcaatatgttaactatggacacagcctcccagatatataatatactaaggcagcagggctgcagctatctcagacaggcagacttcaaaccagttcttgatgagcttctggcaacacatcctggattagaatttttgaggacgataagcgagtttcaagaaagatatgctgaaacggtcatctacagaatattttactacattaacagatccggaactggctgccttactcttagagagctgagacgtggaaatttaattgctgctatgcaacaacttgatgaagaggacgacattaataaaattattaggtacttctcctatgagcacttctacgtgatatactgcaaattttgggaacttgatggtgaccatgattgttttattgataaggacaatctcatcaaatatggtaataatgcccttacctacaggattgttgatagaatattttcacagattccaaggaagtttacgagtaaagttgaagggaagatgagttatgaagattttgtgtacttcattctcgctgaggaagacaagtcttccgagcctagtcttgagtattggttcaaatgcgtagacttggatggaaatggggtaatcacttcaaacgaaatgcagtttttcttcgaagagcagctgcatcgcatggaatgcataacccaggaagctgttcttttcagtgatatcctatgtcaaataattgacatgattggacccgagaaggagaactgtatcaccctccaggatctgaaaggatcgaaactttcagcaaacgttttcaatatactcttcaaccttaataagttcatggcatttgaaacacgtgacccatttctcattcgccaggaacgggaagatccaaatttgacagagtgggatcgatttgctcagagagagtatgcgagattgtcaatggaggaagatgtagatgaagtctcaaatgggagtgcagatgtctgggatgaaccactcgaacctccattttagtccatagtgaaaccaaccaaataaggagacttatgatttgaggttttccctggagagagatccatgatcagagattggaggtcactgttggttgttaccagacgctttcatcatcatttccaaaagagtctcagccaaattcatgaaatttttgcaattttgttttggtttcattataaagattatatcaagttgggccctctctccctctacatcatctagtgtccatataaccagttggattgtccaactcagaatgtactcataaatctgaattgttaaactcttttagtctttactgtcacacgaatatattttcagaaagaaatctgaattgtaaatct

SEQ ID NO: 102415 - protein, 529 aa, Arabidopsis thaliana
  peptide (1)..(529): Ceres Seq. ID no. 13610184
MDIDGVDDDLHILDPELLQLPGLSPSPLKPTSLIADDLFSQWLSLPETATLVKSLIDDAKSGTPTNKSKNLPSVFLSSSTPPLSPRSSSGSPRFSRQRTSPPSLHSPLRSLKEPKRQLIPQFYYQHGRPPAKELKEQCLSMVDQVFSNYIDGLHVDEFKSITKQVCKLPSFLSPALFRKIDPNCTDIVTRDAFIKYWIDGNMLTMDTASQIYNILRQQGCSYLRQADFKPVLDELLATHPGLEFLRTISEFQERYAETVIYRIFYYINRSGTGCLTLRELRRGNLIAAMQQLDEEDDINKIIRYFSYEHFYVIYCKFWELDGDHDCFIDKDNLIKYGNNALTYRIVDRIFSQIPRKFTSKVEGKMSYEDFVYFILAEEDKSSEPSLEYWFKCVDLDGNGVITSNEMQFFFEEQLHRMECITQEAVLFSDILCQIIDMIGPEKENCITLQDLKGSKLSANVFNILFNLNKFMAFETRDPFLIRQEREDPNLTEWDRFAQREYARLSMEEDVDEVSNGSADVWDEPLEPPF

SEQ ID NO: 102416 - protein, 389 aa, Arabidopsis thaliana
  peptide (1)..(389): Ceres Seq. ID no. 13610185
MVDQVFSNYIDGLHVDEFKSITKQVCKLPSFLSPALFRKIDPNCTDIVTRDAFIKYWIDGNMLTMDTASQIYNILRQQGCSYLRQADFKPVLDELLATHPGLEFLRTISEFQERYAETVIYRIFYYINRSGTGCLTLRELRRGNLIAAMQQLDEEDDINKIIRYFSYEHFYVIYCKFWELDGDHDCFIDKDNLIKYGNNALTYRIVDRIFSQIPRKFTSKVEGKMSYEDFVYFILAEEDKSSEPSLEYWFKCVDLDGNGVITSNEMQFFFEEQLHRMECITQEAVLFSDILCQIIDMIGPEKENCITLQDLKGSKLSANVFNILFNLNKFMAFETRDPFLIRQEREDPNLTEWDRFAQREYARLSMEEDVDEVSNGSADVWDEPLEPPF

SEQ ID NO: 102417 - protein, 328 aa, Arabidopsis thaliana; identical to SEQ ID NO: 42411
  peptide (1)..(328): Ceres Seq. ID no. 13610186

SEQ ID NO: 102418 - DNA, 730 bp, Arabidopsis thaliana
  misc_feature (1)..(730): Ceres Seq. ID no. 13610191
  misc_feature (1)..(730): Ortholog of  Ceres SEQ ID NO 12610904 as cited in SEQ ID NO 55865
aactttaacaaaagattgttcctgagaaattctagggtttctgaaatcgaggagagatccaatcggcaatggcgaatcaagtgatcaccggaatcaaagaaacagctcagtcaattactggagcggctcgtccatggggcgatttcctcgatctttccgccttcagcttcccttcctccatcgccgatgcaacaactcgcgtaactcagaacctgactcacttccgcatcaactacagtatcattctctctatcctcctaggtctaaccctaatcacacgtccaatcgccatcctcgcgtttatagccgttggcttagcttggttcttcctctacttcgctcgcgaggagccactcacgatcttcggattcactattgatgacggcatcgtcgctgtgcttctcattggtctttcgattgggtcgctagttaccaccggagtttggctcagagctctcaccaccgttggatttggtgttctggttttgatcttacacgctgcgttaagaggaacggatgatcttgtgagtgacgatctggaatcaccttatggaccgatgctctctacctctggcggtggtaacgacggtgctcgtggtgattacagtggaatctgatcaacacgatttgataatgagtttggggatttagggttttgttgttttgtaaattgtcattgtttgttttgtgtcccattaaacattgttaatgacaaaatatgttttaagac

SEQ ID NO: 102419 - protein, 182 aa, Arabidopsis thaliana; identical to SEQ ID NO: 21101
  peptide (1)..(182): Ceres Seq. ID no. 13610192

SEQ ID NO: 102420 - DNA, 2222 bp, Arabidopsis thaliana
  misc_feature (1)..(2222): Ceres Seq. ID no. 13610196
  misc_feature (1)..(2222): Ortholog of  Ceres SEQ ID NO 14310784 as cited in SEQ ID NO 58503
aaaaagaaaaatcgttactttaaagccaaaaagaagaatacacaaacttcattcactctctcccattctcggatctctctcagtgcacagtggttgtcactcttctcctttggtcgaaactctttcttggaaagagcattttgttatcaagactctgaagagctcttttgggaggatagtaaggttggatgatgagagggagatctgatggaggcctaaagaagcggcttattgcttcggtctgtgtcgtggctctattcgtctgtttcttgtttatgtactatggttcctctagccaaggtgcatcagcattggaatatggaagatctttgagaaaactcggatcgtcttatttgagtggagatgatgataatggtgataccaaacaggatgattctgtggctaatgcagaagacagtcttgttgtcgccaaaagttttcctgtttgtgatgaccggcactcggaaatcatcccttgcttagataggaatttcatctaccaaatgaggttgaagcttgatctctctttaatggaacattatgaacggcattgtcctcctcccgaaagacggtttaattgtttgattcctccaccatctggatacaaggttcctattaagtggcctaagagtagagatgaagtgtggaaagcaaacatacctcacactcaccttgcaaaagagaagtctgatcagaactggatggttgagaaaggcgagaaaatttcttttcccggtggaggcactcatttccattacggtgctgataaatacattgcatcgatcgcaaatatgcttaacttttcgaacgatgtattgaatgacgaagggagattaagaacggttcttgatgtcggatgcggagttgcgagttttggagcttaccttctcgcgtctgatataatgacaatgtcactagcccctaatgatgttcatcagaaccaaatccagtttgcgttagaaagaggaatccctgcttatcttggtgttttaggtaccaaaaggcttccttacccgagcagatcattcgagtttgctcattgttctcgatgtaggattgattggcttcaaagagacggacttcttcttcttgagctcgatcgggtactaagaccgggaggttatttcgcgtattcgtctcctgaagcttacgcacaagatgaagagaatttgaaaatctggaaggagatgagtgctcttgttgaaagaatgtgttggagaattgccgttaaaagaaaccaaactgtggtttggcagaaaccgttgagtaatgactgttacttggagagagagcccgggacacagcctcctctctgtcgctcagatgctgatcctgatgcggttgcgggtgtttcaatggaagcttgcatcactccttactccaagcatgaccataaaaccaagggaagtgggttagctccttggccagctaggttgacttcttctcctccccgtcttgcggatttcggttattcaaccgacatgtttgagaaggacacggaactttggaaacaacaagtggacagttactggaatctgatgtcatcgaaagtcaaatcaaacactgtgaggaacataatggacatgaaagctcacatgggttctttcgcagctgctcttaaagacaaagatgtgtgggtgatgaacgttgtctctcccgacggtcccaacactctaaaactgatctacgaccgtggtttaatcggaacaaatcataactggtgtgaggctttctctacatatcctcgaacatacgatctgttgcacgcgtggtctatattttcagacattaaaagcaaaggatgcagtgcagaggatctactaatcgagatggatcggattcttagacctacgggattcgttatcatcagagataagcagagtgttgttgagtcaatcaagaagtatttgcaggctttgcattgggagactgtggcatcagagaaggtaaatacaagttcagaactcgaccaagacagtgaagatggtgagaacaatgtcgttttcattgtccagaagaaactttggctcaccagtgaaagccttagggacagcgagtaaaaaacatatcaaaagcaaagagagagaaattgttttatcccacaaagtttttatatagttttattttgatttttgtagttgatttgtacgacataaagcattattatataaaatactaaaattattcattgtttcttactttcttgaaatattctttaattt

SEQ ID NO: 102421 - protein, 623 aa, Arabidopsis thaliana
  peptide (1)..(623): Ceres Seq. ID no. 13610197
MMRGRSDGGLKKRLIASVCVVALFVCFLFMYYGSSSQGASALEYGRSLRKLGSSYLSGDDDNGDTKQDDSVANAEDSLVVAKSFPVCDDRHSEIIPCLDRNFIYQMRLKLDLSLMEHYERHCPPPERRFNCLIPPPSGYKVPIKWPKSRDEVWKANIPHTHLAKEKSDQNWMVEKGEKISFPGGGTHFHYGADKYIASIANMLNFSNDVLNDEGRLRTVLDVGCGVASFGAYLLASDIMTMSLAPNDVHQNQIQFALERGIPAYLGVLGTKRLPYPSRSFEFAHCSRCRIDWLQRDGLLLLELDRVLRPGGYFAYSSPEAYAQDEENLKIWKEMSALVERMCWRIAVKRNQTVVWQKPLSNDCYLEREPGTQPPLCRSDADPDAVAGVSMEACITPYSKHDHKTKGSGLAPWPARLTSSPPRLADFGYSTDMFEKDTELWKQQVDSYWNLMSSKVKSNTVRNIMDMKAHMGSFAAALKDKDVWVMNVVSPDGPNTLKLIYDRGLIGTNHNWCEAFSTYPRTYDLLHAWSIFSDIKSKGCSAEDLLIEMDRILRPTGFVIIRDKQSVVESIKKYLQALHWETVASEKVNTSSELDQDSEDGENNVVFIVQKKLWLTSESLRDSE

SEQ ID NO: 102422 - protein, 622 aa, Arabidopsis thaliana
  peptide (1)..(622): Ceres Seq. ID no. 13610198
MRGRSDGGLKKRLIASVCVVALFVCFLFMYYGSSSQGASALEYGRSLRKLGSSYLSGDDDNGDTKQDDSVANAEDSLVVAKSFPVCDDRHSEIIPCLDRNFIYQMRLKLDLSLMEHYERHCPPPERRFNCLIPPPSGYKVPIKWPKSRDEVWKANIPHTHLAKEKSDQNWMVEKGEKISFPGGGTHFHYGADKYIASIANMLNFSNDVLNDEGRLRTVLDVGCGVASFGAYLLASDIMTMSLAPNDVHQNQIQFALERGIPAYLGVLGTKRLPYPSRSFEFAHCSRCRIDWLQRDGLLLLELDRVLRPGGYFAYSSPEAYAQDEENLKIWKEMSALVERMCWRIAVKRNQTVVWQKPLSNDCYLEREPGTQPPLCRSDADPDAVAGVSMEACITPYSKHDHKTKGSGLAPWPARLTSSPPRLADFGYSTDMFEKDTELWKQQVDSYWNLMSSKVKSNTVRNIMDMKAHMGSFAAALKDKDVWVMNVVSPDGPNTLKLIYDRGLIGTNHNWCEAFSTYPRTYDLLHAWSIFSDIKSKGCSAEDLLIEMDRILRPTGFVIIRDKQSVVESIKKYLQALHWETVASEKVNTSSELDQDSEDGENNVVFIVQKKLWLTSESLRDSE

SEQ ID NO: 102423 - protein, 594 aa, Arabidopsis thaliana
  peptide (1)..(594): Ceres Seq. ID no. 13610199
MYYGSSSQGASALEYGRSLRKLGSSYLSGDDDNGDTKQDDSVANAEDSLVVAKSFPVCDDRHSEIIPCLDRNFIYQMRLKLDLSLMEHYERHCPPPERRFNCLIPPPSGYKVPIKWPKSRDEVWKANIPHTHLAKEKSDQNWMVEKGEKISFPGGGTHFHYGADKYIASIANMLNFSNDVLNDEGRLRTVLDVGCGVASFGAYLLASDIMTMSLAPNDVHQNQIQFALERGIPAYLGVLGTKRLPYPSRSFEFAHCSRCRIDWLQRDGLLLLELDRVLRPGGYFAYSSPEAYAQDEENLKIWKEMSALVERMCWRIAVKRNQTVVWQKPLSNDCYLEREPGTQPPLCRSDADPDAVAGVSMEACITPYSKHDHKTKGSGLAPWPARLTSSPPRLADFGYSTDMFEKDTELWKQQVDSYWNLMSSKVKSNTVRNIMDMKAHMGSFAAALKDKDVWVMNVVSPDGPNTLKLIYDRGLIGTNHNWCEAFSTYPRTYDLLHAWSIFSDIKSKGCSAEDLLIEMDRILRPTGFVIIRDKQSVVESIKKYLQALHWETVASEKVNTSSELDQDSEDGENNVVFIVQKKLWLTSESLRDSE

SEQ ID NO: 102424 - DNA, 1394 bp, Arabidopsis thaliana
  misc_feature (1)..(1394): Ceres Seq. ID no. 13610217
  misc_feature (1)..(1394): Ortholog of  Ceres SEQ ID NO 12599421 as cited in SEQ ID NO 65135
attacaacaaactctttgagacctaaagagagagagagcgatagtgagatttagatcaacagatttgaatcgatttctgaaaacatgcagtacaagaatctggggaaatcgggtttaaaagtgagcacgctctcgttcggagcgtgggttacgttcgggaaccagctcgatgtgaaagaagcgaaatcgattcttcagtgttgtcgtgatcatggagtcaatttcttcgataacgctgaggtttacgctaatggtcgcgctgaggagattatgggtcaagcgattcgtgaactgggttggcgtcgatccgatatcgtcatctctaccaagatcttctggggtggtcctggtcctaacgataagggtttatctaggaaacatatcgttgaaggcactaaagcttctctcaaacgacttgatatggattacgttgatgtgctctattgccacaggccggatgcttcaactcctatcgaagagactgtgagggcgatgaactacgtgattgataagggttgggccttctattggggaaccagtgaatggtcagctcaacaaattacggaggcatggggagctgctgaccggttggatttggttggtccaattgtcgaacagccagaatacaacatgttcgctaggcacaaagttgagacagagtttcttcctctgtacaccaaccatggtataggtctcactacctggagcccacttgcatctggtgtgctcactggtaaatacaacaagggagctattccctcagacagccgatttgcattggagaactacaaaaaccttgccaatagatcacttgtggatgacgtgctgaggaaagttagcggtctcaaacccattgcagatgagctaggtgtaaccttggctcagcttgcaatcgcatggtgtgcttcaaatcctaatgtgtcatctgttatcactggtgccacaagggagtcacagattcaagaaaatatgaaagctgttgatgtgatcccattgttgacccctattgttctggacaagattgagcaagtgatacagagcaaaccaaaacgtcctgaatcatataggtaaaaccaacatccaagatctctcttccctattcaatcgtttacaaaagagtgttgcaggaaaaagaaaacattagaagaagctctgtgatgtatgttgttggatgttgtctcgttttcgctttgtttgttctctttagcagcttatgcatttttaagactcagacagagagaaagagagactaatgtttttttttagtttttcttgtttcatcatttaaaaaacggtcttatttgttacttgttagtgcaacttaaagtttggttcttgtagtttgccatgtcatgacgtcaatatattgaatagctcatcaaacaattctggtt

SEQ ID NO: 102425 - protein, 328 aa, Arabidopsis thaliana; identical to SEQ ID NO: 35459
  peptide (1)..(328): Ceres Seq. ID no. 13610218

SEQ ID NO: 102426 - protein, 266 aa, Arabidopsis thaliana; identical to SEQ ID NO: 35460
  peptide (1)..(266): Ceres Seq. ID no. 13610219

SEQ ID NO: 102427 - protein, 216 aa, Arabidopsis thaliana; identical to SEQ ID NO: 35461
  peptide (1)..(216): Ceres Seq. ID no. 13610220

SEQ ID NO: 102428 - DNA, 1588 bp, Arabidopsis thaliana
  misc_feature (1)..(1588): Ceres Seq. ID no. 13610221
  misc_feature (1)..(1588): Ortholog of  Ceres SEQ ID NO 13599602 as cited in SEQ ID NO 0
agtttgggcttcaaaataatcaaacgaaaacaatggaaaaagcaacggagagacaaaggatactgcttcgtcatcttcaaccttcgtcatcttccgacgcctctctctctgcctcagcttgcttgtccaaagacagtgctgcatatcaatatggagatgatgttgtcattgtcgcggcacaaaggactgcactttgcaaggcaaaacgtggcagcttcaaggatacatttccagacgagttgcttgcctctgtattgagagcattgatagagaaaactaatgtaaacccaagtgaagttggtgacattgtagtgggtactgttttgggaccaggatctcagagagccagtgaatgcaggatggctgcgttctatgctggtttccccgaaactgttcccatcagaaccgtgaacagacagtgttcatctgggcttcaggctgttgctgatgttgccgctgccataaaagctggtttttatgacattggtattggagctgggctggagtccatgacaactaatccaaggggatggaaaggatcagtcaacccaaatgtgaagaagtttgaacaagctcacaattgccttcttccaatgggtattacttcagaaaatgtagcacaccggtttaatgtttcaagggaggagcaggatcaagctgctgttgattctcacagaaaggctgcttctgctactgcttccggaaagtttaaggatgagataacccctgtaaaaaccaagattgttgacccaaagacaggtgatgagaaacccataacagtttctgtggatgatgggattcgacctaacacaaccctttccggacttgcaaagctgaagccagtgtttaaggaagacggaaccacaactgctgggaattctagccaattaagtgacggtgctggagctgttctccttatgaggagaaatgtcgcaatgcagaaaggccttcccattcttggtgtattcaggacattttctgcagttggtgtggacccagccatcatgggggttgggccagccgttgccattcctgctgcagtcaaggcagctggtttagaactcaatgacgtcgacttgtttgagattaacgaggcatttgcatctcagtttgtttattgtcggaacaagctcgggctagacgcggaaaagatcaatgtcaatggaggagccatagccattggacatcccttgggcgctacaggagccagatgcgttgcgacgctgctgcatgagatgaaacgacgtggtaaagactgtcgttttggcgtagtgtcaatgtgtataggttcgggaatgggagcagccgctgtgtttgagagaggaggcggtgtggatgagctctgtgatgtccggaaagtctaatgacaataaggccttttgaccaaggaccctagctaaggaccaaattagaacacagtactacaaataaacattatcacaaataaatgcgttctagatgaataaatcataacgatagtacaatacatgagggaaaacttcttgttattttttaactctcttttgttatatggttggaatatatacagatactctttgagaacatatcataatctatttggtttgtc

SEQ ID NO: 102429 - protein, 453 aa, Arabidopsis thaliana; identical to SEQ ID NO: 42024
  peptide (1)..(453): Ceres Seq. ID no. 13610222

SEQ ID NO: 102430 - protein, 443 aa, Arabidopsis thaliana; identical to SEQ ID NO: 42025
  peptide (1)..(443): Ceres Seq. ID no. 13610223

SEQ ID NO: 102431 - protein, 334 aa, Arabidopsis thaliana; identical to SEQ ID NO: 42026
  peptide (1)..(334): Ceres Seq. ID no. 13610224

SEQ ID NO: 102432 - DNA, 1336 bp, Arabidopsis thaliana
  misc_feature (1)..(1336): Ceres Seq. ID no. 13610304
  misc_feature (1)..(1336): Ortholog of  Ceres SEQ ID NO 13654187 as cited in SEQ ID NO 68219
atatgaacataacccaatctgaagatcaatcataaccttaaaccatctctcataattttagtatttctattctcaccaccaaaactcgttgatacatcacaccccaactgttgttactcatgtcctacagatcgatttaccgcactcttcgaccggtactatcatcttcggtacaatcctccggtttaggaattggaggattcaggggacatctcattagccacttgcccaatgttcggctattgagctctgacacgtcatctccggtaagtgggaataaccagccagaaaatcctatccgaacggccgatggtaaagttatatccacttattggggtatacctcctactaagatcactaaaccggacggttcagcttggaagtggaattgttttcagccatgggattcatacaaaccggatgtgtccattgatgtaactaaacatcataaaccctccaatttcactgacaaattcgcatattggaccgttcaaactctgaaaataccggttcaactattttttcagaggaagcacatgtgccatgcgatgttgctagagacggtggctgcggtgccgggaatggtcggggggatgcttttgcacttgaaatctctccggaggttcgaacatagcgggggatggatcaaagctttgctcgaagaggctgagaacgagcgtatgcatctcatgactttcatcgaactttcacaacccaaatggtacgaacgagcgattgtgttcacggtccaaggcgttttcttcaacgcatatttcctggcttatgtaatttcacccaaacttgctcatcgtatcactggatacttagaagaagaggctgtaaattcttacactgaatttctcaaagacattgatgccggaaaattcgaaaactcgccagctccagccatcgcaatcgattactggcggttgcctaaagatgcaacgcttagggatgtggtttatgttatacgagctgacgaagctcaccaccgtgatattaaccactatgcttcggatatacaattcaaaggacatgaactcaaggaagctccggctcctattggatatcattaaagattatgtgacaaagtcacaaagctgtgtatacatctatgaacatatgttgttgtggatctccatgatatttttattttatgttttcgatttatttaaaactgttattcgtttttattagctcaatatggatatttaaaccatattattttgttacgatttatgaacatagtactactcatgtgtgtgtaaaagatcatactgcctggacacgaagcggatatccggaaaaattataatatttgttttttgattcgttt

SEQ ID NO: 102433 - protein, 318 aa, Arabidopsis thaliana; identical to SEQ ID NO: 84402
  peptide (1)..(318): Ceres Seq. ID no. 13610305

SEQ ID NO: 102434 - protein, 179 aa, Arabidopsis thaliana; identical to SEQ ID NO: 84403
  peptide (1)..(179): Ceres Seq. ID no. 13610306

SEQ ID NO: 102435 - protein, 175 aa, Arabidopsis thaliana; identical to SEQ ID NO: 84404
  peptide (1)..(175): Ceres Seq. ID no. 13610307

SEQ ID NO: 102436 - DNA, 795 bp, Arabidopsis thaliana
  misc_feature (1)..(795): Ceres Seq. ID no. 13610308
  misc_feature (1)..(795): Ortholog of  Ceres SEQ ID NO 12610341 as cited in SEQ ID NO 56073
atgattaatgtctgaaaaatttgatatttgaagcgaatcaacaacaacagtcgggttcgtgaaaaaaaaagatttgatcggctaaacttggtcggacttgtcaatggcagacgtacctggatacctgcgcacttgtttggatatggggaagatagctttcttagcaatccttgtatctacagggattgtgttgcagattctggcttgtgctctgttcaataactggtggccaatgctaagtgttataatgtatgtgctcctcccaatgcctttgctcttctttggtggatcagacagtacatctctattcaacgagtcagataatagttggatcaatgcagccaagttcttgactggtgcatcagcagttggaagcgtcgcgataccatcgattctaaaacacgccggactcatcggttggggcgcattagcccttgatctctcatcctacgttgtcttcctcgtggctattttgggttacatttgcataggagatgccagtgacaactattacagctacatttaaaaagacacacacaaattcatcatcatttgtttaaacctcaacaaagtctcagccttttatcacttccccgttcgattgatgcttcgaaacgaaaacatcttgtttctatggaatgactcactgattggattttcacaagtttaagagtttgtgtgtcaagtgtatgtatgaatgattttttttttgggtggttttgttacgttttgatgtatagaacatatttattatttggtggaatatatataaattttctttacaaaagcatattg

SEQ ID NO: 102437 - protein, 140 aa, Arabidopsis thaliana; identical to SEQ ID NO: 27802
  peptide (1)..(140): Ceres Seq. ID no. 13610309

SEQ ID NO: 102438 - protein, 127 aa, Arabidopsis thaliana; identical to SEQ ID NO: 27803
  peptide (1)..(127): Ceres Seq. ID no. 13610310

SEQ ID NO: 102439 - protein, 97 aa, Arabidopsis thaliana; identical to SEQ ID NO: 27804
  peptide (1)..(97): Ceres Seq. ID no. 13610311

SEQ ID NO: 102440 - DNA, 740 bp, Arabidopsis thaliana
  misc_feature (1)..(740): Ceres Seq. ID no. 13610312
  misc_feature (1)..(740): Ortholog of  Ceres SEQ ID NO 15172885 as cited in SEQ ID NO 51883
  misc_feature (1)..(740): Ortholog of  Ceres SEQ ID NO 13594663 as cited in SEQ ID NO 51894
  misc_feature (1)..(740): Ortholog of  Ceres SEQ ID NO 15226128 as cited in SEQ ID NO 60215
  misc_feature (1)..(740): Ortholog of  Ceres SEQ ID NO 14302271 as cited in SEQ ID NO 68360
  misc_feature (1)..(740): Ortholog of  Ceres SEQ ID NO 12635134 as cited in SEQ ID NO 0
  misc_feature (1)..(740): Ortholog of  Ceres SEQ ID NO 13623037 as cited in SEQ ID NO 0
  misc_feature (1)..(740): Ortholog of  Ceres SEQ ID NO 15175141 as cited in SEQ ID NO 0
aattaagatctctctttactgttttcccacttttcctttgagaaaactcaaaacaaagtaaacaaacaaaccagaaaaaggaatggcactgagaatgtgggcttcctctacagcaaatgctctcaagctctcttcttctgcctccaaatctcatctcttgccagctttctccatctccagatgcttctcctcagtgttggaaggacttaagtatgcaaattcacatgagtgggtgaaacatgaaggctcagttgctacaattggtatcactgaccatgcgcaggaccatttaggagaagttgtgtttgtggagctgcctgaagcaaacagttcagtgagcaaagaaaaaagctttggagctgttgagagtgttaaggccacaagtgagattctatctccaatctctggtgaagtcattgaggttaacacaaagctcaccgagtcacctggtttgatcaactcaagcccttatgaagatggttggatgataaaggtgaaaccgagcagccccgcggagttggaagctctgatgggtccaaaggaatacaccaagttctgcgaagaagaagacgctgctcactagggtttcttcgccttttatctttcccaaatgttcgaaaaacagagcaaaacaagagaatccatgctttagtttcaatctttcatttctcaatgtttcttaccactctcaacttgtatcagtgtgatactaatttgattaaaagatcatccaatgagac

SEQ ID NO: 102441 - protein, 166 aa, Arabidopsis thaliana; identical to SEQ ID NO: 35439
  peptide (1)..(166): Ceres Seq. ID no. 13610313

SEQ ID NO: 102442 - protein, 162 aa, Arabidopsis thaliana; identical to SEQ ID NO: 35440
  peptide (1)..(162): Ceres Seq. ID no. 13610314

SEQ ID NO: 102443 - DNA, 1111 bp, Arabidopsis thaliana
  misc_feature (1)..(1111): Ceres Seq. ID no. 13610319
  misc_feature (1)..(1111): Ortholog of  Ceres SEQ ID NO 13639514 as cited in SEQ ID NO 55736
  misc_feature (1)..(1111): Ortholog of  Ceres SEQ ID NO 13595560 as cited in SEQ ID NO 56738
  misc_feature (1)..(1111): Ortholog of  Ceres SEQ ID NO 14312254 as cited in SEQ ID NO 59148
  misc_feature (1)..(1111): Ortholog of  Ceres SEQ ID NO 13662804 as cited in SEQ ID NO 65394
  misc_feature (1)..(1111): Ortholog of  Ceres SEQ ID NO 13656519 as cited in SEQ ID NO 69226
gactcttcgctcttctttttacacgaacacttctctctctctctcctcactctctttcctctttctctcactaaagaaaaaactagcgatcgaagagaatcatcatcaagaagctactatcagagaaatcaaagccctacaacacaagaatcaacatgggagctgaagaagaaaccaataagacatatcctcattggctaaaacctctgctacgagaaaagttctttgtacaatgcaaattacacgcagattcacataagagtgaatgtaacatgtactgtttagactgtaccaatggtcctctctgttctctctgcttatctttccacaaagaccatcacgccattcagataagaagatcatcatatcacgatgttataagagtgtcggagattcagaagtttctggacataacaggagttcagacatatgtgatcaacagtgctaaggttgtgttcttgaacgagagacctcagcctcgaccaggcaaaggtgtgatcaatacttgtgaagtctgttatcgaagcctcgttgattccttcagattctgctctcttggttgcaagatctctggaatatcgaagaagaagagaaaggaatggacgaacaatctttcggattctgatgattcgtatagcagtacgagtatcggaaggctcaagaagaatgatgacattatgaataatagtttcacaccatcaacaccgcctttatcagccgtgaatcgtcgaattgcaaagcgaaggaagggaatcccgcatcgtgctcctttcggaggactaatcatagaatactaagaaatggtaatgtatagtcttatgctaataaccatcactagtagtttcggggtacatatatgtatatatatatatatctataatggtatataaagcaatgtaaaataaaagcttaacatcatagtattgtgtagatattaaaggggtaaaaaatgttgggaagatgatagaatgaggcatgaaatgaatacttgtgcctgtatattttgagctcaatggacaaatatgtaaatgtagaatagtgttgtggacaagacaatagtgataagtatgtgatgaatgtgaatggaataaaggtcattttactttcgatg

SEQ ID NO: 102444 - protein, 213 aa, Arabidopsis thaliana
  peptide (1)..(213): Ceres Seq. ID no. 13610320
MGAEEETNKTYPHWLKPLLREKFFVQCKLHADSHKSECNMYCLDCTNGPLCSLCLSFHKDHHAIQIRRSSYHDVIRVSEIQKFLDITGVQTYVINSAKVVFLNERPQPRPGKGVINTCEVCYRSLVDSFRFCSLGCKISGISKKKRKEWTNNLSDSDDSYSSTSIGRLKKNDDIMNNSFTPSTPPLSAVNRRIAKRRKGIPHRAPFGGLIIEY

SEQ ID NO: 102445 - protein, 174 aa, Arabidopsis thaliana
  peptide (1)..(174): Ceres Seq. ID no. 13610321
MYCLDCTNGPLCSLCLSFHKDHHAIQIRRSSYHDVIRVSEIQKFLDITGVQTYVINSAKVVFLNERPQPRPGKGVINTCEVCYRSLVDSFRFCSLGCKISGISKKKRKEWTNNLSDSDDSYSSTSIGRLKKNDDIMNNSFTPSTPPLSAVNRRIAKRRKGIPHRAPFGGLIIEY

SEQ ID NO: 102446 - DNA, 1530 bp, Arabidopsis thaliana
  misc_feature (1)..(1530): Ceres Seq. ID no. 13610322
  misc_feature (1)..(1530): Ortholog of  Ceres SEQ ID NO 13596581 as cited in SEQ ID NO 62420
  misc_feature (1)..(1530): Ortholog of  Ceres SEQ ID NO 13591273 as cited in SEQ ID NO 65904
  misc_feature (1)..(1530): Ortholog of  Ceres SEQ ID NO 13623086 as cited in SEQ ID NO 0
attcgcattacgatggtttatgtaaagagattggttatatcaatcttatcaaacccacctctctcgggattattgactcgatttggatatttatacatgtgactatatttagacatacatagatctcagtcctgtatatatagagctacattcataaaagaaagatctaacataacaaaaggaaaaaagcatcaagaacatggcggagactcaaggaaaggtcatcacttgtaaagctgctgtcgtatggggtccaaaagtgccgcttgtaattcaagaaatatgcgtcgatcctcctcagaaaatggaagtccgtgttaaaattctttactcctccatttgccacaccgatctcggatgttggaacggcacgaacgaagctgaacgagcatttccaaggattcttggccatgaagctgtcgggattgtagagagtgttggagaaggagtaaaagatgtgaaagaaggagactacgtgattccgactttcaatggagaatgtggtgaatgtaaagtgtgtaagagagaagaaagtaatctctgtgagcgatatcatgtggatcctatgaagagggtgatggtgaatgatggagggacgagattctcaaccaccataaacaaggacggtggttcgagccaaagccaacctatatatcacttccttaacacctccacgttcaccgaatacactgtcttggactcggcttgcgtcgtcaagatcgatcctaattctcctctcaagcaaatgagcctcttgagttgtggtgtctcaactggggttggagcagcttggaacattgcaaatgtgaaggaaggaaaaagcactgctgtctttggattgggttccgttggactcgctgttgctgaaggtgcaagagctagaggagcttctaggatcattggtgttgatgctaatgcttccaaatttgagaaaggtaaactgatgggagtaacagatttcataaaccctaaagacttaactaagccagtacatcagatgatacgagagataacgggaggaggcgtggactatagctttgaatgtacaggaaacgttgatgttcttcgcgaagcctttttatccactcacgtcggttggggatcgacagtacttgttgggatctatccgacgccaagaacattgcctcttcacccaatggagcttttcgacggccgtagaatcaccggttctgtgtttggtggcttcaagcccaaatctcagcttccaaatttcgcccaacaatgcatgaaaggggttgtgaaattggaaccttttattaccaatgagcttccatttgagaagataaacgatgcgtttcagctgcttcgcgatggaaaatctcttcggtgcattcttcaaatctctaaacttctcaagagatgattctacacattcacaaagtttactacactatatataatttacccaacaaacacttattttactgcattattcagtatattatcttacctataaatgtgtatcatcatcatcaataacgcgattatttgtgctgaaggattatatat

SEQ ID NO: 102447 - protein, 394 aa, Arabidopsis thaliana
  peptide (1)..(394): Ceres Seq. ID no. 13610323
MAETQGKVITCKAAVVWGPKVPLVIQEICVDPPQKMEVRVKILYSSICHTDLGCWNGTNEAERAFPRILGHEAVGIVESVGEGVKDVKEGDYVIPTFNGECGECKVCKREESNLCERYHVDPMKRVMVNDGGTRFSTTINKDGGSSQSQPIYHFLNTSTFTEYTVLDSACVVKIDPNSPLKQMSLLSCGVSTGVGAAWNIANVKEGKSTAVFGLGSVGLAVAEGARARGASRIIGVDANASKFEKGKLMGVTDFINPKDLTKPVHQMIREITGGGVDYSFECTGNVDVLREAFLSTHVGWGSTVLVGIYPTPRTLPLHPMELFDGRRITGSVFGGFKPKSQLPNFAQQCMKGVVKLEPFITNELPFEKINDAFQLLRDGKSLRCILQISKLLKR

SEQ ID NO: 102448 - protein, 359 aa, Arabidopsis thaliana
  peptide (1)..(359): Ceres Seq. ID no. 13610324
MEVRVKILYSSICHTDLGCWNGTNEAERAFPRILGHEAVGIVESVGEGVKDVKEGDYVIPTFNGECGECKVCKREESNLCERYHVDPMKRVMVNDGGTRFSTTINKDGGSSQSQPIYHFLNTSTFTEYTVLDSACVVKIDPNSPLKQMSLLSCGVSTGVGAAWNIANVKEGKSTAVFGLGSVGLAVAEGARARGASRIIGVDANASKFEKGKLMGVTDFINPKDLTKPVHQMIREITGGGVDYSFECTGNVDVLREAFLSTHVGWGSTVLVGIYPTPRTLPLHPMELFDGRRITGSVFGGFKPKSQLPNFAQQCMKGVVKLEPFITNELPFEKINDAFQLLRDGKSLRCILQISKLLKR

SEQ ID NO: 102449 - protein, 272 aa, Arabidopsis thaliana
  peptide (1)..(272): Ceres Seq. ID no. 13610325
MKRVMVNDGGTRFSTTINKDGGSSQSQPIYHFLNTSTFTEYTVLDSACVVKIDPNSPLKQMSLLSCGVSTGVGAAWNIANVKEGKSTAVFGLGSVGLAVAEGARARGASRIIGVDANASKFEKGKLMGVTDFINPKDLTKPVHQMIREITGGGVDYSFECTGNVDVLREAFLSTHVGWGSTVLVGIYPTPRTLPLHPMELFDGRRITGSVFGGFKPKSQLPNFAQQCMKGVVKLEPFITNELPFEKINDAFQLLRDGKSLRCILQISKLLKR

SEQ ID NO: 102450 - DNA, 1408 bp, Arabidopsis thaliana
  misc_feature (1)..(1408): Ceres Seq. ID no. 13610326
  misc_feature (1)..(1408): Ortholog of  Ceres SEQ ID NO 15168476 as cited in SEQ ID NO 60262
atgctgattcctctccttttcttcctcaactcataaacccgatcggccgattccttcacaattatccttaaaattttcgattttgattattgggtttctctctgatcatggcggttgttgagactggagcagcagctactgctgctgatgcaggaggagtcgtgatccagccgccgccgtcttcaccaccatcttcaatgactagtcaagattccggcgtttcttccgatgatcagaaccatcactctaggatcgatcaagttctccggcacgatcaaggtctttacagcaagatcgggtcacacgtggcgagatccgacggcgttgacggtggtgagagctttaagcgtgatatgagagagcttcaggagcttttctctaagcttaatcctatggctgaagagtttgttcctccttctctgaataaacaaggaggtaacggtgttaacggtggtttcttcacctctgctggttccttcttccgcaacaatggctttgctggtaccggaaatggcggatacggtaacgaaaacggtggtttccgacggaagaagagttttggtcaagggaaacgaaggatgaatgctcgaacaagcatggctcagcgagaagatgttatccgtagaaccgtctacgtctctgatctcgatcaacaggtcactgaagagcagcttgctggtttgtttgtgagctgtggacaggttgttgactgtcgcatatgcggtgacccaaactcggtccttcggtttgcattcatagagttcactgatgaagagggtgcgatgactgctctaaatttatcggggactatgttgggattctatcctgtgaaagttttaccatccaaaacagctatagcaccggttaacccgacatttttgcctaggactgaagatgagcgtgagatgtgtgcaagaactatctactgtactaacatagacaagaaggtgactcaatcagacgtgaagatcttttttgagtccttctgcggagaggtttatcgcctgaggctgcttggagattatcaacactcgactcgtattgcttttgtagagttcgtaatggcggaaagcgcaatagctgctctcaactgcagtggagttgttcttggttctttacctataagggtgagtccttcaaagacgcctgttcgtccgagatcaccgaggcatccaatgcattgatcttagctttacaggttttcacatatctcatgtctccgcaatatatatatcgctgtgtcgtcttaaaaacagcattacacagacatgtaaagatgtttgtctgcatctctcatctcttgttttcgaaatgtaactctgggatctgatgatgcttctttcttcttcctttacctgagaatcttttgggtaaaaaaaacctcgtagagagtttttatttatctctt

SEQ ID NO: 102451 - protein, 358 aa, Arabidopsis thaliana
  peptide (1)..(358): Ceres Seq. ID no. 13610327
MAVVETGAAATAADAGGVVIQPPPSSPPSSMTSQDSGVSSDDQNHHSRIDQVLRHDQGLYSKIGSHVARSDGVDGGESFKRDMRELQELFSKLNPMAEEFVPPSLNKQGGNGVNGGFFTSAGSFFRNNGFAGTGNGGYGNENGGFRRKKSFGQGKRRMNARTSMAQREDVIRRTVYVSDLDQQVTEEQLAGLFVSCGQVVDCRICGDPNSVLRFAFIEFTDEEGAMTALNLSGTMLGFYPVKVLPSKTAIAPVNPTFLPRTEDEREMCARTIYCTNIDKKVTQSDVKIFFESFCGEVYRLRLLGDYQHSTRIAFVEFVMAESAIAALNCSGVVLGSLPIRVSPSKTPVRPRSPRHPMH

SEQ ID NO: 102452 - protein, 328 aa, Arabidopsis thaliana
  peptide (1)..(328): Ceres Seq. ID no. 13610328
MTSQDSGVSSDDQNHHSRIDQVLRHDQGLYSKIGSHVARSDGVDGGESFKRDMRELQELFSKLNPMAEEFVPPSLNKQGGNGVNGGFFTSAGSFFRNNGFAGTGNGGYGNENGGFRRKKSFGQGKRRMNARTSMAQREDVIRRTVYVSDLDQQVTEEQLAGLFVSCGQVVDCRICGDPNSVLRFAFIEFTDEEGAMTALNLSGTMLGFYPVKVLPSKTAIAPVNPTFLPRTEDEREMCARTIYCTNIDKKVTQSDVKIFFESFCGEVYRLRLLGDYQHSTRIAFVEFVMAESAIAALNCSGVVLGSLPIRVSPSKTPVRPRSPRHPMH

SEQ ID NO: 102453 - protein, 276 aa, Arabidopsis thaliana
  peptide (1)..(276): Ceres Seq. ID no. 13610329
MRELQELFSKLNPMAEEFVPPSLNKQGGNGVNGGFFTSAGSFFRNNGFAGTGNGGYGNENGGFRRKKSFGQGKRRMNARTSMAQREDVIRRTVYVSDLDQQVTEEQLAGLFVSCGQVVDCRICGDPNSVLRFAFIEFTDEEGAMTALNLSGTMLGFYPVKVLPSKTAIAPVNPTFLPRTEDEREMCARTIYCTNIDKKVTQSDVKIFFESFCGEVYRLRLLGDYQHSTRIAFVEFVMAESAIAALNCSGVVLGSLPIRVSPSKTPVRPRSPRHPMH

SEQ ID NO: 102454 - DNA, 1335 bp, Arabidopsis thaliana
  misc_feature (1)..(1335): Ceres Seq. ID no. 13610330
  misc_feature (1)..(1335): Ortholog of  Ceres SEQ ID NO 15177221 as cited in SEQ ID NO 53046
  misc_feature (1)..(1335): Ortholog of  Ceres SEQ ID NO 12616332 as cited in SEQ ID NO 63449
  misc_feature (1)..(1335): Ortholog of  Ceres SEQ ID NO 13597498 as cited in SEQ ID NO 64648
attaaagagttttttttcgaaaagagttaaagaaaaaatgggaatgggaaggtatcagaaatctgcaacttctggtgtttcagctagatgggtttttgttctctgtatttctagcttccttcttggtgttcttgtcgttaacaggcttttggcaagttttgaaaccgtagatggcattgagagagcttcacctgagcaaaatgatcaatctagatcacttaatcctcttgttgattgtgagagcaaggaaggagacattctatctcgagtttcgcatactcatgatgttatcaagacattagacaagacaatttcttctcttgaggtagaactagctacagctcgagcagcaagatctgatggtagagatggatctccagctgttgcaaaaacagtagcagaccaatcgaagattcggcctcggatgttctttgtgatgggaatcatgactgctttcagtagcagaaaacgaagagactccataagaggaacttggcttcctaaaggggatgaattgaaaagattagagacagagaagggaatcattatgagatttgttataggtcacagttcttctcctggaggagtcttggaccacaccattgaagctgaagaagaacaacacaaagacttctttcgactgaatcacatagaaggttatcatgaattatcatctaaaacccaaatatacttctcatctgctgttgcaaaatgggatgcagacttctacatcaaagtggatgatgatgttcacgtaaatctcggaatgcttggttctacattggttgcatgaagtctggacctgtccttgctcaaaaaggagtcaaataccatgagccagaatattggaagtttggtgaagaaggaaacaaatacttcagacatgcaactggacaaatctatgcaatctccaaagatttagcaacttatatctcagttaaccggcaactacttcacaagtatgcaaatgaagatgtctctttaggttcttggttcattggtctcgatgttgaacatatcgacgatagaagcctctgctgtggaacacctttagattgtgagtggaagggtcaagcaggaaacccttgcgcagcatcgttcgattggagctgtagtggaatctgcaaatccgtagatagaatgcttgaagtacatcaacgttgtggtgaaggcgatggagcaatttggcatagtagtttctaaatattttctctctgtaatgtatagttttcagcttcttcttcttcttatggattattagtctaggttatgattatgattgatgttacatgtttaacattacagacatcatctaaaaggtcccaatttttgcct

SEQ ID NO: 102455 - protein, 263 aa, Arabidopsis thaliana
  peptide (1)..(263): Ceres Seq. ID no. 13610331
LKSFFSKRVKEKMGMGRYQKSATSGVSARWVFVLCISSFLLGVLVVNRLLASFETVDGIERASPEQNDQSRSLNPLVDCESKEGDILSRVSHTHDVIKTLDKTISSLEVELATARAARSDGRDGSPAVAKTVADQSKIRPRMFFVMGIMTAFSSRKRRDSIRGTWLPKGDELKRLETEKGIIMRFVIGHSSSPGGVLDHTIEAEEEQHKDFFRLNHIEGYHELSSKTQIYFSSAVAKWDADFYIKVDDDVHVNLGMLGSTLVA

SEQ ID NO: 102456 - protein, 251 aa, Arabidopsis thaliana
  peptide (1)..(251): Ceres Seq. ID no. 13610332
MGMGRYQKSATSGVSARWVFVLCISSFLLGVLVVNRLLASFETVDGIERASPEQNDQSRSLNPLVDCESKEGDILSRVSHTHDVIKTLDKTISSLEVELATARAARSDGRDGSPAVAKTVADQSKIRPRMFFVMGIMTAFSSRKRRDSIRGTWLPKGDELKRLETEKGIIMRFVIGHSSSPGGVLDHTIEAEEEQHKDFFRLNHIEGYHELSSKTQIYFSSAVAKWDADFYIKVDDDVHVNLGMLGSTLVA

SEQ ID NO: 102457 - protein, 249 aa, Arabidopsis thaliana
  peptide (1)..(249): Ceres Seq. ID no. 13610333
MGRYQKSATSGVSARWVFVLCISSFLLGVLVVNRLLASFETVDGIERASPEQNDQSRSLNPLVDCESKEGDILSRVSHTHDVIKTLDKTISSLEVELATARAARSDGRDGSPAVAKTVADQSKIRPRMFFVMGIMTAFSSRKRRDSIRGTWLPKGDELKRLETEKGIIMRFVIGHSSSPGGVLDHTIEAEEEQHKDFFRLNHIEGYHELSSKTQIYFSSAVAKWDADFYIKVDDDVHVNLGMLGSTLVA

SEQ ID NO: 102458 - DNA, 823 bp, Arabidopsis thaliana
  misc_feature (1)..(823): Ceres Seq. ID no. 13610334
  misc_feature (1)..(823): Ortholog of  Ceres SEQ ID NO 14316371 as cited in SEQ ID NO 60113
actgttaaggaaggtcttgctgcgctaagaaagaaaagaagaagaaagatgccaggagcaattgtggaggaagagaaatctcagattgaatccatcaaagagcaattgaaactcgagaaggaagatgatgttgttgtggaggatgtgaaagacggagaggaagaagacgatgatgaagacgatgaggacgtcgaagttgaaggggaaggtggaaatgagaatgcaaagcaaagtagaagcgagaagaaaagtcgcaaagctgttctaaagcttggcatgaaacctgtctcagatgtcagcagagtgacaatcaaaagagccaagaatgtgttatttgtcatctcgaagccagatgtttacaagagtcccaatgcagagacttacgtcatttttggagaggccaaggtcgacgatttgagctctcagctacagactcaagctgctcagaggtttaagatgcctgatgtgacatccatgctacctaacgccggttctgaagctaccatggctccactagcagaggaagaagacgaagacgatgttgatgacactggtgttgaagccagagacattgatcttgtcatgacccaagcaggtgtctccaaggccaaagccgtcagtgctctaaaggctaatgatggggatatcgtttcagccattatggaactcactacatagagttgagtagtagagccacctaaattgtgcttttgtttcattgtttcttgtctcagctaccattttctttgaacattattaattatgtctccccttgatttgaagtcattatctgtctactctgatcaaagtatttaatttgcgg

SEQ ID NO: 102459 - protein, 225 aa, Arabidopsis thaliana; identical to SEQ ID NO: 39227
  peptide (1)..(225): Ceres Seq. ID no. 13610335

SEQ ID NO: 102460 - protein, 209 aa, Arabidopsis thaliana; identical to SEQ ID NO: 39228
  peptide (1)..(209): Ceres Seq. ID no. 13610336

SEQ ID NO: 102461 - protein, 133 aa, Arabidopsis thaliana; identical to SEQ ID NO: 39229
  peptide (1)..(133): Ceres Seq. ID no. 13610337

SEQ ID NO: 102462 - DNA, 1688 bp, Arabidopsis thaliana
  misc_feature (1)..(1688): Ceres Seq. ID no. 13610341
  misc_feature (1)..(1688): Ortholog of  Ceres SEQ ID NO 15180548 as cited in SEQ ID NO 0
aatcaaaaacgaaaaaaaacaaaaaaaaaactttgaatccgtttgttgcttcttcgcaacgttctctctcaaactcgcagagtaacagattcgataatgggaggaggatttagagttttgcatttggtgaggccattcttggcttttcttccagaagtgcaaagtgctgacaggaagattccatttagagagaaagtgatctacactgtcatctccctcttcattttccttgtttgtagtcagcttcctctctatgggatccattctaccaccggtgctgatccgttctattggatgcgtgtcattctcgcatcgaatcgtggaacggtgatggagcttggtattactcctattgtcacatctggattagtgatgcaactcttagcagggtcaaagattattgaggttgacaacaatgttcgtgaggatcgtgctctcttgaatggtgctcagaagcttctttggattctgagtgctattggtgaggctgttgcatatgttctttcgggaatgtatggtcctgttggtcaacttggtgttggaaatgctattctgatcatcctccagcttttctttgctggaatcatcgttatctgtcttgacgagcttcttcagaagggatatggtcttggctctggaatctctcttttcatagcaaccaatatctgtgaaagcattatctggaaagcatttagccccacgacaatcaacactggtcgtggagctgagtttgaaggcgctgtgattgcgttgttccatatgctgataactaagtccaataaggttgctgcgctcagacaagctttttaccggcagaaccttccaaatgttaccaacttgcttgcaacagtgttgatcttcttgattgttatatacttccaaggcttccgtgttgtgttgcccgtgaggtcaaagagtgctcgtggccaacagggttcatacccgatcaagctgttctacacctccaacatgccaatcattctccagtctgctctcgtctcaaacctctacttcatctctcagcttctctacaggaaattcagtggaaatttctttgtgaacctattgggacagtggaaagaatcagagtacagtggacaatctataccagttagtggtcttgcatatttgatcacagctccggcaagttttgccgatatggcagctcatccattccatgctctgttctatatcgtcttcatgctcactgcttgtgccctattctcaaaaacatggattgaagtctccgggtcttctgctagagatgtagctaagcagctaaaggaacaacaaatggtgatgccgggacacagagagtccaacttacaaaaggagctgaaccggtacatcccaacagcggctgcatttggaggagtgtgcatcggtgcgctcactgttttggctgatttcatgggagccattgggtcggggactggaatcttacttgcagtcacaatcatatatcagtattttgaaacctttgagaaggaaaaagccagcgagcttggtttctttggattctgattgtttctagtcatataaaggggtaaattttgctaagactagtgagaaatttgaaagcctaattaagaagtagctttcctcttatgtgttcattcaaaggttcaatagacgattaaaagagcattttggtagacactttttgattaaccaacagatttttctct

SEQ ID NO: 102463 - protein, 475 aa, Arabidopsis thaliana
  peptide (1)..(475): Ceres Seq. ID no. 13610342
MGGGFRVLHLVRPFLAFLPEVQSADRKIPFREKVIYTVISLFIFLVCSQLPLYGIHSTTGADPFYWMRVILASNRGTVMELGITPIVTSGLVMQLLAGSKIIEVDNNVREDRALLNGAQKLLWILSAIGEAVAYVLSGMYGPVGQLGVGNAILIILQLFFAGIIVICLDELLQKGYGLGSGISLFIATNICESIIWKAFSPTTINTGRGAEFEGAVIALFHMLITKSNKVAALRQAFYRQNLPNVTNLLATVLIFLIVIYFQGFRVVLPVRSKSARGQQGSYPIKLFYTSNMPIILQSALVSNLYFISQLLYRKFSGNFFVNLLGQWKESEYSGQSIPVSGLAYLITAPASFADMAAHPFHALFYIVFMLTACALFSKTWIEVSGSSARDVAKQLKEQQMVMPGHRESNLQKELNRYIPTAAAFGGVCIGALTVLADFMGAIGSGTGILLAVTIIYQYFETFEKEKASELGFFGF

SEQ ID NO: 102464 - protein, 409 aa, Arabidopsis thaliana
  peptide (1)..(409): Ceres Seq. ID no. 13610343
MRVILASNRGTVMELGITPIVTSGLVMQLLAGSKIIEVDNNVREDRALLNGAQKLLWILSAIGEAVAYVLSGMYGPVGQLGVGNAILIILQLFFAGIIVICLDELLQKGYGLGSGISLFIATNICESIIWKAFSPTTINTGRGAEFEGAVIALFHMLITKSNKVAALRQAFYRQNLPNVTNLLATVLIFLIVIYFQGFRVVLPVRSKSARGQQGSYPIKLFYTSNMPIILQSALVSNLYFISQLLYRKFSGNFFVNLLGQWKESEYSGQSIPVSGLAYLITAPASFADMAAHPFHALFYIVFMLTACALFSKTWIEVSGSSARDVAKQLKEQQMVMPGHRESNLQKELNRYIPTAAAFGGVCIGALTVLADFMGAIGSGTGILLAVTIIYQYFETFEKEKASELGFFGF

SEQ ID NO: 102465 - protein, 397 aa, Arabidopsis thaliana
  peptide (1)..(397): Ceres Seq. ID no. 13610344
MELGITPIVTSGLVMQLLAGSKIIEVDNNVREDRALLNGAQKLLWILSAIGEAVAYVLSGMYGPVGQLGVGNAILIILQLFFAGIIVICLDELLQKGYGLGSGISLFIATNICESIIWKAFSPTTINTGRGAEFEGAVIALFHMLITKSNKVAALRQAFYRQNLPNVTNLLATVLIFLIVIYFQGFRVVLPVRSKSARGQQGSYPIKLFYTSNMPIILQSALVSNLYFISQLLYRKFSGNFFVNLLGQWKESEYSGQSIPVSGLAYLITAPASFADMAAHPFHALFYIVFMLTACALFSKTWIEVSGSSARDVAKQLKEQQMVMPGHRESNLQKELNRYIPTAAAFGGVCIGALTVLADFMGAIGSGTGILLAVTIIYQYFETFEKEKASELGFFGF

SEQ ID NO: 102466 - DNA, 902 bp, Arabidopsis thaliana
  misc_feature (1)..(902): Ceres Seq. ID no. 13610377
  misc_feature (1)..(902): Ortholog of  Ceres SEQ ID NO 12608620 as cited in SEQ ID NO 60192
  misc_feature (1)..(902): Ortholog of  Ceres SEQ ID NO 13662898 as cited in SEQ ID NO 66199
  misc_feature (1)..(902): Ortholog of  Ceres SEQ ID NO 13654314 as cited in SEQ ID NO 67914
aattcaaagcagtcaactagcaagagaaagagagaaaagtgaagatgttcctcaaggttcatgaaattgcttttctctttggtctcttaggcaacattgtgtcttttggggtgttcttgtcaccagtgccaacgttttatgggatatacaagaagaaatcatcaaaagggtttcagtcgataccgtacatatgtgcactagcaagtgcaactcttcttctctactacggaatcatgaagacacatgcttatctgatcattagtattaacacctttggatgtttcattgaaatctcctacttgtttctctatatcctttatgcaccaagagaggccaagatatccacgttgaagttgatagtgatatgcaacatcggtggacttggtctcttaattcttctagttaatcttttggttccaaaacaacaccgcgtctcgaccgttggatgggtttgtgctgcctacagtctcgcagtctttgcttctcccttaagcgtcatgaggaaggttataaagacaaagagtgtggaatacatgccgtttcttctctccttgtctctcactcttaacgccgtcatgtggttcttttatggacttcttatcaaagacaagttcattgctatgccaaacattctcggttttctattcggtgtagctcagatgatactatacatgatgtatcaaggttccacgaaaacggatttgccaacagagaaccaactagcaaataaaaccgatgttaacgaagtcccgatcgtggccgttgaattgcctgatgtgggatcagacaatgttgaaggatcggtgaggccaatgaagtgaagggcaaacatgcatggggaagatgtatgggagacgacatgttatcgtatgttggaataataaactttaatttctatgttt

SEQ ID NO: 102467 - protein, 258 aa, Arabidopsis thaliana
  peptide (1)..(258): Ceres Seq. ID no. 13610378
MFLKVHEIAFLFGLLGNIVSFGVFLSPVPTFYGIYKKKSSKGFQSIPYICALASATLLLYYGIMKTHAYLIISINTFGCFIEISYLFLYILYAPREAKISTLKLIVICNIGGLGLLILLVNLLVPKQHRVSTVGWVCAAYSLAVFASPLSVMRKVIKTKSVEYMPFLLSLSLTLNAVMWFFYGLLIKDKFIAMPNILGFLFGVAQMILYMMYQGSTKTDLPTENQLANKTDVNEVPIVAVELPDVGSDNVEGSVRPMK

SEQ ID NO: 102468 - protein, 195 aa, Arabidopsis thaliana; identical to SEQ ID NO: 34807
  peptide (1)..(195): Ceres Seq. ID no. 13610379

SEQ ID NO: 102469 - DNA, 1643 bp, Arabidopsis thaliana
  misc_feature (1)..(1643): Ceres Seq. ID no. 13610380
  misc_feature (1)..(1643): Ortholog of  Ceres SEQ ID NO 13647847 as cited in SEQ ID NO 20430
  misc_feature (1)..(1643): Ortholog of  Ceres SEQ ID NO 15171696 as cited in SEQ ID NO 59997
aaagaaaaaaaaaagaaagctttttgggaacataaacaccatcgaaggagggtgggaggtgttttatgttcatgggtggagcttcttggccaacctgaccccattcatcatatcattacccactttcttctcctaaattattctctcttatctctctctctctctttttattttctttctttcttaattcatctaaactctctctgcttttgcttttcgtaattccttacatttcactcaatattaatccccagaatctccgatccacccacaaatttagcaattttctgagatttgatcatttgggtcaccaaaaaatcttgtctttttgatctgggtttaacgccaataacatatgggaaacattagcagcagcggtggtgaaggtagacgccgtcgacggcgaaaccatacggcggctccaccaccacctcctcctcctccttcttcttctcttcctccaccacctctacctacagaaatccaagctaatcccatcgttttcgctgccgttactccctatcctaatcctaatcctaatccggtttaccagtaccctgcttcttactaccaccatcctcccccgggagccatgcctcttccgccgtacgaccaccacctccaacatcatccaccgcatccttaccacaaccactcttgggctcccgtggcgatggccagatacccttatgctggtcacatgatggctcaaccgactccttacgttgaacaccagaaagccgtcacgattcgtaacgacgttaatctcaagaaggagtctcttaggcttgaacccgacccggataatccgggtcgctttctcgtctcctttacgtttgatgcaaccgtctccggaaggattagtgtcattttctttgctaaagaatccgaagattgcaaactcacagcgacaaaggaagatatactgccacctatcactctagatttcgagaaaggacttggtcagaagtttaaacaatcatctggttctggtatagacttttcggtctttgaggacgttgagctgttcaaagcggccgcagacacagagatctatccattagcggttaaggcagaagcagctccctcaggtggtgagaatgaagaagaagaaaggtcggggtcgaagaatgcgcagattactcaagcggtttatgagaaggataaaggagagattaagattagagtggtgaagcagatactatgggttaatggaacgagatatgagttgcaggagatttatgggattgggaatacagttgagggggatgatgattcagctgatgatgctaatgatcctggtaaagaatgtgttatatgtttgtctgaaccacgagacaccactgttcttccatgtcgacatatgtgtatgtgtagcggatgtgctaaggtattgaggtttcagacaaatcgatgccccatttgcaggcaacctgttgaaaggcttttggagataaaagttcacggtaacaacggaagcgggaataacaccggacagggagaaacagttgaacaagagtagctaaacacggccgagtatggattgaaatgccatcgaaatattagtagtatatgcatgtttgatccttgtatgttaacaacaaaatgtgtgattgtcaattcataatatagagattacgaaa

SEQ ID NO: 102470 - protein, 388 aa, Arabidopsis thaliana; identical to SEQ ID NO: 24646
  peptide (1)..(388): Ceres Seq. ID no. 13610381

SEQ ID NO: 102471 - protein, 309 aa, Arabidopsis thaliana; identical to SEQ ID NO: 24647
  peptide (1)..(309): Ceres Seq. ID no. 13610382

SEQ ID NO: 102472 - protein, 282 aa, Arabidopsis thaliana; identical to SEQ ID NO: 24648
  peptide (1)..(282): Ceres Seq. ID no. 13610383

SEQ ID NO: 102473 - DNA, 826 bp, Arabidopsis thaliana
  misc_feature (1)..(826): Ceres Seq. ID no. 13610384
  misc_feature (1)..(826): Ortholog of  Ceres SEQ ID NO 15172913 as cited in SEQ ID NO 51824
  misc_feature (1)..(826): Ortholog of  Ceres SEQ ID NO 13654659 as cited in SEQ ID NO 61998
gaaacagcgaaaggagctctctctcactccgaggcgatttcttctgtctcgacgatcttgcgcttttcacatttgaatcctccaatccattacttcttctccgatcttttattccggtacatctcaagtcttacaacaatgtctcctgattcttgtcctttggtaaagaacattcttcttctagactctgaaggaaagcgtgtggctgtcaagtattactcggatgactggccaactaatgccgccaagttaagttttgagaagtatgtattctcaaagacctctaagaccaatgctcgtacagaagctgagatcacactgttggacagcaatattattgtctataagtttgcccaggaccttcacttctttgttactggaggtgaaaatgaaaacgagctcatcttagcttctgttcttcaaggcttttttgatgctgttgcacttcttctgaggagcaatgtggaaaagatggaagcccttgagaacttggatctcatctttctatgccttgatgaaatggtcgatcaaggggtggttcttgaaacggatccaaacgtcattgcggggaaagtagcaatgcagagcacagaagctagtggttcactctctgaacagacactaacacaagcgctagcaacagctcgggagcatctggcaagaagtctgcttacatgagttccatcatggcgacacaataatagaagcatggacttcaatttctatgttgagcaactttttatttttgagtctttcggtttgaaagtctctaataattgaattctgcaaacaaactcttaaagtttggtagtaaaggtttgattat

SEQ ID NO: 102474 - protein, 225 aa, Arabidopsis thaliana
  peptide (1)..(225): Ceres Seq. ID no. 13610385
ETAKGALSHSEAISSVSTILRFSHLNPPIHYFFSDLLFRYISSLTTMSPDSCPLVKNILLLDSEGKRVAVKYYSDDWPTNAAKLSFEKYVFSKTSKTNARTEAEITLLDSNIIVYKFAQDLHFFVTGGENENELILASVLQGFFDAVALLLRSNVEKMEALENLDLIFLCLDEMVDQGVVLETDPNVIAGKVAMQSTEASGSLSEQTLTQALATAREHLARSLLT

SEQ ID NO: 102475 - protein, 179 aa, Arabidopsis thaliana
  peptide (1)..(179): Ceres Seq. ID no. 13610386
MSPDSCPLVKNILLLDSEGKRVAVKYYSDDWPTNAAKLSFEKYVFSKTSKTNARTEAEITLLDSNIIVYKFAQDLHFFVTGGENENELILASVLQGFFDAVALLLRSNVEKMEALENLDLIFLCLDEMVDQGVVLETDPNVIAGKVAMQSTEASGSLSEQTLTQALATAREHLARSLLT

SEQ ID NO: 102476 - DNA, 1032 bp, Arabidopsis thaliana
  misc_feature (1)..(1032): Ceres Seq. ID no. 13610395
  misc_feature (1)..(1032): Ortholog of  Ceres SEQ ID NO 13598735 as cited in SEQ ID NO 64586
aagtacattatcatcatttcaagaaacagagagagactaatggcgcaaaaaccacgaacggtgatctgcgtcggagacatccatggatacatatcaaagctcaataacctctggcttaatctccaatctgccatcgacccatcagatttcagctcagctctcgtcatattccttggcgattactgcgatcgtggaccggagactcgaaaagtcatcgatttcttaatctctctgccggagaaacatcccgatcaaactcatgtctttctcgccgggaaccatgactttgccttctctgggttcttaggtttgttgcctcgtccttcagatggatctgatttgaaggatacgtggaaggagtactcaaaaagtgaggagacagaaggatggtatacaggtgaagggttcgaagatatgcatcttcaaggtagaagatgggctggtaaaattaaggctacgttcaattctgtgaaagggatggcttataaaggatcgatttacgatgctggatcgacttttgaatcttatggcgttccacatggatcttctgatttgatgaaggcagtacctgagagtcacaagaagttcttgaccaatatggtatgggttcatgaagaggacgatgtttgtatagaaacagaggaagggcttaagcattgtaagttgatcgccgtacatgctggtttagagaaagggaataacgtagaagaacaactgaagcttttgagagctaaagacactagcatctcaaaaatacaacatctaagtggtaggaaaaacgtttgggacatcccacaggagctggatgataaacatactgttgttgttagcgggcaccatggaaaacttcacatcgatggtatgagattgatcatcgatgaaggcggtggattcccggataaaccagtggcagcaattgttcttccttccaagaagattatccgtgacaccgataatttgtctagttaagtttttctcatctactattgtaccaaagtcaattttgatttcaaaataaatgtagtaaggttt

SEQ ID NO: 102477 - protein, 322 aa, Arabidopsis thaliana; identical to SEQ ID NO: 38450
  peptide (1)..(322): Ceres Seq. ID no. 13610396

SEQ ID NO: 102478 - protein, 309 aa, Arabidopsis thaliana; identical to SEQ ID NO: 38451
  peptide (1)..(309): Ceres Seq. ID no. 13610397

SEQ ID NO: 102479 - protein, 184 aa, Arabidopsis thaliana; identical to SEQ ID NO: 38452
  peptide (1)..(184): Ceres Seq. ID no. 13610398

SEQ ID NO: 102480 - DNA, 641 bp, Arabidopsis thaliana
  misc_feature (1)..(641): Ceres Seq. ID no. 13610410
  misc_feature (1)..(641): Ortholog of  Ceres SEQ ID NO 13595627 as cited in SEQ ID NO 59826
  misc_feature (1)..(641): Ortholog of  Ceres SEQ ID NO 15177889 as cited in SEQ ID NO 0
aaattcacactatgaaactcgccaaactaattccaaaacgtttcttcatcagatccaaagatcgttccactgtctctaagtcccccacggctttttccttcggatccgcttcctcatcttccggccaagactgtaaaaactccggtggtgatggcggtggcggttccgttaccccgactagcattctcccggaggttccttctccttattcctacgtcgagattctccaagcgtttaagttgatagacagagacaacgacggagctgtctctagacacgatcttgagtcgttacttagccggctaggtcctgatcctttgacggaggaggagatcaacgttatgcttaaagaggtggactgcgacggcgacggtacgatccgtcttgaagagcttgcgagtcgtgtagtctctttagatccggctcgtgactcgactgagctgaaggagactttcgagttctttgacgcggatcgtgacggtttgatctcggctgatgagcttctacgagttttctcgaccatcggagatgaacggtgcacgttagatgattgtaagcgtatgatagcagatgttgatgaggacggtgatggttttgtgtgcttcactgagttctcacgaatgatggatctccagcgttga

SEQ ID NO: 102481 - protein, 212 aa, Arabidopsis thaliana
  peptide (1)..(212): Ceres Seq. ID no. 13610411
IHTMKLAKLIPKRFFIRSKDRSTVSKSPTAFSFGSASSSSGQDCKNSGGDGGGGSVTPTSILPEVPSPYSYVEILQAFKLIDRDNDGAVSRHDLESLLSRLGPDPLTEEEINVMLKEVDCDGDGTIRLEELASRVVSLDPARDSTELKETFEFFDADRDGLISADELLRVFSTIGDERCTLDDCKRMIADVDEDGDGFVCFTEFSRMMDLQR

SEQ ID NO: 102482 - protein, 209 aa, Arabidopsis thaliana
  peptide (1)..(209): Ceres Seq. ID no. 13610412
MKLAKLIPKRFFIRSKDRSTVSKSPTAFSFGSASSSSGQDCKNSGGDGGGGSVTPTSILPEVPSPYSYVEILQAFKLIDRDNDGAVSRHDLESLLSRLGPDPLTEEEINVMLKEVDCDGDGTIRLEELASRVVSLDPARDSTELKETFEFFDADRDGLISADELLRVFSTIGDERCTLDDCKRMIADVDEDGDGFVCFTEFSRMMDLQR

SEQ ID NO: 102483 - DNA, 1126 bp, Arabidopsis thaliana
  misc_feature (1)..(1126): Ceres Seq. ID no. 13610421
  misc_feature (1)..(1126): Ortholog of  Ceres SEQ ID NO 14315060 as cited in SEQ ID NO 60039
  misc_feature (1)..(1126): Ortholog of  Ceres SEQ ID NO 13597809 as cited in SEQ ID NO 64598
  misc_feature (1)..(1126): Ortholog of  Ceres SEQ ID NO 12617960 as cited in SEQ ID NO 69051
  misc_feature (1)..(1126): Ortholog of  Ceres SEQ ID NO 13589401 as cited in SEQ ID NO 0
acattttgaaaaaaacatttttttgtaattcaattattcgacacaaccaatcccatctcttgtttcacttccgccctccatctttcttcgtgattgagagaatcttcaacgaaagaaagcaactttttttgggtgaaattcacagaacaaccaaggtttttcttcttcttcttcttctccagttcctacagaatcatgcctgacaagaacatcgtagaggacgttatcggtgatttggtggataacttcacggagactgttcagaagaacaaacatggttcctccttcttcgaacaagaagattccgtcagttctcgtttcaaccgtttgtttgatcgccagaagccaattcatcatgtcttaggcggtggcaaatctgctgatgtgttgttatggaggaacaagaagatctctgcaagtgttttgatgggagctaccgcaatttgggtgctttttgaatggatcaatttccatttcctgtctctcgtttgctatgccctcttgcttggtatgattgcacaattcgtttggtctaacgcctctggattcttaaaccgctcacagtctagagtgcctcgcctagttcttccaaaggatttctttgctgaagtcggtgtggccgttggaaaagaagttaaccgcggtttgttgtttcttcaggacttggcttgtaaagggaatttgaaacagttcctcatggctgtaatcggactatgggtagctgcaatggtcgggagctgttgcaatttcctaactgttttgtatatcgggtttgttggggcacacacaatgccggttctgtatgagagatacgaagacgaagtggatggttttatggattctatgatcatgaagtttcatagtcattacaagaagcttgatactgggtttctcagtagaatcccaagtggaaagtttggattaaagaagcgtgagtgactaaatcactcaagcattttcttattttaccttgtttgttgttagaacaatatggattatggtttgctaaatgaatgttttgagaatattattcattcatgtagattttgtgtatttccttactaaacaataccttgtccatgtatttgtcaataccttggttaataagagaatcatcatatctgtc

SEQ ID NO: 102484 - protein, 247 aa, Arabidopsis thaliana; identical to SEQ ID NO: 29724
  peptide (1)..(247): Ceres Seq. ID no. 13610422

SEQ ID NO: 102485 - protein, 170 aa, Arabidopsis thaliana; identical to SEQ ID NO: 29725
  peptide (1)..(170): Ceres Seq. ID no. 13610423

SEQ ID NO: 102486 - protein, 142 aa, Arabidopsis thaliana; identical to SEQ ID NO: 29726
  peptide (1)..(142): Ceres Seq. ID no. 13610424

SEQ ID NO: 102487 - DNA, 1630 bp, Arabidopsis thaliana
  misc_feature (1)..(1630): Ceres Seq. ID no. 13610428
  misc_feature (1)..(1630): Ortholog of  Ceres SEQ ID NO 13582619 as cited in SEQ ID NO 56520
  misc_feature (1)..(1630): Ortholog of  Ceres SEQ ID NO 12611392 as cited in SEQ ID NO 56826
  misc_feature (1)..(1630): Ortholog of  Ceres SEQ ID NO 13660872 as cited in SEQ ID NO 60830
  misc_feature (1)..(1630): Ortholog of  Ceres SEQ ID NO 12616221 as cited in SEQ ID NO 63291
aaacctagaaacaaatacggtcttttttttttctttttatgggtcgcgaatctctggctgttgtgtcctcgccgccatcggcgactgcgcccagtactgctgtgtcggctacctcgcttgctcctggctttcgatttcatccgactgatgaggaactcgtgagctattacttgaagaggaaggttctgggtaaacctgtacgcttcgatgcgattggagaggtagatatctacaagcatgagccctgggatttagcagtgttttcgaagttgaaaactcgggaccaagaatggtacttcttcagtgcgttagataagaagtacggtaatggtgctaggatgaatcgagcaactaacaaagggtactggaaagcaactggaaaagacagagaaatccgccgggatattcagttgctcggtatgaaaaagacgcttgttttccacagcgggcgtgctccagacggccttcggactaattgggtcatgcacgagtatcgccttgtggaatatgaaactgaaactaacggaagcctgctgcaggatgcatatgtgttgtgcagagtgtttcacaagaataacattgggccaccaagtgggaacagatatgcgccattcatggaagaagaatgggctgatggtggaggagctctgattccaggaatagacgttagggtcagggtagaggctctaccacaagccaatggaaacaaccagatggaccaggaaatgcattcagcaagcaaggatctcattaacatcaacgagctaccgagagatgctactccaatggacatcgaacctaaccaacagaatcatcatgagagtgccttcaagccacaggagagtaacaaccatagtggttatgaagaagatgaggacacactcaaacgcgagcacgcagaagaagatgagcgtcctccttctctatgcattctcaacaaagaagctccactacctctcctgcaatacaaacgtagacgccaaaacgagtccaacaacaactcaagcaggaacacacaggaccattgttcgtccacaataacaaccgtcgacaatacaaccaccttaatctcatcatctgctgctgctgctaccaacactgccatctctgcattgcttgagttctcacttatgggtatctccgacaagaaagaaaaccagcagaaagaggaaacttctcctcctagtccaattgcatctcctgaagagaaggttaatgatctccagaaggaggttcaccagatgtctgttgaaagagaaactttcaagcttgagatgatgagtgcagaggctatgatcagcattctccagtcaagaatcgatgcgctgcgtcaggagaacgaggaacttaagaagaagaacgccagtggacaagctagttaaaccaccgcaacatctctccaggtgtcttcttcttcttcttcttcttctttgcctcttagctgtaatcttcttaatagtatgagctatggatgtagcttcttcagacggatcagaaaccttatgaatctctgttgtaaaattaggataaaacggaacggagccaaccaactaggtctttttattttatccttttttactttggatgtttctgcatcttttgggaacattttcaggctgatccattgtcg

SEQ ID NO: 102488 - protein, 447 aa, Arabidopsis thaliana; identical to SEQ ID NO: 42227
  peptide (1)..(447): Ceres Seq. ID no. 13610429

SEQ ID NO: 102489 - protein, 347 aa, Arabidopsis thaliana; identical to SEQ ID NO: 42228
  peptide (1)..(347): Ceres Seq. ID no. 13610430

SEQ ID NO: 102490 - protein, 320 aa, Arabidopsis thaliana; identical to SEQ ID NO: 42229
  peptide (1)..(320): Ceres Seq. ID no. 13610431

SEQ ID NO: 102491 - DNA, 1871 bp, Arabidopsis thaliana
  misc_feature (1)..(1871): Ceres Seq. ID no. 13610432
  misc_feature (1)..(1871): Ortholog of  Ceres SEQ ID NO 13582619 as cited in SEQ ID NO 56520
  misc_feature (1)..(1871): Ortholog of  Ceres SEQ ID NO 13660872 as cited in SEQ ID NO 60830
  misc_feature (1)..(1871): Ortholog of  Ceres SEQ ID NO 12616221 as cited in SEQ ID NO 63291
ttatttcgaaatcattgttttgctctttcttttgattcgaattcgacagaacagctcttttaagttattcataaaccttgtgtttgagttttggtccatcgagtatatgggtcgtggctcagtaacatcgctcgctcctgggtttcgttttcatcccacagacgaagaactcgttcgttactatctgaaacgaaagatctgcaataaaccttttaagttcgatgctatctctgttaccgatgtatacaaatctgagccttgggatctcccagacaagtcgaggctgaaaagtagagacttggagtggtacttcttcagtatgcttgataagaagtatagaaatggatcaaagacgaatcgtgcgactgagatgggatattggaagactacagggaaagatcgagagattcttaatggttcaaaagtcgttgggatgaagaagactcttgtttatcacaaaggtcgagctcctcgtggcgaaagaaccaattgggttatgcatgagtatcggttggttgatcaagaccttgataaaactggtgttcaccaagatgcgtttgtgctttgtaggatttttcagaagagtggctccggacctaaaaatggagagcagtacggtgctccgtttgttgaggaggagtgggaggaggaggatgatatgacatttgtacctgaccaagaagatcttggaagtgaagatcatgtttatgtccatatggatgacattgatcagaagtctgaaaactttgtggtctatgatgccattcctattccgttaaactttattcacggggagtcgagcaataatgttgaaacaaactactcagactccataaactatatacaacaaacaggaaactatatggactctggtggctactttgagcaaccagcagaatcttatgagaaagatcagaagcctatcatccgtgaccgtgatggtagccttcaaaatgaaggaattggatgtggggtccaggacaagcactcggaaactttgcaatcttctgacaacatctttgggactgatacatcatgctacaatgattttccagttgagagcaactatttgattggtgaggcgtttctggatccgaacagtaatcttctggagaatgatggtctgtacctggaaacaaatgatctcagtagtactcagcaagatggtttcgactttgaagattatcttaccttctttgatgaaacttttgatccttcgcaactgatgggaaatgaagatgtttttttcgatcaagaagagctctttcaagaggttgagactaaggaactagagaaagaggagacttcaagaagcaaacatgtggtggaagaaaaggaaaaggatgaagcatcttgttcaaaacaagttgatgcagatgcaacagagtttgagccagattacaagtacccgttactaaagaaggcaagccacatgttgggtgctattcctgctccgcttgcaaatgcttctgagttccctacaaaggatgcagctatccggttacacgcagcacaatcatcaggttcagttcatgtaaccgcaggtatgatcacgatatcagacagcaacatgggctggtcatacggcaaaaacgagaaccttgacttgatcctttctttggggttggtccaagggaataccgcccccgaaaaatcagggaatagttcagcatgggcaatgttaatattcatgtgtttctgggttcttctactctcagttagtttcaaagtgagcattttggtctcttccaggtgataggtaaccctttcttgttcaaacaagacttttgtgtttgtacattgatatagatgaacttgcagtgttcaatgttttattctctaataatattgaataaaccccatattctatc

SEQ ID NO: 102492 - protein, 584 aa, Arabidopsis thaliana; identical to SEQ ID NO: 24536
  peptide (1)..(584): Ceres Seq. ID no. 13610433

SEQ ID NO: 102493 - protein, 549 aa, Arabidopsis thaliana; identical to SEQ ID NO: 24537
  peptide (1)..(549): Ceres Seq. ID no. 13610434

SEQ ID NO: 102494 - protein, 478 aa, Arabidopsis thaliana; identical to SEQ ID NO: 24538
  peptide (1)..(478): Ceres Seq. ID no. 13610435

SEQ ID NO: 102495 - DNA, 1280 bp, Arabidopsis thaliana
  misc_feature (1)..(1280): Ceres Seq. ID no. 13610447
  misc_feature (1)..(1280): Ortholog of  Ceres SEQ ID NO 15180663 as cited in SEQ ID NO 1227
  misc_feature (1)..(1280): Ortholog of  Ceres SEQ ID NO 12415963 as cited in SEQ ID NO 0
atcttttatttttcttttagaaaccaaacttttcagatttctctctctccatttggcgatagaagaagtcatgtaccaatcatcatcctccacgtcatcatcatcgcagagatcatcgcttcccggcggcggaggactgatccgttacggctcagctccgggatcgtttctaaactctgtggttgacgaagtcatcggaggaggctcatcaaacgctcgtgacttcaccggctatcaaccgtcgtcggataacttcatcggtaactttttcaccggagctgctgactcatcctcgctgagatccgattcgacgacttgtggagtcaacaactcatccgacggacagaaacagctaggcaataacaataataataatagtaataaagatatcttcctcgacagatcctacggtggattcaacgagatctcgcaacaacacaagagcaacgacatcggaggaggaaacagctcaggatcttactctctcgctagacaacgtagctctcccgccgatttcttcacctacctcgcctcagataaaaacaatttctcgttgaaccaaccaaccagtgattatagtccgcaaggagggtctaatgggggacgaggacattccagattgaagtctcagctaagcttcacgaatcacgactctctggctcggatcaacgaggtcaatgagaccccagtccacgacggttcaggccattcgttttctgcggctagctttggtgcagccactactgattcttgggatgacggttccggttcgatagggtttaccgtgactaggcccagtaaacgatccaaggacatggactctggtctcttttcgcagtatagtcttccttcagacacttcaatgaactacatggataacttcatgcagcttccagaagattctgtaccctgcaaaatccgggccaaacgcggctgcgccacccatcctagaagcatcgctgagcgggagaggagaacgagaataagtgggaagctaaagaagctacaagatcttgtccccaacatggataagcaaacaagctattcagacatgctggatttagctgtacaacacatcaaaggccttcagcatcaacttcagaatttgaaaaaagatcaagagaattgcacgtgtgggtgcagtgagaaaccaagctagctcaaacccaaaggtagggtcatcctaattttatttgcattgttccgattttatcatatgagagaattagagaagatgtaaataaaatagattatattaaatgtctaatcctcttataatt

SEQ ID NO: 102496 - protein, 385 aa, Arabidopsis thaliana; identical to SEQ ID NO: 35004
  peptide (1)..(385): Ceres Seq. ID no. 13610448

SEQ ID NO: 102497 - protein, 362 aa, Arabidopsis thaliana; identical to SEQ ID NO: 35005
  peptide (1)..(362): Ceres Seq. ID no. 13610449

SEQ ID NO: 102498 - DNA, 796 bp, Arabidopsis thaliana
  misc_feature (1)..(796): Ceres Seq. ID no. 13610458
  misc_feature (1)..(796): Ortholog of  Ceres SEQ ID NO 12624558 as cited in SEQ ID NO 61726
  misc_feature (1)..(796): Ortholog of  Ceres SEQ ID NO 12635763 as cited in SEQ ID NO 0
aacctattagagtttccttcctccaacaaaccatctttataagactccaaaatggagggtaagagatcacaaggacaaggttacatgaaaaagaagtcttaccttgtggaagaagatatggagactgatacggatgaagaagaggaagtaggtagggatagagttagagggtctagaggtagcatcaatcgtggtggctcgttgcggctttgccaagtagatagatgcacagctgatatgaaagaggcaaaactgtatcaccggagacacaaagtgtgtgaagttcatgcaaaggcatcttctgtctttctctcaggacttaaccaacgcttttgtcaacaatgcagtaggtttcatgacctccaagagtttgatgaagctaagagaagttgcaggaggcgcttagctggacacaatgagcgaagaaggaagagctctggtgagagtacttatggagaaggatcaggtcggagaggaatcaatggtcaggtggtgatgcagaatcaagaaagatcaagggtagagatgacacttcctatgccaaactcatcattcaagcgaccacagattagatagagaagctgtctgctctctctcttctgtcatctaaacttctctcttagaatcctaaaattgtggtatctaacaatgttatagagaaataaataactaccactctctctagtactctctaatgttatcagctatatgcaaacgctaagactatacttgaaccttgagtgttatcttgtatgtttcaaagatatggctaatgatatgtgtaatacttctacct

SEQ ID NO: 102499 - protein, 174 aa, Arabidopsis thaliana; identical to SEQ ID NO: 28853
  peptide (1)..(174): Ceres Seq. ID no. 13610459

SEQ ID NO: 102500 - protein, 163 aa, Arabidopsis thaliana; identical to SEQ ID NO: 28854
  peptide (1)..(163): Ceres Seq. ID no. 13610460

SEQ ID NO: 102501 - protein, 152 aa, Arabidopsis thaliana; identical to SEQ ID NO: 28855
  peptide (1)..(152): Ceres Seq. ID no. 13610461

SEQ ID NO: 102502 - DNA, 1462 bp, Arabidopsis thaliana
  misc_feature (1)..(1462): Ceres Seq. ID no. 13610517
  misc_feature (1)..(1462): Ortholog of  Ceres SEQ ID NO 15176423 as cited in SEQ ID NO 53228
aagggaaacaaaaataaattcctcgagagatagaagtaaaaaaaaaagaaggggattttcgcatttgccctgagcgaaagagagagaatgtatttgacgagttccaggagaaatcagagctagagaaatctagtggtaatggggagagaacttgtagacaaacacatggataagaaagcgaatagtttgacagctagctcgacgggatcttcagatgataataaagtcccaagtccgtctactaatgaagctgcagaggtgaaagaatgcaccgagcagaatttggttgcggatgatgctcgtttgaggcaacaagggataactgagacacctggatcccataaatcttctgttaaacctcgtgttactgcgaaaacaactgttccaaagccgttttccctgtcggctgaaaagcctagaagagcagcggttgataataattcattaggaaatggtgctagccataactcttcttcagcatcaagagtttcacagctaaactctcctttaccaactaggaggataccagatcataagatgcaccatgatgaagaagatagtttttctgttgcttcctcatcagctacatccataagaagttttaaacccaagataacgattggagttgctccaacatttagtagcacatcgcgactggagagacgaagagagttttaccagaagttagaggaaaaacagaaagcacttgaagcagagaaaagagaaaacgagaaaaggcttaaggaagagcaagaagcagtcactaagcaacttaggaagaacatggcttacaaagctaatccggtaccaagtttctaccaagagggtcctccaccgaaacaaccattgaaaaagtttccattgactcggcctaagtcaccaaaccttaaccgtagaaagagctgcagcgacacagttaacgcatcatatcaggaagtgaaggggaagcattgtgctcgacatcgtcacagtgtaggtggttgcaaggatgaagtcaaaacgaacagtgtcccaaggacaccaaatagcagcagcaaagatcagatgagaaagtccaaaaagggaacaccaaagtctgaagaagtacatgaaatgtttaatagtggccatgatggagagactggtgagaatggcgttggtgttgtggaggagtgaagcttcgcgtagttgtagtttcgttttgactaactttggtgaatgagaaaaacaagaaaaatggtgagaagcaactgcaaggagaagaacaggttttagagtgaaagaacaagtttaaagtttgtttgtttgtttgttgtctaatgttctgcagattgattgttctaaatttgattgctaaaatcagctgctctattttcgtatgatcttttcttatctgtttgacaattaatgtgaaatgtatattaaagttgttgttgtatggatcccaaattcccaattattataactagattaatggttaagc

SEQ ID NO: 102503 - protein, 338 aa, Arabidopsis thaliana; identical to SEQ ID NO: 42191
  peptide (1)..(338): Ceres Seq. ID no. 13610518

SEQ ID NO: 102504 - protein, 329 aa, Arabidopsis thaliana; identical to SEQ ID NO: 42192
  peptide (1)..(329): Ceres Seq. ID no. 13610519

SEQ ID NO: 102505 - protein, 205 aa, Arabidopsis thaliana; identical to SEQ ID NO: 42193
  peptide (1)..(205): Ceres Seq. ID no. 13610520

SEQ ID NO: 102506 - DNA, 790 bp, Arabidopsis thaliana
  misc_feature (1)..(790): Ceres Seq. ID no. 13610543
  misc_feature (1)..(790): Ortholog of  Ceres SEQ ID NO 13661557 as cited in SEQ ID NO 60999
aagtctcttttctcctcgtctctgcctagccgataaattcgccgttctccatcggtaaacgcagctgaggagctagataattctctgatatctgcgttacgccggtgtggaagcaaaatttaggttaatcggatctcaattatggacgaagaggcagcaaaacctagagactccaccgtgaatcagcaacatcaatactattacggaacgtttcaaggcgttgcgaattttcctactcctactccaccaccgcaatttatgcaaccacagcatccgattactacgtttcctggacatgcttaccaaaatctccaaggtcatggtggtggtgtgaattatgctcaaggattcccagttgttgttcctgattatacagtggttgaggtgagaccaatgatagagcatgaacttccttgttgtggcttgggcatgggctggtttctgtttatcatgggcttcttgttcggtgggatcccttggtacctcggtgcttttattgttctagtcacatctgttgatcaccgcgagaaagctggttacgttgcctgttcaatcgcatccgttgtctatttgattgccgtcatgctcgggatgactggggatattaacatctggtgaaactactccccagccaaaaccaaactcaatcttgtatatatatctacatatatactcgaaaacgtagatatatatcaatatcatttacaccagttattgctgattttagtgagttacagaagggaaatatttgtaactttgtgttgaattttatatcataactaaatattgt

SEQ ID NO: 102507 - protein, 158 aa, Arabidopsis thaliana
  peptide (1)..(158): Ceres Seq. ID no. 13610544
MDEEAAKPRDSTVNQQHQYYYGTFQGVANFPTPTPPPQFMQPQHPITTFPGHAYQNLQGHGGGVNYAQGFPVVVPDYTVVEVRPMIEHELPCCGLGMGWFLFIMGFLFGGIPWYLGAFIVLVTSVDHREKAGYVACSIASVVYLIAVMLGMTGDINIW

SEQ ID NO: 102508 - protein, 119 aa, Arabidopsis thaliana; identical to SEQ ID NO: 27008
  peptide (1)..(119): Ceres Seq. ID no. 13610545

SEQ ID NO: 102509 - DNA, 849 bp, Arabidopsis thaliana
  misc_feature (1)..(849): Ceres Seq. ID no. 13610546
  misc_feature (1)..(849): Ortholog of  Ceres SEQ ID NO 13638716 as cited in SEQ ID NO 51101
  misc_feature (1)..(849): Ortholog of  Ceres SEQ ID NO 14306010 as cited in SEQ ID NO 59330
  misc_feature (1)..(849): Ortholog of  Ceres SEQ ID NO 12627045 as cited in SEQ ID NO 67611
acacacacacacatgttcttcgttgctgcttcgttgggttaaaaacttttcttttgtttcttgctttttgcaaagtcaaagataacaaataaataagaaaaatggagaatctaccacctggttatcgtcccaatgttggtgtttgtctaatcaactcggataatctggtatttgtagcttctagattgaatgttccaggagcatggcagatgccacagggaggcattgaagatggggaggatccaaagtcagcagccatgagagagttacaagaagaaactggtgttgtttcagctgaaatcgtctctgaggtcccaaattggttgacatatgattttccaccagcagtaaaagcaaaagttaaccgtctttggggcggtgaatggcatggtcaagctcagaaatggtatttagtgagactgaggaacgatgaggacgagaaagagatcaatctagcgaacaacgaagcggattcagagtttgcggagtggaaatgggcgaagccagaagaagtggtagagcaagcagtggattacaaaaggccaacctatgaagaagtcatcaagacttttggttcgttcttaaacgacacaggaagagctgctaaatgtaaatcagccaagtggtgatataagataccaagaaccaatgtttgtctttttattttttttgttaactgttgtttttctttttttgggcggttctttttagtagaacccttttggaatgcaaaagctttctctaggggttttttactttcatttttgtaaattggttattggtacgtagaaagtttttttgttttattttaacatgggggtcattgtaataaagtcgttgtctggattc

SEQ ID NO: 102510 - protein, 175 aa, Arabidopsis thaliana; identical to SEQ ID NO: 23110
  peptide (1)..(175): Ceres Seq. ID no. 13610547

SEQ ID NO: 102511 - protein, 139 aa, Arabidopsis thaliana; identical to SEQ ID NO: 23111
  peptide (1)..(139): Ceres Seq. ID no. 13610548

SEQ ID NO: 102512 - protein, 123 aa, Arabidopsis thaliana; identical to SEQ ID NO: 23112
  peptide (1)..(123): Ceres Seq. ID no. 13610549

SEQ ID NO: 102513 - DNA, 1563 bp, Arabidopsis thaliana
  misc_feature (1)..(1563): Ceres Seq. ID no. 13610550
  misc_feature (1)..(1563): Ortholog of  Ceres SEQ ID NO 15169655 as cited in SEQ ID NO 64922
  misc_feature (1)..(1563): Ortholog of  Ceres SEQ ID NO 13596004 as cited in SEQ ID NO 68212
aatttaattcgatttcgacaatttcatttaattcttcgatttctccgcttgtcactgtttcgtatcgccattttctgtttgcatacacttgtatatatttatattaacagtccaaaattcttcgaaattgtcccgagctttgagcatataaaaaatgtcttcgataatccatggagctggagctgctacgacgacgttatcgacgtttaattccgtcgattccaagaaactcttcgttgctccttctcgcacaaatctttcagtgaggagccagagatatatagtggctggatctgatgcgagtaagaagagctttggttctggacttagagttcgtcactctcagaaattgattccaaatgctgttgcgacgaaggaggcggatacgtctgcgagcactggacatgaactattgcttttcgaggctcttcaggaaggtctggaagaagagatggacagagatccacatgtatgtgttatgggtgaagatgttggccattacggaggttcctacaaggtaaccaaaggccttgctgataaatttggtgacctcagggttctcgacactcctatttgtgaaaatgcattcaccggtatgggcattggagctgccatgactggtctaagacccgttattgaaggtatgaacatgggtttcctcctcctcgccttcaaccaaatctccaacaactgtggaatgcttcactacacatccggtggtcagtttacgatcccggttgtcatccgtggacctggtggagtgggacgccagcttggtgctgagcattcacagaggttagaatcttactttcagtccatccctgggatccagatggttgcttgctcaactccttacaacgccaaagggttgatgaaagccgcaataagaagcgagaaccctgtgattctgttcgaacacgtgctgctttacaatctcaaggagaaaatcccggatgaagattacgtctgtaaccttgaagaagctgagatggtcagacctggcgagcacattaccatcctcacttactcgcgaatgaggtaccatgtgatgcaggcagcaaaaactctggtgaacaaagggtatgaccccgaggttatcgacatcaggtcactgaaaccgttcgaccttcacacaattggaaactcggtgaagaaaacacatcgggttttgatcgtggaggagtgtatgagaaccggtgggattggggcaagtcttacagctgccatcaacgagaactttcatgactacttagatgctccggtgatgtgtttatcttctcaagacgttcctacaccttacgctggtacactggaggagtggaccgtggttcaaccggctcagatcgtgaccgctgtcgagcagctttgccagtaaattcatatttatccgatgaaccattatttatcatttacctctccatttcctttctctgtagcttagttcttaaagaatttgtctaagatggtttgtttttgttaaagtttgtctcctttgttgtgtcttttaatatggtttgtaactcagaatgtttgtttgttaattttatctcccactttctttta

SEQ ID NO: 102514 - protein, 406 aa, Arabidopsis thaliana
  peptide (1)..(406): Ceres Seq. ID no. 13610551
MSSIIHGAGAATTTLSTFNSVDSKKLFVAPSRTNLSVRSQRYIVAGSDASKKSFGSGLRVRHSQKLIPNAVATKEADTSASTGHELLLFEALQEGLEEEMDRDPHVCVMGEDVGHYGGSYKVTKGLADKFGDLRVLDTPICENAFTGMGIGAAMTGLRPVIEGMNMGFLLLAFNQISNNCGMLHYTSGGQFTIPVVIRGPGGVGRQLGAEHSQRLESYFQSIPGIQMVACSTPYNAKGLMKAAIRSENPVILFEHVLLYNLKEKIPDEDYVCNLEEAEMVRPGEHITILTYSRMRYHVMQAAKTLVNKGYDPEVIDIRSLKPFDLHTIGNSVKKTHRVLIVEECMRTGGIGASLTAAINENFHDYLDAPVMCLSSQDVPTPYAGTLEEWTVVQPAQIVTAVEQLCQ

SEQ ID NO: 102515 - protein, 307 aa, Arabidopsis thaliana
  peptide (1)..(307): Ceres Seq. ID no. 13610552
MDRDPHVCVMGEDVGHYGGSYKVTKGLADKFGDLRVLDTPICENAFTGMGIGAAMTGLRPVIEGMNMGFLLLAFNQISNNCGMLHYTSGGQFTIPVVIRGPGGVGRQLGAEHSQRLESYFQSIPGIQMVACSTPYNAKGLMKAAIRSENPVILFEHVLLYNLKEKIPDEDYVCNLEEAEMVRPGEHITILTYSRMRYHVMQAAKTLVNKGYDPEVIDIRSLKPFDLHTIGNSVKKTHRVLIVEECMRTGGIGASLTAAINENFHDYLDAPVMCLSSQDVPTPYAGTLEEWTVVQPAQIVTAVEQLCQ

SEQ ID NO: 102516 - protein, 298 aa, Arabidopsis thaliana
  peptide (1)..(298): Ceres Seq. ID no. 13610553
MGEDVGHYGGSYKVTKGLADKFGDLRVLDTPICENAFTGMGIGAAMTGLRPVIEGMNMGFLLLAFNQISNNCGMLHYTSGGQFTIPVVIRGPGGVGRQLGAEHSQRLESYFQSIPGIQMVACSTPYNAKGLMKAAIRSENPVILFEHVLLYNLKEKIPDEDYVCNLEEAEMVRPGEHITILTYSRMRYHVMQAAKTLVNKGYDPEVIDIRSLKPFDLHTIGNSVKKTHRVLIVEECMRTGGIGASLTAAINENFHDYLDAPVMCLSSQDVPTPYAGTLEEWTVVQPAQIVTAVEQLCQ

SEQ ID NO: 102517 - DNA, 1444 bp, Arabidopsis thaliana
  misc_feature (1)..(1444): Ceres Seq. ID no. 13610566
  misc_feature (1)..(1444): Ortholog of  Ceres SEQ ID NO 14301576 as cited in SEQ ID NO 62362
gaggagattcaaaggatcgtgttgcttactgtatttaaaaaccctagagttcatcatcatcttcctctcattattgattgctctaatcaggttccgacgagactaataatcctttctcagatcgataacaatgtctcactctgctgtttctcaggctggtgctgtctcagtttcaattgaaaaccaacgttctcttagaagatccgtcttcaagcagaacaatagcataagcttcaacagcaagtcatggtcatcttctttagcattgaaccagaagacaacaagcataagagatgggaaacggtacccgagcacgacaatatgtatgtcggttcaacaaacaagtagttccaaggttactgtctctcctatagagttggaagaccctaaggatcctcctttgaacttgtacaaacccaaggagtcttacaccgctaagattgtctctgtggagcgagtagttggcccgaaagcccctggagaaacttgtcatatcgtcatcgatcatgatggtaaccttccttactgggaaggacagagttacggtgtgattcctccaggtgagaacccgaagaaaccgggagcgccacacaatgtgcgcctttactcaattgcatcaacaaggtacggagatttctttgacggtaaaacagcgagtttgtgtgtacgtagagctgtttattacgaccctgagactggaaaagaagatccttcaaagaacggagtctgcagcaacttcctatgtgattcaaagcccggtgacaagattcaaatcaccggtccatctgggaaggtaatgctattacccgagagtgatccaaacgcgacacacataatgatagccacgggaacaggagtggctccatacagaggctacttacgtcgaatgttcatggaaaacgtcccaaacaagacatttagcggcttagcttggctcttcttaggcgtggccaacaccgatagccttctctatgacgaagagtttaccaagtacctaaaagaccatccagacaactttaggttcgacaaggcattgagcagagaggagaagaacaagaaaggtggaaagatgtacgtgcaggacaagattgaagaatatagtgatgagatcttcaagcttttggacaatggagctcatatttacttctgtgggcttaaaggaatgatgcctgggattcaagatacacttaagagagttgcagaagagagaggtgagagctgggacttgaagctttctcagctcaggaagaacaagcagtggcacgttgaagtctattgagctctttatttgtatttgctgtttttgatttttgatttaagaatcgtaataaatttgaatttggtgtttttctacttttcaaacatgatatgatgataatatctgaaatttgttggttttgagaagagaatattctcagagaataatcaatatatcatttatgta

SEQ ID NO: 102518 - protein, 382 aa, Arabidopsis thaliana; identical to SEQ ID NO: 25345
  peptide (1)..(382): Ceres Seq. ID no. 13610567

SEQ ID NO: 102519 - protein, 317 aa, Arabidopsis thaliana; identical to SEQ ID NO: 25346
  peptide (1)..(317): Ceres Seq. ID no. 13610568

SEQ ID NO: 102520 - DNA, 1519 bp, Arabidopsis thaliana
  misc_feature (1)..(1519): Ceres Seq. ID no. 13610569
  misc_feature (1)..(1519): Ortholog of  Ceres SEQ ID NO 13594345 as cited in SEQ ID NO 58043
  misc_feature (1)..(1519): Ortholog of  Ceres SEQ ID NO 13662880 as cited in SEQ ID NO 65422
  misc_feature (1)..(1519): Ortholog of  Ceres SEQ ID NO 12779098 as cited in SEQ ID NO 67698
  misc_feature (1)..(1519): Ortholog of  Ceres SEQ ID NO 13596180 as cited in SEQ ID NO 67941
  misc_feature (1)..(1519): Ortholog of  Ceres SEQ ID NO 13596089 as cited in SEQ ID NO 68373
ttatcattcactcacgacactaaccatgaccaaattctccgagccaatcagagactcccacgtggcagttctcgcgtttttccccgttggcgctcatgccggtcctctcttagccgtcactcgccgtctcgccgccgcttctccctccaccatcttttctttcttcaacaccgcaagatcaaacgcgtcgttgttctcctctgatcatcccgagaacatcaaggtccacgacgtctctgacggtgttccggagggaaccatgctcgggaatccactggagatggtcgagctgtttctcgaagcggctccacgtattttccggagcgaaatcgcggcggcagagatagaagttggaaagaaagtgacatgcatgctaacagatgccttcttctggttcgcagcggacatagcggctgagctgaacgcgacttgggttgccttctgggccggcggagcaaactcactctgtgctcatctctacactgatctcatcagagaaaccatcggtctcaaagatgtgagtatggaagagacattagggtttataccaggaatggagaattacagagttaaagatataccagaggaagttgtatttgaagatttggactctgttttcccaaaggctttataccaaatgagtcttgctttacctcgtgcctctgctgttttcatcagttcctttgaagagttagaacctacattgaactataacctaagatccaaacttaaacgtttcttgaacatcgcccctctcacgttattatcttctacatcggagaaagagatgcgtgatcctcatggctgctttgcttggatggggaagagatcagctgcttctgtagcgtacattagcttcggcaccgtcatggaacctcctcctgaagagcttgtggcgatagcacaagggttggaatcaagcaaagtgccgtttgtttggtcgctgaaggagaagaacatggttcatctaccaaaagggtttttggatcggacaagagagcaagggatagtggttccttgggctccacaagtggaactgctgaaacacgaggcaatgggtgtgaatgtgacacattgtggatggaactcagtgttggagagtgtgtcggcaggtgtaccgatgatcggcagaccgattttggcggataataggctcaacggaagagcagtggaggttgtgtggaaggttggagtgatgatggataatggagtcttcacgaaagaaggatttgagaagtgtttgaatgatgtttttgttcatgatgatggtaagacgatgaaggctaatgccaagaagcttaaagaaaaactccaagaagatttctccatgaaaggaagctctttagagaatttcaaaatattgttggacgaaattgtgaaagtttaggttgtttacaacataattgaagactataaatgtgatttcaaaattaacaaaatcatagtcaaataagtgtgtgcctattctattttgtcaaagtaagagtgtatggatctattctatttcaaagggttgttg

SEQ ID NO: 102521 - protein, 461 aa, Arabidopsis thaliana
  peptide (1)..(461): Ceres Seq. ID no. 13610570
YHSLTTLTMTKFSEPIRDSHVAVLAFFPVGAHAGPLLAVTRRLAAASPSTIFSFFNTARSNASLFSSDHPENIKVHDVSDGVPEGTMLGNPLEMVELFLEAAPRIFRSEIAAAEIEVGKKVTCMLTDAFFWFAADIAAELNATWVAFWAGGANSLCAHLYTDLIRETIGLKDVSMEETLGFIPGMENYRVKDIPEEVVFEDLDSVFPKALYQMSLALPRASAVFISSFEELEPTLNYNLRSKLKRFLNIAPLTLLSSTSEKEMRDPHGCFAWMGKRSAASVAYISFGTVMEPPPEELVAIAQGLESSKVPFVWSLKEKNMVHLPKGFLDRTREQGIVVPWAPQVELLKHEAMGVNVTHCGWNSVLESVSAGVPMIGRPILADNRLNGRAVEVVWKVGVMMDNGVFTKEGFEKCLNDVFVHDDGKTMKANAKKLKEKLQEDFSMKGSSLENFKILLDEIVKV

SEQ ID NO: 102522 - protein, 453 aa, Arabidopsis thaliana; identical to SEQ ID NO: 24482
  peptide (1)..(453): Ceres Seq. ID no. 13610571

SEQ ID NO: 102523 - protein, 375 aa, Arabidopsis thaliana; identical to SEQ ID NO: 24483
  peptide (1)..(375): Ceres Seq. ID no. 13610572

SEQ ID NO: 102524 - DNA, 1420 bp, Arabidopsis thaliana
  misc_feature (1)..(1420): Ceres Seq. ID no. 13610588
  misc_feature (1)..(1420): Ortholog of  Ceres SEQ ID NO 13582332 as cited in SEQ ID NO 59890
  misc_feature (1)..(1420): Ortholog of  Ceres SEQ ID NO 13598278 as cited in SEQ ID NO 68456
gtattgtgttgttggagactgaaccatcaacgctttttcgacacttcttcttcttcctcctttctctcttcatgcaaaatcacagttacaagaaataaacaaaagattataaatcaaaacataaagagacaaaaatgagtgatggtcgagttaacgcagatcctcaacaagaagagaacatggttaaaccaccggttaagagatctctcactctcctcatcgtgacttacttttttctcttcttcggctctatcgcttcgagccttctcgcgaagtactatttcgtctacggtggctcgagccggtgggtctccacgtgggttcaatctgctggcttccctctcctcctcatcctaatctacttccctcactacgttctcaaaaccaccactcgccgtcctttcacgcgcttcacgctccgccatctcatcttctccgtgttgatcgggcttgttctcggtttcaacaacttcctcttctcatggggaacctcgtaccttccggtgtccacgtcatcgcttctcctctcgacacaactcgtcttcactctcattttgtctaggatcatagtgaaacagaagatcactttctcaaacctcaactgcgttgtcctgttgacgttaagctctgttttgttggctcttgattcgagtaaagataaaccgtccggtttaaccaaaaccaagtatttcatcgggtatgtatccacgatcggagccggtttactcttcgctctttacctccccgtgacggagaagctataccgtaccgtttattgttacgcgatggtcatggaggtgcaactggtgatggaattcgcagcgacggttttcgcgacaatcggtatggcttgcgaaggcgggtttaaggaaatggttaaggaagcgaaccatgttttcaccaaaggaccaacattttattggacgtttgcgatactagcaaatgtggtgacgtggcagctctctttcgcagccacgtcagggatggtttacttgacgtcaggtatcaccggaggtatctgcatgacggcgttgctcgcgatgaatgtgataggaggtgtggtggcttacggtgacgtgtttggtggagtgaagattgtgtcgacggtgctatgtatttggggattctcatcttacacatacgggatgtatatgaagatgaagaaggaggagaaggagaagggagaatattccggcgtaaagacgacggaagacagcggagagatggaggtggaaatgggaaatgttaaagatgacgtggcggcggcggatgatagggcttgaagatatctgtgtgattgagacggccgttatgattattattaggaaggaagccaacaaaaaaaaaaaaagtagtagtatctttttgtgttctttctttttctcaccttatgtttttttagtaatgcatttgcttttgt

SEQ ID NO: 102525 - protein, 382 aa, Arabidopsis thaliana; identical to SEQ ID NO: 40365
  peptide (1)..(382): Ceres Seq. ID no. 13610589

SEQ ID NO: 102526 - protein, 367 aa, Arabidopsis thaliana; identical to SEQ ID NO: 40366
  peptide (1)..(367): Ceres Seq. ID no. 13610590

SEQ ID NO: 102527 - DNA, 1221 bp, Arabidopsis thaliana
  misc_feature (1)..(1221): Ceres Seq. ID no. 13610591
  misc_feature (1)..(1221): Ortholog of  Ceres SEQ ID NO 13596474 as cited in SEQ ID NO 62169
  misc_feature (1)..(1221): Ortholog of  Ceres SEQ ID NO 13598714 as cited in SEQ ID NO 62656
  misc_feature (1)..(1221): Ortholog of  Ceres SEQ ID NO 13596969 as cited in SEQ ID NO 63375
  misc_feature (1)..(1221): Ortholog of  Ceres SEQ ID NO 13597519 as cited in SEQ ID NO 64759
  misc_feature (1)..(1221): Ortholog of  Ceres SEQ ID NO 13597870 as cited in SEQ ID NO 64982
  misc_feature (1)..(1221): Ortholog of  Ceres SEQ ID NO 13656123 as cited in SEQ ID NO 65212
aaattcatcaaagccaatcaaattgagagagatatcaagaaagcaaaataatgaagttggccgtggtctcagtcgttgtcatactcggagttctcgtggcttggccggtatcggctggccgaaaagacttacctggagcgggaggatacggaggcgatgacgatgatgatacaaagtcattgttccctttggacaacctattatcgttgaattattatgataggatttgtccagattttgagaaaatcgttgttacgaaagtgagggaatggactaagagtgactcttcccttggtcccgccctcctccgccttatcttccacgattgtggcgtcacgggatgtgatgcgtctgttcttctagactacgaagggacagagagaagatctccggctagcaaaacactaagaggcttcgagctaattgacgatatcaagtccgagatggagaaatcatgccccggcaaagtatcctgcgccgacatcctaacatcagccagccgtgccgccaccgtccaacttggtggtccttactggcccaacgtctacggtcgtcgtgactccaaacactcttacgctagagacgtagagaaagtcccttcaggccgtcgtgatgttaccgcccttctcgaaacgtttcagtcatacggtctcaacgtcctcgacctagttgtcctttccggggcccacaccatcggaaaagcgtcctgtggcaccatccagtcgaggctttacaactacaacgcaaccagtggttcagatccttcgattgacgcaaaatacgctgattacttgcaacgcaggtgtcgctgggcctctgagaccgtcgatctcgaccctgtaactccagcagtgttcgataatcagtactacattaatcttcagaagcatatgggagttttgtcgactgatcaggagcttgttaaggacccaaggactgctccgcttgtaaagactttcgcagagcaatcacctcagatattcagacagcagtttgctgtgtccatggctaagctggtcaacgttggagttctcactggtgaagatcgtgtcggagagatcaggaaggtttgcagcaaatctaactccagagcttactaaattataatcatcatccctcatgagaaggatcttttgtttcttgaaataatttcttgtttggtttttgagctcttttctattgcaattttgtaatttgttgtatgaacaagaacaaaaactg

SEQ ID NO: 102528 - protein, 349 aa, Arabidopsis thaliana
  peptide (1)..(349): Ceres Seq. ID no. 13610592
MKLAVVSVVVILGVLVAWPVSAGRKDLPGAGGYGGDDDDDTKSLFPLDNLLSLNYYDRICPDFEKIVVTKVREWTKSDSSLGPALLRLIFHDCGVTGCDASVLLDYEGTERRSPASKTLRGFELIDDIKSEMEKSCPGKVSCADILTSASRAATVQLGGPYWPNVYGRRDSKHSYARDVEKVPSGRRDVTALLETFQSYGLNVLDLVVLSGAHTIGKASCGTIQSRLYNYNATSGSDPSIDAKYADYLQRRCRWASETVDLDPVTPAVFDNQYYINLQKHMGVLSTDQELVKDPRTAPLVKTFAEQSPQIFRQQFAVSMAKLVNVGVLTGEDRVGEIRKVCSKSNSRAY

SEQ ID NO: 102529 - protein, 218 aa, Arabidopsis thaliana
  peptide (1)..(218): Ceres Seq. ID no. 13610593
MEKSCPGKVSCADILTSASRAATVQLGGPYWPNVYGRRDSKHSYARDVEKVPSGRRDVTALLETFQSYGLNVLDLVVLSGAHTIGKASCGTIQSRLYNYNATSGSDPSIDAKYADYLQRRCRWASETVDLDPVTPAVFDNQYYINLQKHMGVLSTDQELVKDPRTAPLVKTFAEQSPQIFRQQFAVSMAKLVNVGVLTGEDRVGEIRKVCSKSNSRAY

SEQ ID NO: 102530 - DNA, 1328 bp, Arabidopsis thaliana
  misc_feature (1)..(1328): Ceres Seq. ID no. 13610602
  misc_feature (1)..(1328): Ortholog of  Ceres SEQ ID NO 13660872 as cited in SEQ ID NO 60830
  misc_feature (1)..(1328): Ortholog of  Ceres SEQ ID NO 12616221 as cited in SEQ ID NO 63291
cttctcgcatcttatatgaaacacattcactctccaaaataatctatacttttcctacatattctcttgacgatcatgagactgatttcgtgaaaatatcgtcattatatcaaattagaagttgatggaaaacatgggggattcgagcatagggccgggccatccgcatctccctcccgggtttcggtttcacccgactgatgaggaactagtagttcattacctcaagaagaaagcagattctgttccacttccagtctcaatcatcgcagagattgatctttacaagtttgatccttgggagcttccaagcaaggcgagttttggagagcacgagtggtacttctttagtcctcgggatcggaagtatccaaatggggttaggccaaaccgggcagcaacttccggttattggaaagcaacgggaaccgataaaccgatatttacgtgcaatagtcacaaggttggtgtcaagaaagcgcttgttttttacggtggaaagcctcctaaagggataaaaacagattggatcatgcatgaatatcgcctcactgatggtaaccttagcactgcggctaagccgcctgacttaaccacgacaaggaaaaactcactacggctagacgattgggttctatgtaggatctataagaagaatagttcacaaagaccaacaatggagagagtattacttagagaggatctaatggaaggcatgctctcaaaatcatctgctaattcttcttctacatcagtactagacaacaacgacaacaataataacaataacgaagaacactttttcgacggtatggtcgtttcttcagacaaacgttccttgtgtggtcaataccgaatgggccacgaggcctcaggatcatcttcattcggatctttcttatcgagcaagaggtttcatcatacaggtgatctcaacaatgataactacaatgtctcttttgtttcgatgcttagtgagattcctcagagttcggggtttcatgcaaatggtgttatggatacgacgtcgtctctagctgatcatggggttttaagacaggcgtttcagcttcctaacatgaactggcactcataatctatatagatatatatgtgtgtatcatatatgtatctatgcaggcctaatatagtttacacataaatcatctgggaatatatatatacaagtacgcggtcttacaaatgtatacgtatctgtttaattacgtcaagaaaaagtgtatacgtttctttttactcaatggctgcaaagatgtgtactaataacagaagctgattaataaaaaatataaaagtatattttttcc

SEQ ID NO: 102531 - protein, 323 aa, Arabidopsis thaliana; identical to SEQ ID NO: 24690
  peptide (1)..(323): Ceres Seq. ID no. 13610603

SEQ ID NO: 102532 - protein, 320 aa, Arabidopsis thaliana; identical to SEQ ID NO: 24691
  peptide (1)..(320): Ceres Seq. ID no. 13610604

SEQ ID NO: 102533 - protein, 187 aa, Arabidopsis thaliana; identical to SEQ ID NO: 24692
  peptide (1)..(187): Ceres Seq. ID no. 13610605

SEQ ID NO: 102534 - DNA, 946 bp, Arabidopsis thaliana
  misc_feature (1)..(946): Ceres Seq. ID no. 13610606
  misc_feature (1)..(946): Ortholog of  Ceres SEQ ID NO 13658400 as cited in SEQ ID NO 66403
aaacctccaacttttttttgttttatcagattgtaaatttagggaagagactttcgcaagcaatctagaagcaaatcgatcgccaaatctccggattatttgcaagaatcgttcccagataatcttccccagattctccacttctccaggtattaatttcgtattgagtggattagattagatttcaagatatgagagcctcactggcgttctaatgtcactgtttcgtatttttatcaatcagcttgaagaagacgacgaagatatggctacttcgaagaaaatgatcacacgtgaagaatgggagaagaaactaaatgctgtgaagcttaggaaagaagatatgaatactttggtgatgaattttcttgtgactgaaggatatgttgaagctgctgagaaattccaaagggagtctggaaccaaaccagagatagatcttgcgaccattactgatcgaatggctgttaaaaaggctgttcaaaacggaaatgtcgaggatgcgattgaaaaagttaatgatttgaatcctgagatactagacacgaatccggagctcttttttcatcttcagcagcaaaggttgatagaattaattcgacaagggaagacagaagaggccttagagtttgctcaggaggaacttgcaccacgtggcgaagaaaaccaagcgtttctggaagaattggaaaaaactgtagccctacttgtttttgacgatgcctctacctgcccggttaaagagcttcttgatctttcccaccgtcttaagacagcaagtgaagtaaatgcagcgattcttacaagccagagccacgaaaaagatcctaaacttccaagcttgttgaagatgttgatttgggctcaaactcaactggacgagaaagcagtgtatccgcacattaatgatttgtctaccggtaagctcgaagacccgtcagaatga

SEQ ID NO: 102535 - protein, 243 aa, Arabidopsis thaliana
  peptide (1)..(243): Ceres Seq. ID no. 13610607
MSLFRIFINQLEEDDEDMATSKKMITREEWEKKLNAVKLRKEDMNTLVMNFLVTEGYVEAAEKFQRESGTKPEIDLATITDRMAVKKAVQNGNVEDAIEKVNDLNPEILDTNPELFFHLQQQRLIELIRQGKTEEALEFAQEELAPRGEENQAFLEELEKTVALLVFDDASTCPVKELLDLSHRLKTASEVNAAILTSQSHEKDPKLPSLLKMLIWAQTQLDEKAVYPHINDLSTGKLEDPSE

SEQ ID NO: 102536 - protein, 226 aa, Arabidopsis thaliana; identical to SEQ ID NO: 73145
  peptide (1)..(226): Ceres Seq. ID no. 13610608

SEQ ID NO: 102537 - protein, 220 aa, Arabidopsis thaliana; identical to SEQ ID NO: 73146
  peptide (1)..(220): Ceres Seq. ID no. 13610609

SEQ ID NO: 102538 - DNA, 1502 bp, Arabidopsis thaliana
  misc_feature (1)..(1502): Ceres Seq. ID no. 13610614
  misc_feature (1)..(1502): Ortholog of  Ceres SEQ ID NO 15171245 as cited in SEQ ID NO 52264
  misc_feature (1)..(1502): Ortholog of  Ceres SEQ ID NO 14303576 as cited in SEQ ID NO 68428
cttctctttcctctctctcacacacatcttcgagaagtttccgccggcgggagagatcaaagacaactgctgatcagaaatcagagatcagagatatgaacattctcttctccagattctcctttttgcttctgtttctctgttcttggaccagtttcactttcaccacaacagaagcttatgatgcacttgatccatatggaaacattactataaaatgggatattatgagctggactggtgatggttatgtggctgttgtaacaatctttaatttccaacaataccgtcacattgaggcgccggggtggcaattaggatggagttggatgaagaaggaagtaatttggagtatggttggtggtcaagcaacagaacaaggagattgttctaagtttaagggtaacattcctcattgctgcaagaaaactccggctatcgttgatttgttaccgggaactccttataaccaacagatatcaaactgttgtagaggcggtgtgattagcgcgtgggcgcaagaccccgcaaccgcgatttcttcgtttcagattagtgttggccagtctggaacaactaatactacggttagagcacctaggaatataactttgaaggctccaggacctggttacacttgcgggcctgcaaaactcgttaagccgagtagattcatttccgcggataaacgaagaaagactcagtctttgcttacatggaacattacttgcacatattcgcagtttctagcacggaaaactccgacttgttgtgtctcactctcagccttctacaatgaaactatagtaccatgtccaacttgttcttgtggatgtcaaaatagttctcaagctggtacatgtgttgaccctaaaatagcttcagtagtaccagccttagggaagaacaacctcgaacctctcttgcaatgtacgcaacatatgtgtcccattcgagttcattggcatgtaaaaactagctacaaagagtactggagagtgaaggttgccatcacaaactttaactacaatatgaactactctcagtggaacttagtcgttcagcatcccaacttcgacaatctcactaagcttttcagtttcaactacaaaccgcttaatccttacttgaacataaatgacacggccatgctatggggaatcaagttctacaatgattttttaagccaagctggtccagtaggcaatgtacagtcagagcttctcttccaaaagaacccattggagttcacattcgagaaaggatgggcgtttccgaggcgcatatacttcaacggtgataactgcgttatgccacctccagactcttatccatggcttccaaacgctagtccaaacattgcaacctcgccatttgtcatacttctcatcactttcttatctgttttgattcttatgtaaatggatatctatatactgtcatggacatgtttggtgatgtttacattataagtgagtgtgttattaggaaatcattctttg

SEQ ID NO: 102539 - protein, 472 aa, Arabidopsis thaliana
  peptide (1)..(472): Ceres Seq. ID no. 13610615
SLSSLSHTSSRSFRRRERSKTTADQKSEIRDMNILFSRFSFLLLFLCSWTSFTFTTTEAYDALDPYGNITIKWDIMSWTGDGYVAVVTIFNFQQYRHIEAPGWQLGWSWMKKEVIWSMVGGQATEQGDCSKFKGNIPHCCKKTPAIVDLLPGTPYNQQISNCCRGGVISAWAQDPATAISSFQISVGQSGTTNTTVRAPRNITLKAPGPGYTCGPAKLVKPSRFISADKRRKTQSLLTWNITCTYSQFLARKTPTCCVSLSAFYNETIVPCPTCSCGCQNSSQAGTCVDPKIASVVPALGKNNLEPLLQCTQHMCPIRVHWHVKTSYKEYWRVKVAITNFNYNMNYSQWNLVVQHPNFDNLTKLFSFNYKPLNPYLNINDTAMLWGIKFYNDFLSQAGPVGNVQSELLFQKNPLEFTFEKGWAFPRRIYFNGDNCVMPPPDSYPWLPNASPNIATSPFVILLITFLSVLILM

SEQ ID NO: 102540 - protein, 441 aa, Arabidopsis thaliana
  peptide (1)..(441): Ceres Seq. ID no. 13610616
MNILFSRFSFLLLFLCSWTSFTFTTTEAYDALDPYGNITIKWDIMSWTGDGYVAVVTIFNFQQYRHIEAPGWQLGWSWMKKEVIWSMVGGQATEQGDCSKFKGNIPHCCKKTPAIVDLLPGTPYNQQISNCCRGGVISAWAQDPATAISSFQISVGQSGTTNTTVRAPRNITLKAPGPGYTCGPAKLVKPSRFISADKRRKTQSLLTWNITCTYSQFLARKTPTCCVSLSAFYNETIVPCPTCSCGCQNSSQAGTCVDPKIASVVPALGKNNLEPLLQCTQHMCPIRVHWHVKTSYKEYWRVKVAITNFNYNMNYSQWNLVVQHPNFDNLTKLFSFNYKPLNPYLNINDTAMLWGIKFYNDFLSQAGPVGNVQSELLFQKNPLEFTFEKGWAFPRRIYFNGDNCVMPPPDSYPWLPNASPNIATSPFVILLITFLSVLILM

SEQ ID NO: 102541 - protein, 397 aa, Arabidopsis thaliana
  peptide (1)..(397): Ceres Seq. ID no. 13610617
MSWTGDGYVAVVTIFNFQQYRHIEAPGWQLGWSWMKKEVIWSMVGGQATEQGDCSKFKGNIPHCCKKTPAIVDLLPGTPYNQQISNCCRGGVISAWAQDPATAISSFQISVGQSGTTNTTVRAPRNITLKAPGPGYTCGPAKLVKPSRFISADKRRKTQSLLTWNITCTYSQFLARKTPTCCVSLSAFYNETIVPCPTCSCGCQNSSQAGTCVDPKIASVVPALGKNNLEPLLQCTQHMCPIRVHWHVKTSYKEYWRVKVAITNFNYNMNYSQWNLVVQHPNFDNLTKLFSFNYKPLNPYLNINDTAMLWGIKFYNDFLSQAGPVGNVQSELLFQKNPLEFTFEKGWAFPRRIYFNGDNCVMPPPDSYPWLPNASPNIATSPFVILLITFLSVLILM

SEQ ID NO: 102542 - DNA, 1134 bp, Arabidopsis thaliana
  misc_feature (1)..(1134): Ceres Seq. ID no. 13610663
  misc_feature (1)..(1134): Ortholog of  Ceres SEQ ID NO 14303612 as cited in SEQ ID NO 63208
agaaccaaggaaaaggaaagagtcggcgaaaaagatataaaaaagccagcgagagagacaaagggtttttgagtatctcgcgaggttttacatagatttctccattatggattcgatgatgaatcagaagactgttttggctgtgacggatgatgtggtgttacctgttagctctgttttagctataatgaaagagcttggaaaggaagtgattgagagttttgatcctctgattattactcaagcatccacaataaatcagtttcctttggatgcttcctctgtggaggcggtattagccatttccaaaacatctgatttcccaagtgataaaatatgtggtgagttctcaagaatcttgaagcctggcggcacggtttctgtgtgcaaagttttggagggtgaaacgggagaaattcaacagaccattcaaaggagagtgacattggctggttttcttgagccacagtgtcttgatttgaaatcaattaaattgtctacgttcagtttatcctttgggattaaggcaaagaaaccttcttggaagattggttcatcatttgctctcaaaaagcctgtaacaaatctctttaagattgatctagatgacgacgtggatcttattgatgaagattctcttttaacagaggaggacttgatgaagccacagcttcctgttgccagcggttgtgagaccactaaaaaagcttgcaagaactgcgtctgtggtagagctgaaattgaggagaaagctgtgaagctgggcctcacagaggatcaaatcgagaatccacaatcatcatgcggcagctgtgggctcggtgatgccttccgctgcggtacatgcccttacaagggtctgccacccttcaaattaggcgagaaggtaaccctatctcaaaacttccttgaagctgacatataagcatgtgaaaggcatcttcatacatgggtgtttctcgccgaggccaaaaccttttgctaatcgcagagtagtttcatcatttactttgtgccctttcgtataatttgtttgttggtacttcttttattttgtggctctaaaagcttgtagaatattgtttgggttgcccacaaagcacacaccttagtatcaatgaagaacggttttgc

SEQ ID NO: 102543 - protein, 272 aa, Arabidopsis thaliana; identical to SEQ ID NO: 27277
  peptide (1)..(272): Ceres Seq. ID no. 13610664

SEQ ID NO: 102544 - protein, 269 aa, Arabidopsis thaliana; identical to SEQ ID NO: 27278
  peptide (1)..(269): Ceres Seq. ID no. 13610665

SEQ ID NO: 102545 - protein, 268 aa, Arabidopsis thaliana; identical to SEQ ID NO: 36494
  peptide (1)..(268): Ceres Seq. ID no. 13610666

SEQ ID NO: 102546 - DNA, 1170 bp, Arabidopsis thaliana
  misc_feature (1)..(1170): Ceres Seq. ID no. 13610679
  misc_feature (1)..(1170): Ortholog of  Ceres SEQ ID NO 14311576 as cited in SEQ ID NO 51551
aaggtagaagacgatatccgctctgaagcagaagaaaaggtaattctgaatgtctggaagaaaccggattcacagagatatccgagacagctatcatgatcatcgtgatttacctccggagagaccttttctccgaggccctccattgttacaacctccaccaccatctttgttagaagatcttcagatacaggagggtgaaatcagaaggcaggatgctgaaatcagaaggcttttgagtgataatcatggactagctgacgaccgaatggttctggagagagaactcgttgctgctaaagaagagcttcaccgaatgaatctgatgatttctgatcttcgtgctgagcaagatctgcaattgagggagtttagtgagaaaaggcataaacttgagggggatgttcgcgctatggagtcgtataagaaggaggcttcacagttgcgtggtgaagttcagaagctggatgagattaaacgtgaattaagtggaaatgttcagttgcttaggaaagatttggctaaattgcaatcagataacaagcagattcctggtatgagagctgaggttaaagacctgcagaaggagcttatgcatgctagagatgcaattgaatatgagaagaaggaaaagtttgagcttatggagcagcggcagacaatggaaaagaacatggtttctatggcgcgtgaagttgaaaagctacgcgcagaacttgctactgttgatagtaggccgtggggttttggtggatcgtatgggatgaattacaacaatatggacggcactttccgtggctcgtatggcgaaaacgatacttatttgggatcttcggaaaggagtcaatattacagccatgggtctggctcgcagaagaaacctcgtttggatcgtcattgaaatctaaaatgatctgtggaaaaagaatgaggtgacgactaaatagcccacttctcaatactcctctggttgtttgtgggtatgcatctactctaaatctaaatgttagttcttctgcttttttaataaggcgttatagttatgtaacttagatggctttttttctttctttctttttagccaagcttagatggctaatctatttcgtatgtttcaataatttgacgatttggttcttcttgcttgctattaattgtgttctattatcc

SEQ ID NO: 102547 - protein, 283 aa, Arabidopsis thaliana; identical to SEQ ID NO: 41524
  peptide (1)..(283): Ceres Seq. ID no. 13610680

SEQ ID NO: 102548 - protein, 210 aa, Arabidopsis thaliana; identical to SEQ ID NO: 41525
  peptide (1)..(210): Ceres Seq. ID no. 13610681

SEQ ID NO: 102549 - protein, 194 aa, Arabidopsis thaliana; identical to SEQ ID NO: 41526
  peptide (1)..(194): Ceres Seq. ID no. 13610682

SEQ ID NO: 102550 - DNA, 1266 bp, Arabidopsis thaliana
  misc_feature (1)..(1266): Ceres Seq. ID no. 13610683
  misc_feature (1)..(1266): Ortholog of  Ceres SEQ ID NO 12607455 as cited in SEQ ID NO 55208
gtattggactaatttagtagactgctccctgaaatattgattttctcatgctaacaaaggcagacgaacagaagggtttggaggataaatgtgctaaacagatggcggaaattaaatctctcaaggctctaattgagaaactactcaaagaaaaactacagctgcaaaatctagcaagcatctgtacgcgtgaatgtaatgatgacaggggactggcagaaatcaaggattcacaacggaaagcccaagctcaggctgaagagctgaaaaacgttttggatgaacactttcttgaattgagagtgaaagcggctcatgagactgagagtgcttgccaagaaaggcttgctaccgccaaggctgaaattgctgaattgaggactcagttagatctttctgagagggaggttttggaacttaaggagggtattaaagttaaagagcaggaggcagaggcatccattgctgaaatggagactataggtcaagcctatgaagacatgcagacacagaaccaacatttgttgcagcaggtggctgagcgggacgattataatatcaagcttgtttccgaaagtgtcaagacaaagcatgcttacaacactcacttatctgagaagcaagtaatggaaaagcagctccatcaggttaatgcatccgtagagaattttaaagcaaggattgcacataatgaggaacagatgaaaggctgtttttctgaggcttataaattgattcaagaagatcgtcacctcgttatcagcctcgaaaccaccaaatgggaagtagctgatgctgacaaggaattcagatggctcaagtcggccgtgtcttcatccgaaaaggaatatgaacagatcagtaggaggacagacgacatcaaactggaactggatgatgaaaggagggagaagaagaagcttgaggaagagcttatggagttgaacaaagagcttgaagagttgggttctgagagtgtagaagctgcaattgtgaggctccaggaagaagttaagaattgcaaaaacatcctcaaatgtggtgtatgttttgatcggcctaaagaggtggtaattgtgaaatgttatcatctgttctgccagcaatgcatccaacgtagcttagagatccgacaccggaaatgtccaggctgcggtaccgcctttggccagaatgacgtccggcttgtcaaaatgtaactcaaaacattcacacaaatgcactatgtgttggtacataacaaacttaattaaggtccacacagtc

SEQ ID NO: 102551 - protein, 383 aa, Arabidopsis thaliana
  peptide (1)..(383): Ceres Seq. ID no. 13610684
MLTKADEQKGLEDKCAKQMAEIKSLKALIEKLLKEKLQLQNLASICTRECNDDRGLAEIKDSQRKAQAQAEELKNVLDEHFLELRVKAAHETESACQERLATAKAEIAELRTQLDLSEREVLELKEGIKVKEQEAEASIAEMETIGQAYEDMQTQNQHLLQQVAERDDYNIKLVSESVKTKHAYNTHLSEKQVMEKQLHQVNASVENFKARIAHNEEQMKGCFSEAYKLIQEDRHLVISLETTKWEVADADKEFRWLKSAVSSSEKEYEQISRRTDDIKLELDDERREKKKLEEELMELNKELEELGSESVEAAIVRLQEEVKNCKNILKCGVCFDRPKEVVIVKCYHLFCQQCIQRSLEIRHRKCPGCGTAFGQNDVRLVKM

SEQ ID NO: 102552 - protein, 365 aa, Arabidopsis thaliana
  peptide (1)..(365): Ceres Seq. ID no. 13610685
MAEIKSLKALIEKLLKEKLQLQNLASICTRECNDDRGLAEIKDSQRKAQAQAEELKNVLDEHFLELRVKAAHETESACQERLATAKAEIAELRTQLDLSEREVLELKEGIKVKEQEAEASIAEMETIGQAYEDMQTQNQHLLQQVAERDDYNIKLVSESVKTKHAYNTHLSEKQVMEKQLHQVNASVENFKARIAHNEEQMKGCFSEAYKLIQEDRHLVISLETTKWEVADADKEFRWLKSAVSSSEKEYEQISRRTDDIKLELDDERREKKKLEEELMELNKELEELGSESVEAAIVRLQEEVKNCKNILKCGVCFDRPKEVVIVKCYHLFCQQCIQRSLEIRHRKCPGCGTAFGQNDVRLVKM

SEQ ID NO: 102553 - protein, 242 aa, Arabidopsis thaliana
  peptide (1)..(242): Ceres Seq. ID no. 13610686
METIGQAYEDMQTQNQHLLQQVAERDDYNIKLVSESVKTKHAYNTHLSEKQVMEKQLHQVNASVENFKARIAHNEEQMKGCFSEAYKLIQEDRHLVISLETTKWEVADADKEFRWLKSAVSSSEKEYEQISRRTDDIKLELDDERREKKKLEEELMELNKELEELGSESVEAAIVRLQEEVKNCKNILKCGVCFDRPKEVVIVKCYHLFCQQCIQRSLEIRHRKCPGCGTAFGQNDVRLVKM

SEQ ID NO: 102554 - DNA, 639 bp, Arabidopsis thaliana
  misc_feature (1)..(639): Ceres Seq. ID no. 13610687
  misc_feature (1)..(639): Ortholog of  Ceres SEQ ID NO 12597253 as cited in SEQ ID NO 62959
  misc_feature (1)..(639): Ortholog of  Ceres SEQ ID NO 15173341 as cited in SEQ ID NO 63800
  misc_feature (1)..(639): Ortholog of  Ceres SEQ ID NO 12635416 as cited in SEQ ID NO 0
  misc_feature (1)..(639): Ortholog of  Ceres SEQ ID NO 12635564 as cited in SEQ ID NO 0
ccataacaacaaattcgattcttataactgtttccctctcatctttacacaaaagtattctaatcgatttcaatggcgggtcgtggtaaaacactcggatctgggtctgcgaagaaggcaacaacaagaagcagcaaagccggtctccaattccctgtgggtcgtatcgctcgtttcttgaagaaaggcaaatacgccgaacgtgttggtgccggagctccggtttacttagccgccgttctcgaatacctcgccgctgaggtattggaattggctggaaacgcagcgagggataacaagaagacgaggattgttccaaggcatattcaattggcggtgaggaacgatgaagaattgagcaaattgcttggagatgtgactattgctaatggaggtgtgatgcctaacattcacaatcttcttcttcctaagaagaccggtgcttccaagccatctgctgaagacgattgattaatcaaccaaatccactctcttgtgttttttgagtttttaaggctttttaagagtaatttagattagatctatggtgaagaaagaatctatcttctgtgttttttgaattgaattgaatgttcatatgctttcaatttcttatggaatcaagattttaacttttct

SEQ ID NO: 102555 - protein, 132 aa, Arabidopsis thaliana; identical to SEQ ID NO: 30154
  peptide (1)..(132): Ceres Seq. ID no. 13610688

SEQ ID NO: 102556 - DNA, 968 bp, Arabidopsis thaliana
  misc_feature (1)..(968): Ceres Seq. ID no. 13610695
  misc_feature (1)..(968): Ortholog of  Ceres SEQ ID NO 12615268 as cited in SEQ ID NO 62391
atagaagaaagagctccgtccccaaaaacaaaggaaacaaaaaatcagtcggcgaaacgggaagagatctatcggaaatcttacggcggcggaagtcatggcgaacatagaatcagaagcagtcgatttcgagccagaggaggatgaccttatggacgaagaaggtacagctattgacggagctgatgtttctccacgcgcgggacatccgaggcttaagtcggctattgccggagctaatggcgaatcagcaaagaagaccaaaggccgtgggtttcgcgaggagaaagattccgatcgtcagcgtcgtctttcctcacgcgatttcgaatcacttggttcagatggccgtcctggtccgcagagatccgttgaaggatggattatcttggtctctggagttcatgaggagacacaggaggaggatataaccaatgcttttggtgattttggggagattaagaatctaaatctcaatctcgatcgccgtagtggttatgtcaagggatatgctttgatagaatatgagaagaaggaagaagcacagagcgctatttcagcaatgaatggtgctgagcttctaacacagaatgttagcgttgactgggccttcagcagcggtcccagtggtggtgaatcttacaggagaaagaactcgaggtatgggaggtcgcaacgttcaagaagtccgagaagacgttactgattgtatgatttggtggagagttctccccatatctctctgtattagggattccctctcttatctgtaaggtactgatgcaagacgctgagtgttgaacaaatttttttctggggtttttgtagggtttggctgcttttgcattggtttatctctttatgcatttgcatgggattgttgcgtttaaacaccatgagatctgttttaatgctttgtattggtaaaagaagagaaacattggatgaggaagaatgttttaattttc

SEQ ID NO: 102557 - protein, 202 aa, Arabidopsis thaliana
  peptide (1)..(202): Ceres Seq. ID no. 13610696
MANIESEAVDFEPEEDDLMDEEGTAIDGADVSPRAGHPRLKSAIAGANGESAKKTKGRGFREEKDSDRQRRLSSRDFESLGSDGRPGPQRSVEGWIILVSGVHEETQEEDITNAFGDFGEIKNLNLNLDRRSGYVKGYALIEYEKKEEAQSAISAMNGAELLTQNVSVDWAFSSGPSGGESYRRKNSRYGRSQRSRSPRRRY

SEQ ID NO: 102558 - protein, 184 aa, Arabidopsis thaliana
  peptide (1)..(184): Ceres Seq. ID no. 13610697
MDEEGTAIDGADVSPRAGHPRLKSAIAGANGESAKKTKGRGFREEKDSDRQRRLSSRDFESLGSDGRPGPQRSVEGWIILVSGVHEETQEEDITNAFGDFGEIKNLNLNLDRRSGYVKGYALIEYEKKEEAQSAISAMNGAELLTQNVSVDWAFSSGPSGGESYRRKNSRYGRSQRSRSPRRRY

SEQ ID NO: 102559 - DNA, 3268 bp, Arabidopsis thaliana
  misc_feature (1)..(3268): Ceres Seq. ID no. 13610710
  misc_feature (1)..(3268): Ortholog of  Ceres SEQ ID NO 12593464 as cited in SEQ ID NO 69039
  misc_feature (1)..(3268): Ortholog of  Ceres SEQ ID NO 13596244 as cited in SEQ ID NO 69307
cgcacacctctcttaacttcttcgatctcttctttttctctacacgattcgattgattcaagtatcaatcaatcgaatccgagataagtcatgagtttcttcaaatgggtttcttttgttttgatccttcacttgcttaatccgactctgatttcatgttcctctaatgggttatctcaaataccttcaaagtttcttactttggctaaaaggaatgattttttcgattggatggttggaatcagaaggagaatccatgagaatccagagttaggttatgaggaagtagagacatctaagcttgttagagcagagttggagaagatgggtgtttcttataagtacccagttgctgttactggtgttgttgggtatgttggaactggtcatgctccttttgttgctttaagggctgatatggatgcacttgctatgcaggaaatggtggaatgggaacacaagagtaaggttccagggaagatgcacgcttgtggacatgacgctcacactacgatgcttctcggtgctgcaaaattgctcaaagaacatgaagaagagctacagggcacagtggttctagttttccaaccagctgaggaaggaggaggaggtgcaaagaagattgtggaggctggagtgttggagaatgtgagtgcaatctttggattacatgtcacaaatcaattggcattaggtcaagtgagctcgagagagggtcctatgttggctggtagtggctttttcaaagctaagataagcgggaaaggaggccacgcagctcttccgcagcataccatagatccgatactggcagcttcaaatgttattgttagcttacaacacctcgtttcacgagaggcagatcctttagactctcaggtggttacagttgctaaatttgaaggcggtggtgctttcaatgtgattcctgactctgttactatcggtggtacattccgagctttttcaactaaaagctttatgcaactcaagaaaagaattgagcaggttatcacaaggcaagcgagcgtgaatatgtgtaatgcaacagtggatttcattgaagaggagaaaccttttttcccaccaactgtaaatgacaaagccttacaccagtttttcaagaacgtttcaggcgatatgttagggattgagaattacgtcgagatgcaaccattaatgggatcagaagatttctctttctaccaacaagcaatcccgggacattttagcttcgttggaatgcaaaacaaagctcgttcaccaatggcgagccctcactcgccgtactttgaagttaacgaagaattactaccttatggtgcttcccttcatgcttccatggccacaagatatcttcttgaactaaaagcttcaactctaaataagagtaacaaaaaagatgaactttgatgccaacaaacattggcttctcctattcttctactctgaaaaatgtcaaaacatggtaacagttttttcttttttacagagcctgccatgtaaagattaataaattgttatgcagtgtcaagcttctattaaatccaagaaatgttattactgcaaacaaaaacagatttgggccattgcaatgagagagctgaaacggtcaatttaaacaaatcagattgagagatttcagaagattcgacgcataaacaaatgctaaaattcgagagcttgttaacatgtctaactgataaagattcaatttttctttcttgttttttcttcttcttctttagattcaagttctgatctttgcttctttgaaaatcacaaatcttttcttctgggtttctataaaaaacccattttttgttgttgtcgtacaaacatttcccgtaaagattggatttttgtgtaagcatttgaagatagctaagaaagtgagaagcttttagatgaaagtgatggtaatggagatggaggaatgtgttaaagaaaatggttcatcaacacctaaatctagagtcacaaaccaatctagagctctcttaccgttgcgtctgcttcagattctgttattgtttcttgttttgactcttgggatctctgttgttagtatacacatgatcaagtttttgaagattcaacgtttagatcctgtggctccaattactttgctctctacgtataatcatgagagtgttactttagatagctttattagacctccttccaatgtttggcacacaatgaatgatagtgaattgctttggcgtgcttctatagagccgcaaagaaatggttatccgtttagacgtgtccctaaattggctttcatgtttcttgccaaaggtcctttaccatttgctccactttgggagaagttctgtaaaggacatgagggtctttattctatctatgttcattcgttgcctagttacaaatcggatttttcgaggtcgtctgtgttttacagaagatatatccctagtcaggctgtggcatggggagagatgagtatgggtgaagcagagaggaggcttttggctaatgcgttgcttgatatctctaatgaatggtttgttctgctgtctgaatcatgcattcctctgcgaggtttcagctttatctatagttatgtctctgaatcaagatatagttttatgggtgctgctgatgaggaaggacctgatggaagaggcagatacaggacagaaatggaacctgagatcacactaagccagtggcgaaaagggtctcagtggtttgaaattaaccggaaactcgctgttgagattgttcaagacactacttactatcccaaattcaaagagttttgtagacctccatgctatgtagatgaacattacttcccaacaatgttgtctatgaaacatcgggttttgcttgctaataggacattgacatggacagattggtcacgtggtggtgctcatccagctacttttggtaaggctgatgtaacggaaagttttctcaagaagcttacaggagccaaatcttgcctctacaatgatcatcagtctcaaatctgttatctctttgccagaaagtttgctccaagcgcattggagcctttactgcaacttgcacccaagattcttgagttaggctctaacatatcttccactcgtcactcttggtatttgttttgagaagttcttgagtttagagtatgatcatggaccgaactgatcattagttaatctcctctttcacaatgatattacaggtattgtgaaggttaaacatattttttgacatgacagattattgaataaagggagttttgagt

SEQ ID NO: 102560 - protein, 440 aa, Arabidopsis thaliana; identical to SEQ ID NO: 36083
  peptide (1)..(440): Ceres Seq. ID no. 13610711

SEQ ID NO: 102561 - protein, 406 aa, Arabidopsis thaliana
  peptide (1)..(406): Ceres Seq. ID no. 13610712
MKVMVMEMEECVKENGSSTPKSRVTNQSRALLPLRLLQILLLFLVLTLGISVVSIHMIKFLKIQRLDPVAPITLLSTYNHESVTLDSFIRPPSNVWHTMNDSELLWRASIEPQRNGYPFRRVPKLAFMFLAKGPLPFAPLWEKFCKGHEGLYSIYVHSLPSYKSDFSRSSVFYRRYIPSQAVAWGEMSMGEAERRLLANALLDISNEWFVLLSESCIPLRGFSFIYSYVSESRYSFMGAADEEGPDGRGRYRTEMEPEITLSQWRKGSQWFEINRKLAVEIVQDTTYYPKFKEFCRPPCYVDEHYFPTMLSMKHRVLLANRTLTWTDWSRGGAHPATFGKADVTESFLKKLTGAKSCLYNDHQSQICYLFARKFAPSALEPLLQLAPKILELGSNISSTRHSWYLF

SEQ ID NO: 102562 - protein, 403 aa, Arabidopsis thaliana
  peptide (1)..(403): Ceres Seq. ID no. 13610713
MVMEMEECVKENGSSTPKSRVTNQSRALLPLRLLQILLLFLVLTLGISVVSIHMIKFLKIQRLDPVAPITLLSTYNHESVTLDSFIRPPSNVWHTMNDSELLWRASIEPQRNGYPFRRVPKLAFMFLAKGPLPFAPLWEKFCKGHEGLYSIYVHSLPSYKSDFSRSSVFYRRYIPSQAVAWGEMSMGEAERRLLANALLDISNEWFVLLSESCIPLRGFSFIYSYVSESRYSFMGAADEEGPDGRGRYRTEMEPEITLSQWRKGSQWFEINRKLAVEIVQDTTYYPKFKEFCRPPCYVDEHYFPTMLSMKHRVLLANRTLTWTDWSRGGAHPATFGKADVTESFLKKLTGAKSCLYNDHQSQICYLFARKFAPSALEPLLQLAPKILELGSNISSTRHSWYLF

SEQ ID NO: 102563 - DNA, 2132 bp, Arabidopsis thaliana
  misc_feature (1)..(2132): Ceres Seq. ID no. 13610714
  misc_feature (1)..(2132): Ortholog of  Ceres SEQ ID NO 13654989 as cited in SEQ ID NO 63117
  misc_feature (1)..(2132): Ortholog of  Ceres SEQ ID NO 13584744 as cited in SEQ ID NO 69137
gagaaatacctcatatacataatcataaacttatatgcatagctttgctaactcaaaaaaaaaacagatcccttctttgcatagtaaggaagatattaatggagagtcatcgtgtgttcgttgccacttttatgctgatacttcatcttgttcaagctcaagatcaacccggattcatcaatgtggattgcggtttactccctcgtgattctccttacaacgcactcggaaccggtttagtatatacatcagatgtcggtttagttagcagtgggaaaactggtaaaatcgccaaggaattcgaagagaacaacagtacaccgaatttgacattgagatactttccagacggagcacgaaactgctacaacttaaacgtgagccgtgacaccaactatatgatcaaggctacattcgtgtatggaaattacgatggtcataaagatgagccgaacttcgacctttacttgggtccaaatttatgggcaacggtaagccgcagtgaaactgttgaggagatcatccatgtgacgaaatccgattcgttacaggtttgtcttgctaagacgggagattttataccttttattaatatcttggagctacgaccattgaagaaaaatgtgtacgttacagaaagtggctcactcaagctcttatttaggaagtattttagtgactcaggtcaaacgataaggtatccagatgatatctatgaccgtgtatggcatgcatccttcctggaaaataattgggcacaagtatcgacgactttgggtgtaaacgttactgataattatgatttatcacaagatgtaatggcaacgggcgcaacacctctaaacgatagtgagacattgaacattacatggaacgtagagcctcctactacaaaggtttactcctacatgcactttgcagagcttgagacactaagggccaacgatacaagggaattcaatgtgatgctgaatggaaatgacttggccttgtcaaataacaatttgaccggagaagtacctgaatttctagctgacttaaaatcaatcatggtcatagacttaagaggcaataacctcagtggcccggttcctgcctcacttcttcagaagaaaggattgatgctacaatcgccgagatcctctgaaccagcaatagtgacgaaaaacaaaaggtttacttactcacaagttgtgataatgacaaataacttccaaagaatccttgggaaaggagggtttggaatcgtttatcatggctttgtgaacggtgttgaacaagtagctgttaagatactctctcattcatcatctcaagggtataaacaattcaaagctgaggtagaacttcttcttagagttcatcacaagaatttggttggtcttgttgggtattgcgacgaaggagagaacatggctcttatctatgaatacatggccaatggagatttaaaagaacatatgtcaggaacaagaaaccgatttattttaaattgggaaactagactaaaaatagtcattgactctgcgcaagggcttgagtatttgcataatggatgcaaaccactaatggtacacagggacgtcaaaactacaaatatattgttaaatgaacactttgaagccaaacttgctgattttgggctttcaaggtcttttccgattggaggtgaaactcatgtgtcaacagttgttgctggaactcctggatatctcgatcctgaatattacaaaacaaatcggttgacagagaagagtgatgtatatagttttgggattgtattgttggagatgatcacaaatcggccagtgatagaccaaagccgtgaaaagccatatatttcagaatgggtggggataatgcttacgaaaggagacatcattagcattatggatccaagtctaaatggagactatgattctggttctgtgtggaaagctgttgaactagcaatgtcttgtctgaatccttcttcaacaagaagacctaccatgtctcaagttcttattgcattaaacgaatgtttggtatctgaaaattcaaggggaggagcgagtagggacatggactcaaagagttccctagaggtaagcttgacatttgatactgatgtgagcccaatggctaggtag

SEQ ID NO: 102564 - protein, 709 aa, Arabidopsis thaliana
  peptide (1)..(709): Ceres Seq. ID no. 13610715
EIPHIHNHKLICIALLTQKKNRSLLCIVRKILMESHRVFVATFMLILHLVQAQDQPGFINVDCGLLPRDSPYNALGTGLVYTSDVGLVSSGKTGKIAKEFEENNSTPNLTLRYFPDGARNCYNLNVSRDTNYMIKATFVYGNYDGHKDEPNFDLYLGPNLWATVSRSETVEEIIHVTKSDSLQVCLAKTGDFIPFINILELRPLKKNVYVTESGSLKLLFRKYFSDSGQTIRYPDDIYDRVWHASFLENNWAQVSTTLGVNVTDNYDLSQDVMATGATPLNDSETLNITWNVEPPTTKVYSYMHFAELETLRANDTREFNVMLNGNDLALSNNNLTGEVPEFLADLKSIMVIDLRGNNLSGPVPASLLQKKGLMLQSPRSSEPAIVTKNKRFTYSQVVIMTNNFQRILGKGGFGIVYHGFVNGVEQVAVKILSHSSSQGYKQFKAEVELLLRVHHKNLVGLVGYCDEGENMALIYEYMANGDLKEHMSGTRNRFILNWETRLKIVIDSAQGLEYLHNGCKPLMVHRDVKTTNILLNEHFEAKLADFGLSRSFPIGGETHVSTVVAGTPGYLDPEYYKTNRLTEKSDVYSFGIVLLEMITNRPVIDQSREKPYISEWVGIMLTKGDIISIMDPSLNGDYDSGSVWKAVELAMSCLNPSSTRRPTMSQVLIALNECLVSENSRGGASRDMDSKSSLEVSLTFDTDVSPMAR

SEQ ID NO: 102565 - protein, 677 aa, Arabidopsis thaliana
  peptide (1)..(677): Ceres Seq. ID no. 13610716
MESHRVFVATFMLILHLVQAQDQPGFINVDCGLLPRDSPYNALGTGLVYTSDVGLVSSGKTGKIAKEFEENNSTPNLTLRYFPDGARNCYNLNVSRDTNYMIKATFVYGNYDGHKDEPNFDLYLGPNLWATVSRSETVEEIIHVTKSDSLQVCLAKTGDFIPFINILELRPLKKNVYVTESGSLKLLFRKYFSDSGQTIRYPDDIYDRVWHASFLENNWAQVSTTLGVNVTDNYDLSQDVMATGATPLNDSETLNITWNVEPPTTKVYSYMHFAELETLRANDTREFNVMLNGNDLALSNNNLTGEVPEFLADLKSIMVIDLRGNNLSGPVPASLLQKKGLMLQSPRSSEPAIVTKNKRFTYSQVVIMTNNFQRILGKGGFGIVYHGFVNGVEQVAVKILSHSSSQGYKQFKAEVELLLRVHHKNLVGLVGYCDEGENMALIYEYMANGDLKEHMSGTRNRFILNWETRLKIVIDSAQGLEYLHNGCKPLMVHRDVKTTNILLNEHFEAKLADFGLSRSFPIGGETHVSTVVAGTPGYLDPEYYKTNRLTEKSDVYSFGIVLLEMITNRPVIDQSREKPYISEWVGIMLTKGDIISIMDPSLNGDYDSGSVWKAVELAMSCLNPSSTRRPTMSQVLIALNECLVSENSRGGASRDMDSKSSLEVSLTFDTDVSPMAR

SEQ ID NO: 102566 - protein, 666 aa, Arabidopsis thaliana
  peptide (1)..(666): Ceres Seq. ID no. 13610717
MLILHLVQAQDQPGFINVDCGLLPRDSPYNALGTGLVYTSDVGLVSSGKTGKIAKEFEENNSTPNLTLRYFPDGARNCYNLNVSRDTNYMIKATFVYGNYDGHKDEPNFDLYLGPNLWATVSRSETVEEIIHVTKSDSLQVCLAKTGDFIPFINILELRPLKKNVYVTESGSLKLLFRKYFSDSGQTIRYPDDIYDRVWHASFLENNWAQVSTTLGVNVTDNYDLSQDVMATGATPLNDSETLNITWNVEPPTTKVYSYMHFAELETLRANDTREFNVMLNGNDLALSNNNLTGEVPEFLADLKSIMVIDLRGNNLSGPVPASLLQKKGLMLQSPRSSEPAIVTKNKRFTYSQVVIMTNNFQRILGKGGFGIVYHGFVNGVEQVAVKILSHSSSQGYKQFKAEVELLLRVHHKNLVGLVGYCDEGENMALIYEYMANGDLKEHMSGTRNRFILNWETRLKIVIDSAQGLEYLHNGCKPLMVHRDVKTTNILLNEHFEAKLADFGLSRSFPIGGETHVSTVVAGTPGYLDPEYYKTNRLTEKSDVYSFGIVLLEMITNRPVIDQSREKPYISEWVGIMLTKGDIISIMDPSLNGDYDSGSVWKAVELAMSCLNPSSTRRPTMSQVLIALNECLVSENSRGGASRDMDSKSSLEVSLTFDTDVSPMAR

SEQ ID NO: 102567 - DNA, 1462 bp, Arabidopsis thaliana
  misc_feature (1)..(1462): Ceres Seq. ID no. 13610718
  misc_feature (1)..(1462): Ortholog of  Ceres SEQ ID NO 13503499 as cited in SEQ ID NO 68684
ataaaatccaacttcttctccttcaagaatctagagatagagagagagagagaacacaaagtgggaaaaaagataagaacccaccataaagttttaacatttttcccttcaaaaggcgaaagcttttgatttgtataaaagtcccacttaatcacctctctagcttctcattccatttccatctcctctcttttgttttctaagttgcttcaagagttttggatagtgtagcagagagattttaactaatgggtttataaaattttgttcttttgcgtgaacaagttgtcaacttctagacagattttctttttgaagtgttttcttgtcgaaattcttcttcttttggtcaaagaacgcaagattcttctgtagttcctctaaaaaaaatcctaatggagggttattcaagaaacggtgaaatctctccgaagctgcttgacttgatgattccacaagagagaagaaattggtttcacgatgagaaaaactctgttttcaaaacagaggagaagaagcttgagctaaagcttggaccacctggtgaagaagatgatgatgaatcgatgataagacacatgaagaaagaaccaaaagacaaatctatcctctctctcgctggcaaatacttctctccttcttccaccaaaaccacatcccataaaagaactgctcctggtccagtggtgggatggcctccggttcgatccttcaggaagaatttagctagtggaagttcttcaaagcttggaaatgactcaaccacctccaatggtgttaccctcaagaaccaaaagtgtgatgctgctgctaagacaacagaaccaaagagacaaggaggcatgtttgtgaagatcaacatgtatggtgttcccattggtcgtaaagttgatctcagtgctcataatagctatgagcagttatctttcacagttgacaagctcttcagaggtcttcttgcagctcaaagagactttccatcatccatagaagatgaaaaaccaatcactggattattagatgggaatggagaatatactcttacatatgaagacaatgaaggagacaagatgcttgtaggagatgttccatggcaaatgtttgtgtcttcggtgaagaggctgcgtgtgattaaaacttctgagatttcttcagcattaacatatggaaatggtaagcaagagaaaatgagaagatgaagaaaaagatcttttacagcttttaaagaagtagagagatgttattaattgcattttgcctttaaactttgatgagtttttggtcttggaaaagtttctgatataagtctgatgtacattctggtttgttacatcttcttttggcttttgagatatcatagagttttgttggaactcaaagaccaaacagtgcaatgatgattttggggtcttgagtaaatttacaaacccttttaggcatattataatagtcttctgttttt

SEQ ID NO: 102568 - protein, 267 aa, Arabidopsis thaliana; identical to SEQ ID NO: 39751
  peptide (1)..(267): Ceres Seq. ID no. 13610719

SEQ ID NO: 102569 - protein, 250 aa, Arabidopsis thaliana; identical to SEQ ID NO: 39752
  peptide (1)..(250): Ceres Seq. ID no. 13610720

SEQ ID NO: 102570 - protein, 210 aa, Arabidopsis thaliana; identical to SEQ ID NO: 39753
  peptide (1)..(210): Ceres Seq. ID no. 13610721

SEQ ID NO: 102571 - DNA, 1885 bp, Arabidopsis thaliana
  misc_feature (1)..(1885): Ceres Seq. ID no. 13610722
  misc_feature (1)..(1885): Ortholog of  Ceres SEQ ID NO 14314585 as cited in SEQ ID NO 59345
gtaaataaactgagaaaaagcctccgtctcctcctctctctctattcatcagcctcaacctctctttcgtcgtcgactcagtttccgatttagggttacccaatcttcgccatgtatcgcacggcagcttcacgagccagggctcttaagggagttcttactcgtagtttgagaccagcgcgttatgctagttctagtgctgttgcggagacgagttcgtcaacgccggcttacttgagctggttgagtggtgggtctcgtgctgcgcttacttcattggatatgcctctacaaggtgtttctcttcctccgccgcttgctgataaagtcgagccgagcaaacttcagatcactactcttccaaatggtcttaagatagcctcagagacgactccgaatccggcagcttcgattggtttatatgttgattgcggttctatttatgaggcgccttatttccatggagctacacatttgcttgaaagaatggctttcaagagcacgttgaacagaactcattttcgtcttgtgagggaaattgaggctattggaggcaacacatccgcttctgcgtctcgagagcaaatgagttacactattgatgctcttaagacctatgtccctgaaatggttgaagttcttattgacagtgttagaaaccctgctttcttggactgggaagtgaatgaagagctacggaagatgaaggtagagatagcggaacttgcaaagaaccctatgggtttcctcttggaggccattcattctgctggttactctggtccattggcaagtcctctgtacgcaccggagtctgctttagatagattgaatggggagctcttggaagagtttatgactgagaatttcactgctgcacggatggtattggcggcaagtggagtagaacatgaggaacttttaaaagttgctgagccattaacttctgaccttcctaatgtaccaccccaattggctccaaaatctcagtatgtcggtggagattttcgccaacatactggtggagaggctacacactttgcggttgctttcgaggtgcctggctggaataacgagaaagaagcagtcaccgccactgttctccagatgcttatgggaggaggtggctcattctctgcgggaggtcctggaaaaggaatgcactcgtggctttatcgccgtgttctaaacgaatatcaggaggttcagtcatgcactgcattcactagcatctttaacgacaccgggttgtttggaatctatggttgctcgagtcctcaattcgctgcaaaagcaattgaattagcagctaaagaactcaaagatgttgcaggaggaaaagttaaccaggcacatcttgatcgtgccaaggcagccacaaaatctgcagttctgatgaatttggaatctcggatgattgcagcagaagacattggtagacagatacttacatacggagagaggaaaccagttgatcaattcttgaagtcagtagaccaactaaccttgaaagacattgcagacttcaccagcaaggttatttcaaagcctttgacaatgggttcctttggagatgtgttggctgttccgagctatgacacaataagcagcaaatttcgttgaagcaaaacaaacaatttgccaaatcaacaatattttgggacttgtaaaataaagaagatcttggggagaagaagacccaaccaattttaattttaatttttttttttacaattacagtttcgtatttttatgaaatggattttgtttccatcgacagatataaatgactggattttgtccggtttgtctctccaattttcaggagtatttgtattccaataaataatcttttactacgtgtaatgcaaacaacttcagtggt

SEQ ID NO: 102572 - protein, 503 aa, Arabidopsis thaliana; identical to SEQ ID NO: 27376
  peptide (1)..(503): Ceres Seq. ID no. 13610723

SEQ ID NO: 102573 - protein, 446 aa, Arabidopsis thaliana; identical to SEQ ID NO: 27377
  peptide (1)..(446): Ceres Seq. ID no. 13610724

SEQ ID NO: 102574 - protein, 378 aa, Arabidopsis thaliana; identical to SEQ ID NO: 27378
  peptide (1)..(378): Ceres Seq. ID no. 13610725

SEQ ID NO: 102575 - DNA, 1176 bp, Arabidopsis thaliana
  misc_feature (1)..(1176): Ceres Seq. ID no. 13610726
  misc_feature (1)..(1176): Ortholog of  Ceres SEQ ID NO 12593170 as cited in SEQ ID NO 63263
  misc_feature (1)..(1176): Ortholog of  Ceres SEQ ID NO 14301882 as cited in SEQ ID NO 64381
  misc_feature (1)..(1176): Ortholog of  Ceres SEQ ID NO 13597851 as cited in SEQ ID NO 64869
  misc_feature (1)..(1176): Ortholog of  Ceres SEQ ID NO 13662420 as cited in SEQ ID NO 68680
gtcttcaacgttcggctaatccttggtccgtgctaagatcttagatcgatttctaaagtcttcgtcttcttcttcttctgataactagctttttcaatcttctgaagctttaattttttcatacccatggctaatcgttatgatccaaatcctttcgctgaggaagaagaagtcaatcctttcgctaatgctagaggagttccacctgcgtcgaattcgagactttcgcctttgcctccagagcctgttggtttcgattatggtcgaaccgtagacattcctcttgacagagctggtacacaggatttgaagaagaaagagaaggaactccaagccaaagaagctgagctaaaacgacgagagcaggacctcaaacggaaagaagatgctgctgcacgagctggaatcgttattgaagtgaaaaactggccgcctttcttcccacttatccaccatgacatcgcaaacgaaattccggttcatctccaaagactacagtatgttacctttgcaacgtatttggggttggttctttgtcttttctggaatatcatcgccgttactacagcttggatcaaaggagaaggagtgacgatatggcttcttgccttaatttacttcatagcgggtgttccaggaggctatgtgttatggtatcgaccactctaccgtgccttcagaactgatagtgcattgagctttggatggtttttcttgttctatatgctccacattgctttctgcgtctttgctgcagttgctccacctgtcgtcttcaaaggaaaatctcttgctgggatcttacctgcaatagatgtcttaagtggtcaagcaattgttgggatattctacttcattgggtttgcatttttctgcctcgaatcagtggttagcatctgggttattcagcaagtgtatatgtacttccgaggcagcgggaaacaagatcaaatgagacgggaagcagcgagaggagccttgagagccgctgtttgagagttctccttgtaacattctggtttgtgtatgcactgtttcttttttcagattttcttgaagtctctctctctctctctctctctctctgctctataaacaaaaaaaaaaagatttaatttttcctttgtacctttatgtcatgtaaatttgtttgttcaaaaatcagagttcagattc

SEQ ID NO: 102576 - protein, 289 aa, Arabidopsis thaliana; identical to SEQ ID NO: 36309
  peptide (1)..(289): Ceres Seq. ID no. 13610727

SEQ ID NO: 102577 - DNA, 2743 bp, Arabidopsis thaliana
  misc_feature (1)..(2743): Ceres Seq. ID no. 13610731
  misc_feature (1)..(2743): Ortholog of  Ceres SEQ ID NO 13582534 as cited in SEQ ID NO 57409
  misc_feature (1)..(2743): Ortholog of  Ceres SEQ ID NO 14302384 as cited in SEQ ID NO 67177
atttaattatctcaggatacgttaacataaaagtttttttttctcttggtctcaatgctcactctatccccatgaagttttgctcatactcaagttatcttgcagagaaatagaaaaaagatgggtatggttttatttgcttgcttgcttttactaatcatattcccaacttgtggctatgcagctataaacacatcaagtcctttgtcaataagacaaactctgagttctcctggtggattttatgagttaggcttcttcagtcctaataatactcagaatcagtatgtcgggatctggttcaagaagattgttcctcgtgtagttgtgtgggtggctaacagagatacgccagttactagctctgcagcaaatctcactatcagcagcaatgggagcctgatcttgcttgatgggaaacaagatgttatttggtcaacaggaaaagctttcacatccaacaaatgtcatgcggagctcttagataccggaaattttgttgtaattgatgatgtttcagggaataaattatggcaaagcttcgagcatcttggtaatactatgctgcctcagtcatcattgatgtatgatacttctaatggcaagaagcgtgtgttgactacatggaaaagtaacagcgatccttcgcctggggagttctcactggagattacaccacaaatccccacacaaggccttataagaagaggctcagtaccttactggagatgtggtccttgggcaaaaacaagattctctgggatatctggaattgatgcatcatatgtaagtccattcagcgttgtccaggatacagcagccggcacaggatctttctcttattccacattaagaaactataatctctcatatgttacgctaacaccagaagggaaaatgaagatcctctgggatgatggaaataattggaagcttcacttgtctctcccagagaacccatgtgatctatatggtagatgcgggccttatggtttgtgtgtgagatctgatcccccaaagtgtgaatgcttgaaagggtttgtaccaaagtctgatgaggagtggggaaaaggaaactggacaagtgggtgtgtgagacgtacaaaattatcttgccaagcaaaatcttctatgaaaacacaaggcaaagacacagacatcttctatcgtatgacagatgtaaagactccggatctgcaccaatttgcaagctttctcaatgccgaacagtgctatcaaggttgtctaggcaactgttcttgcacagccttcgcctatattagtggaattggatgtttggtatggaatggggagctagcagacaccgttcaatttttgtctagcggagagtttctcttcattcgtcttgcaagttcagaattggctggaagcagtcgaaggaagattatcgtaggcactactgtcagcctttccattttcttgatcttggtatttgctgcaattatgttgtggagatacagagcgaaacaaaatgatgcatggaagaatggttttgaacgacaagatgtctccggcgtcaatttctttgagatgcatacaatacgaactgccaccaataacttcagtccttcaaataaacttggtcaaggtggatttggtccagtttacaagggaaagttggtagatgggaaggaaataggtgttaaacgccttgctagtagttccggtcagggtacagaggagttcatgaatgaaataacactgatctcaaaattgcaacacagaaacttggttcggcttttgggatactgcatcgacggagaagagaagctactgatctatgagttcatggtgaacaaaagtctcgatatttttatatttgatccatgtctaaagtttgagcttgattggccaaagagatttaatatcattcaaggtattgcgcgtggacttctctatctccaccgtgactcacgcctcagagttattcaccgagacctgaaggtcagcaatattcttctggacgacagaatgaatccaaaaatatcagattttggattggctcggatgttccagggaacccaatatcaagacaacactcgcagagttgtaggaactctaggatatatgtctcccgagtatgcatgggcaggattgttctctgagaagtctgatatctatagcttcggagttctgatgttagaaatcatcagcggaaagagaatttcacggttcatctatggtgatgaaagcaaaggccttcttgcttatacatgggattcttggtgcgagaccgggggatcaaatctacttgacagagatcttactgatacatgccaagcattcgaagttgcgagatgtgttcagattggtctgctctgtgttcaacacgaagccgtcgacagacccaacactcttcaagtactatccatgcttacttcagcaacagatcttccagtaccaaaacagccaatatttgcagtgcatactctaaacgatatgccaatgttacaggctaattctcaagatttcttatctgtaaatgagatgacagaatctatgatccaaggaaggtaagcctaaggatcttgttatctcactacagaagtagtagtatatacttgtaaattcatgaacatttaaagcttaagattttgatatctcactctattttcttaagcatgtgatctcataaagccccaatattgcgttgacacgtcatcattttcggtataatattgttattaagcgtcgcaaagataaaaatatgctttttgatgac

SEQ ID NO: 102578 - protein, 805 aa, Arabidopsis thaliana; identical to SEQ ID NO: 29256
  peptide (1)..(805): Ceres Seq. ID no. 13610732

SEQ ID NO: 102579 - protein, 803 aa, Arabidopsis thaliana; identical to SEQ ID NO: 29257
  peptide (1)..(803): Ceres Seq. ID no. 13610733

SEQ ID NO: 102580 - protein, 658 aa, Arabidopsis thaliana; identical to SEQ ID NO: 29258
  peptide (1)..(658): Ceres Seq. ID no. 13610734

SEQ ID NO: 102581 - DNA, 1122 bp, Arabidopsis thaliana
  misc_feature (1)..(1122): Ceres Seq. ID no. 13610735
  misc_feature (1)..(1122): Ortholog of  Ceres SEQ ID NO 13600601 as cited in SEQ ID NO 497
  misc_feature (1)..(1122): Ortholog of  Ceres SEQ ID NO 13664283 as cited in SEQ ID NO 61283
  misc_feature (1)..(1122): Ortholog of  Ceres SEQ ID NO 12635513 as cited in SEQ ID NO 0
  misc_feature (1)..(1122): Ortholog of  Ceres SEQ ID NO 15179333 as cited in SEQ ID NO 0
aaaaccagttgggctatttgaaagccacaagtacttggaacctttgtttcttctaccctaacatagcccttgcaaaccataaccaaaccatcatcatcatcatctcttggtgacagaagaaaagagttgaggaacagagaaaatggcagcacaagcacttgtgtcttcttcacttacctcctctgttcagacagctagacagatatttggctcaaaaccagttgcgtctgcctcacagaagaagagttcctttgttgttaaagctgctgcaactccacctgtcaagcaaggagccaacagaccattgtggtttgcttcatcgcagagtctctcttacttggatggcagcttacctggtgactatggattcgaccctcttggtctttcagacccagaaggtactggaggattcattgagccaagatggctagcatacggagagatcatcaacggacggttcgccatgttgggtgcagctggagctattgctcctgagattttaggaaaggctggtctgattccagcagagactgctcttccttggttccaaaccggtgtgattccaccagcagggacatacacttactgggcagacaattacacactctttgttctcgagatggctctgatgggattcgctgagcaccggaggttacaggactggtacaacccaggatctatgggaaaacagtacttcttggggttagagaagggtttggccggttcaggtaacccggcttaccccggtggacctttcttcaaccctcttgggtttgggaaagatgagaagtcactgaaggagttgaaactcaaggaggtcaagaacggtagactggctatgctcgccatcctcggttactttatccaaggactagtgaccggtgtgggaccttatcagaacctgcttgatcacttggctgatcccgtcaacaacaacgtcttgaccagcctcaagttccactgaggtgatcatcatctcatgtgtttttatgtctcttgtatcgtacaatatttccatctttcgctaccattggcttcttcgtattgtaacaccctgtgtaaacatattcgtgttttgtaagaaatgacaatgtcaatggccaaacgaaaaaacttttagga

SEQ ID NO: 102582 - protein, 273 aa, Arabidopsis thaliana; identical to SEQ ID NO: 21964
  peptide (1)..(273): Ceres Seq. ID no. 13610736

SEQ ID NO: 102583 - protein, 166 aa, Arabidopsis thaliana; identical to SEQ ID NO: 21965
  peptide (1)..(166): Ceres Seq. ID no. 13610737

SEQ ID NO: 102584 - DNA, 1231 bp, Arabidopsis thaliana
  misc_feature (1)..(1231): Ceres Seq. ID no. 13610746
  misc_feature (1)..(1231): Ortholog of  Ceres SEQ ID NO 15225069 as cited in SEQ ID NO 68012
  misc_feature (1)..(1231): Ortholog of  Ceres SEQ ID NO 15179217 as cited in SEQ ID NO 0
aattccccaatttctccaatctgagaaaatagggtttccgatttggatccttaattcagacacctgactcgtcttctcatcctacccccaattcaatattcgtcgccaatatgccgcaaagacactcgaagaacaacaatgatcttgcgtatttcacttacgacgagaagaagaagttaggttatggaactcagagagagagattggggagagactcgatcaaaccctttgatgcttgttctctctgcttgaagcctttcattgatccgatgtgttgccataagggtcatgtcttttgcagagagtgtatacttgaatgtttccttgctcagaagaaagatatccaaaggaggcttgctgcacattcgtctcaaaagaagcaagataaggatgaagaagaagagaggctaatgttacaaaaggcgagagagctcgacgaatttgatcagcaaaaccatagtgcaatgcctcgaaacagtgacaagaatcacaacgaagataagaatggttttcatggggcaaacagtgtgaagacgacttcctttgaagaagaagcgcttaggacaatgaaagccttctggctcccatcagctacaccagcagcttcggtcagagtagatgctccagaaactcacacagtctgtccagagggcaaagagaagctcaagcttaagaacctctttgcaattcgtttcacagaagacaacagcgaagaggaagagaccaagacaaaatcagcatcttcaagctcttatgataaatcctacatctgcccgagctgcaaagtcactctcaccaacacaatgtccctcgtggcacttagctcatgcggacatgttttctgcaagaagtgtgctgagaagtttatgcccgtcgacaaagtctgtcttgtgtgtgacaaaccttgcaaggataggaacttggttgggttaaagaaaggaggcacgggtttcgctgagcacgacgatcatcttgaggctaaggagtacaagcatttgggtagtggatctggtttggggcttgtgaggccggttaagacatgatgtaaccacatcaaatgttctgttccagttacagaaaatatccttgattttgtaatacttatggcttgtatcctttgctacaactaagagacgctgctttctccattttggctcttggtttgtccttttgatcggatcctatttgtgtttcttccctacggagatcaaatggaaatttaacatttaag

SEQ ID NO: 102585 - protein, 310 aa, Arabidopsis thaliana
  peptide (1)..(310): Ceres Seq. ID no. 13610747
MPQRHSKNNNDLAYFTYDEKKKLGYGTQRERLGRDSIKPFDACSLCLKPFIDPMCCHKGHVFCRECILECFLAQKKDIQRRLAAHSSQKKQDKDEEEERLMLQKARELDEFDQQNHSAMPRNSDKNHNEDKNGFHGANSVKTTSFEEEALRTMKAFWLPSATPAASVRVDAPETHTVCPEGKEKLKLKNLFAIRFTEDNSEEEETKTKSASSSSYDKSYICPSCKVTLTNTMSLVALSSCGHVFCKKCAEKFMPVDKVCLVCDKPCKDRNLVGLKKGGTGFAEHDDHLEAKEYKHLGSGSGLGLVRPVKT

SEQ ID NO: 102586 - protein, 257 aa, Arabidopsis thaliana
  peptide (1)..(257): Ceres Seq. ID no. 13610748
MCCHKGHVFCRECILECFLAQKKDIQRRLAAHSSQKKQDKDEEEERLMLQKARELDEFDQQNHSAMPRNSDKNHNEDKNGFHGANSVKTTSFEEEALRTMKAFWLPSATPAASVRVDAPETHTVCPEGKEKLKLKNLFAIRFTEDNSEEEETKTKSASSSSYDKSYICPSCKVTLTNTMSLVALSSCGHVFCKKCAEKFMPVDKVCLVCDKPCKDRNLVGLKKGGTGFAEHDDHLEAKEYKHLGSGSGLGLVRPVKT

SEQ ID NO: 102587 - protein, 210 aa, Arabidopsis thaliana
  peptide (1)..(210): Ceres Seq. ID no. 13610749
MLQKARELDEFDQQNHSAMPRNSDKNHNEDKNGFHGANSVKTTSFEEEALRTMKAFWLPSATPAASVRVDAPETHTVCPEGKEKLKLKNLFAIRFTEDNSEEEETKTKSASSSSYDKSYICPSCKVTLTNTMSLVALSSCGHVFCKKCAEKFMPVDKVCLVCDKPCKDRNLVGLKKGGTGFAEHDDHLEAKEYKHLGSGSGLGLVRPVKT

SEQ ID NO: 102588 - DNA, 1612 bp, Arabidopsis thaliana
  misc_feature (1)..(1612): Ceres Seq. ID no. 13610754
  misc_feature (1)..(1612): Ortholog of  Ceres SEQ ID NO 13655660 as cited in SEQ ID NO 63727
agtctccgtcttcttcttcatttcacagtcatcttcttcatctaaaaccctaagaaaacaacaatggcgttactctctcgaatccgttcatcaacatctctcttccgtcacctcaacgcatcaccacaaatccgatcactctcctcggcttcaacaatcctctcaccagattcaaaaactcctctcacaagcaaagaaaaaagcaaagcagctctctctcttctcaaatccgagaaagatccagatcgtatcctcgaaatctgccgtgcagcttctcttactccagattgccgcatagatcgaatcgctttctccgccgccgtcgagaatctcgccgagaagaaacatttctccgctgtatcgaatctcctcgacggattcatcgaaaacagaccagatctcaaatcggaacgttttgctgctcacgccattgttttgtatgctcaagctaatatgcttgatcactctttaagagtttttcgtgatctcgagaaattcgaaatctctcgtacggtgaagtctttaaacgcgcttctctttgcttgtttagtagctaaggattacaaagaagctaaaagagtttacattgagatgcctaagatgtatggaattgaacctgatctcgagacttataatcgtatgatcaaagtgttttgtgaatccggttcagcgagttcgtcgtactccattgttgcggagatggagaggaaagggataaagccgaatagttcaagctttggtttgatgatttctgggttttatgcagaggataagagtgatgaagtagggaaagtgttggcgatgatgaaagatcgtggtgttaatatcggtgtttcgacttataacattaggattcagagtttgtgtaagaggaagaaatctaaggaagcgaaggctttgcttgatgggatgttatctgcagggatgaaaccgaatacggtaacgtatagccatttgattcacgggttttgtaatgaagatgatttcgaggaagcgaagaagttgtttaagattatggtgaacagaggatgtaagcctgatagtgagtgttacttcactcttatatattacttatgcaaaggaggagactttgagacggctttgagtctttgtaaagagagtatggagaagaattgggttccgagttttagtatcatgaagtcgcttgttaacggactagctaaggattcgaaagtcgaagaagcaaaggagcttattgggcaagtgaaagagaagttcactagaaacgttgagttgtggaacgaagtcgaagccgcattaccgcaatgaatcaaaagatagttcccgagatcggtattttcaaaattttacgaattttctctcttcatttgtcagcaatgaaataagtttatatcttcttagaagatagtaatcttttgctcatcatggtagctatagattaatggtttatcttgttagtttttggatttggaatcagagagatgttgagcagtttatctgtaagatttggtcaaagcattgtagcaatgttaagtgtcttcctatgtttatattatatagtatgatgactatataatatagaaagaagtttaatgtttacatgcttaccacgaactaatgtgttttggag

SEQ ID NO: 102589 - protein, 408 aa, Arabidopsis thaliana
  peptide (1)..(408): Ceres Seq. ID no. 13610755
MALLSRIRSSTSLFRHLNASPQIRSLSSASTILSPDSKTPLTSKEKSKAALSLLKSEKDPDRILEICRAASLTPDCRIDRIAFSAAVENLAEKKHFSAVSNLLDGFIENRPDLKSERFAAHAIVLYAQANMLDHSLRVFRDLEKFEISRTVKSLNALLFACLVAKDYKEAKRVYIEMPKMYGIEPDLETYNRMIKVFCESGSASSSYSIVAEMERKGIKPNSSSFGLMISGFYAEDKSDEVGKVLAMMKDRGVNIGVSTYNIRIQSLCKRKKSKEAKALLDGMLSAGMKPNTVTYSHLIHGFCNEDDFEEAKKLFKIMVNRGCKPDSECYFTLIYYLCKGGDFETALSLCKESMEKNWVPSFSIMKSLVNGLAKDSKVEEAKELIGQVKEKFTRNVELWNEVEAALPQ

SEQ ID NO: 102590 - protein, 278 aa, Arabidopsis thaliana
  peptide (1)..(278): Ceres Seq. ID no. 13610756
MLDHSLRVFRDLEKFEISRTVKSLNALLFACLVAKDYKEAKRVYIEMPKMYGIEPDLETYNRMIKVFCESGSASSSYSIVAEMERKGIKPNSSSFGLMISGFYAEDKSDEVGKVLAMMKDRGVNIGVSTYNIRIQSLCKRKKSKEAKALLDGMLSAGMKPNTVTYSHLIHGFCNEDDFEEAKKLFKIMVNRGCKPDSECYFTLIYYLCKGGDFETALSLCKESMEKNWVPSFSIMKSLVNGLAKDSKVEEAKELIGQVKEKFTRNVELWNEVEAALPQ

SEQ ID NO: 102591 - protein, 232 aa, Arabidopsis thaliana
  peptide (1)..(232): Ceres Seq. ID no. 13610757
MPKMYGIEPDLETYNRMIKVFCESGSASSSYSIVAEMERKGIKPNSSSFGLMISGFYAEDKSDEVGKVLAMMKDRGVNIGVSTYNIRIQSLCKRKKSKEAKALLDGMLSAGMKPNTVTYSHLIHGFCNEDDFEEAKKLFKIMVNRGCKPDSECYFTLIYYLCKGGDFETALSLCKESMEKNWVPSFSIMKSLVNGLAKDSKVEEAKELIGQVKEKFTRNVELWNEVEAALPQ

SEQ ID NO: 102592 - DNA, 626 bp, Arabidopsis thaliana
  misc_feature (1)..(626): Ceres Seq. ID no. 13610762
  misc_feature (1)..(626): Ortholog of  Ceres SEQ ID NO 13600689 as cited in SEQ ID NO 0
  misc_feature (1)..(626): Ortholog of  Ceres SEQ ID NO 15178120 as cited in SEQ ID NO 0
gttttcagtttcgtgcatagattaggaatctcgaaaccctaattctgttttctacacgaaacccatcaaaatcgaattttgatcgtttctaatttctgccatttgattctcttcatcagtcacatttaggggaaacgagaagccctaatctttgattctttaatcgccatggctaatagctctttcaagttggaacacccactagagaggagacaaattgaatcttctcgcatcagggagaagtatccagacagaattccagtgatcgtagagagagctgaaagaagtgatgttcccaatatcgacaagaagaagtaccttgttccagctgatctaactgttgggcaatttgtgtatgttgtccgtaaaagaatcaagctgagtgccgaaaaggctatcttcgtctttgtgaagaacacattgcctccaactgctgcaatgatgtctgcaatctatgatgagaacaaagacgaagatgggtttctctacatgacttacagtggagagaacacctttggtttggtttaaatgtgtgccttccaatgcttttgtgctgatgtgtatattatatgctcttttataacactatgaatatgcaaaagttatatgtactactattaatgtaa

SEQ ID NO: 102593 - protein, 119 aa, Arabidopsis thaliana; identical to SEQ ID NO: 30805
  peptide (1)..(119): Ceres Seq. ID no. 13610763

SEQ ID NO: 102594 - DNA, 1289 bp, Arabidopsis thaliana
  misc_feature (1)..(1289): Ceres Seq. ID no. 13610775
  misc_feature (1)..(1289): Ortholog of  Ceres SEQ ID NO 15173355 as cited in SEQ ID NO 61844
tacgtctctcacatgtcaaatccttacgatttcgatttctcctgaaaatctcaatttcaacaaaacccttaagatttttcgattttggattcccaattctcccggagttctgatgcagatcgccggagataagtaatctcgagtttactaatgccgcggcttccgtcgtctcgtcgcggtgtcgtgtggtttcgatggaagatactcatcactatctccaccgcattatgcatcctcgctctcttctgtatcaaccgtcagtctaattccactgcgacgacgacgacactgtcttcgtctctctccgtcgcgagatctcgtatccctctcgttaaatactccggcgatcgtcccaaactcgccttccttttcctcgctcgacgtgatttgccacttgattttctctgggacagattcttcaagagtgcagatcagaggaatttctcaatctatgtacattcaatacctggtttcgtattcgatgaatcatccacaagatcacatttcttctacaatcgtcaattgaagaatagcattgaggtagtttggggagaatcaagcatgattgcagcagaaagattgttgcttgcatctgctttggaagatccttctaatcaaagatttgttcttttgtctgatagctgtgttccgttatacgactttggttacatttacagatatctagtttcttcaccaaagagttttgtagacagcttccttgataaagataatcgctacactatgaaaatgtttcctgttatacggaaagaaaaatggcgaaaaggatctcagtggatatcattgatcagaagccatgcagaggtcattgttaatgatgatactgtgttccctgtttttcagaaattttgcaagcgatctctacctctggatcccagaaagaattggctatatcttaaaaagaggcgacacaactgtatccctgatgaacactacgtgcaaactctactaacaatgcgtggcttggaaaatgaaatggaacggagaacagtgacatacaccacatggaacctatcagcaaaaaaagctgaagctaaatcttggcatcctctcactttcacatctgacaattgcggaccagaggaaatagaaggaataaagaaaatcaaccatgtatattatgaatcggagtatcgaacagaatggtgcagagcgaattcaaaacccgtcccgtgctttctgtttgcgaggaagttcactagaggagccgcaatgcgtcttttgagtgaaggattaatagaatcctctatagatacaacaaccttttagat

SEQ ID NO: 102595 - protein, 378 aa, Arabidopsis thaliana
  peptide (1)..(378): Ceres Seq. ID no. 13610776
MPRLPSSRRGVVWFRWKILITISTALCILALFCINRQSNSTATTTTLSSSLSVARSRIPLVKYSGDRPKLAFLFLARRDLPLDFLWDRFFKSADQRNFSIYVHSIPGFVFDESSTRSHFFYNRQLKNSIEVVWGESSMIAAERLLLASALEDPSNQRFVLLSDSCVPLYDFGYIYRYLVSSPKSFVDSFLDKDNRYTMKMFPVIRKEKWRKGSQWISLIRSHAEVIVNDDTVFPVFQKFCKRSLPLDPRKNWLYLKKRRHNCIPDEHYVQTLLTMRGLENEMERRTVTYTTWNLSAKKAEAKSWHPLTFTSDNCGPEEIEGIKKINHVYYESEYRTEWCRANSKPVPCFLFARKFTRGAAMRLLSEGLIESSIDTTTF

SEQ ID NO: 102596 - protein, 241 aa, Arabidopsis thaliana
  peptide (1)..(241): Ceres Seq. ID no. 13610777
MIAAERLLLASALEDPSNQRFVLLSDSCVPLYDFGYIYRYLVSSPKSFVDSFLDKDNRYTMKMFPVIRKEKWRKGSQWISLIRSHAEVIVNDDTVFPVFQKFCKRSLPLDPRKNWLYLKKRRHNCIPDEHYVQTLLTMRGLENEMERRTVTYTTWNLSAKKAEAKSWHPLTFTSDNCGPEEIEGIKKINHVYYESEYRTEWCRANSKPVPCFLFARKFTRGAAMRLLSEGLIESSIDTTTF

SEQ ID NO: 102597 - DNA, 1039 bp, Arabidopsis thaliana
  misc_feature (1)..(1039): Ceres Seq. ID no. 13610778
  misc_feature (1)..(1039): Ortholog of  Ceres SEQ ID NO 14311878 as cited in SEQ ID NO 51611
gtgtatcgtcaaaaagattttatcaaaaggacaaaagaaagagatggttgagattcagggaagattcaaaagaattgagtcggctttcaacgtagccgcggctcgtgtacatccaccgtgtgataacagtagcggaagcgatcattcgccggatctttccgatttggtcgcatcttttatagagaaagagggacaaatagtattacgtgaagaagaagaaacttcttccgacgataacaatttggaagatgtgaatgagaggttacggaagcttctagaaggtttatcctgtggcgaagagcggatgagaatactgtcagcgacgatggaggttgctggaacgttcgtcggagatattagttcttctaagcgtcacttaatggcgtttctacgtaacaagggttttgatgcaggtctttgcaagtcgagttgggaaagattcggcaaaaacaccggcggaaaatacgagtacgtcgacgttcgttgtggcggagattataataatcggtatttcgtcgagacaaaccttgccggagagtttgagatagctagaccaacgaaaaggtacctctcaatactaagccaagtgccacgcgtcttcgtgggaacttcagaggaactgaaactgctcgtgagaatcatgtgccatgagatgagacggtcgatgaagcacgtagggatccacgtgccaccgtggaggagaaacggttacatgcaagctaagtggttcggtttctataaacgaacttcgacgaccaataactacgaaatggttaatacttatgatacgactgcgtttaagggttgcaaggaagagttttgggaagctaaaggtcttaaggttatggttggtcagctttcgattgctttcaacattagtgcggttgaagtgtaataataatcagaaaacaaaagagggatccttttccagtttgagctaatatgtaagctaattcttgggttttgtttgtaaatactaaaatagtgaaatttttgttgatttagttacgcagattaatacgtaaaatgtattttaaat

SEQ ID NO: 102598 - protein, 297 aa, Arabidopsis thaliana
  peptide (1)..(297): Ceres Seq. ID no. 13610779
CIVKKILSKGQKKEMVEIQGRFKRIESAFNVAAARVHPPCDNSSGSDHSPDLSDLVASFIEKEGQIVLREEEETSSDDNNLEDVNERLRKLLEGLSCGEERMRILSATMEVAGTFVGDISSSKRHLMAFLRNKGFDAGLCKSSWERFGKNTGGKYEYVDVRCGGDYNNRYFVETNLAGEFEIARPTKRYLSILSQVPRVFVGTSEELKLLVRIMCHEMRRSMKHVGIHVPPWRRNGYMQAKWFGFYKRTSTTNNYEMVNTYDTTAFKGCKEEFWEAKGLKVMVGQLSIAFNISAVEV

SEQ ID NO: 102599 - protein, 283 aa, Arabidopsis thaliana
  peptide (1)..(283): Ceres Seq. ID no. 13610780
MVEIQGRFKRIESAFNVAAARVHPPCDNSSGSDHSPDLSDLVASFIEKEGQIVLREEEETSSDDNNLEDVNERLRKLLEGLSCGEERMRILSATMEVAGTFVGDISSSKRHLMAFLRNKGFDAGLCKSSWERFGKNTGGKYEYVDVRCGGDYNNRYFVETNLAGEFEIARPTKRYLSILSQVPRVFVGTSEELKLLVRIMCHEMRRSMKHVGIHVPPWRRNGYMQAKWFGFYKRTSTTNNYEMVNTYDTTAFKGCKEEFWEAKGLKVMVGQLSIAFNISAVEV

SEQ ID NO: 102600 - protein, 196 aa, Arabidopsis thaliana
  peptide (1)..(196): Ceres Seq. ID no. 13610781
MRILSATMEVAGTFVGDISSSKRHLMAFLRNKGFDAGLCKSSWERFGKNTGGKYEYVDVRCGGDYNNRYFVETNLAGEFEIARPTKRYLSILSQVPRVFVGTSEELKLLVRIMCHEMRRSMKHVGIHVPPWRRNGYMQAKWFGFYKRTSTTNNYEMVNTYDTTAFKGCKEEFWEAKGLKVMVGQLSIAFNISAVEV

SEQ ID NO: 102601 - DNA, 1839 bp, Arabidopsis thaliana
  misc_feature (1)..(1839): Ceres Seq. ID no. 13610782
  misc_feature (1)..(1839): Ortholog of  Ceres SEQ ID NO 14313897 as cited in SEQ ID NO 59695
  misc_feature (1)..(1839): Ortholog of  Ceres SEQ ID NO 13660049 as cited in SEQ ID NO 67010
gaaaggggaaaaaaaaaaaaaacagattcctgatattttctgcttcgcttcgctttgctttggcctttgggtttgctttgccttttatctccacaataataatattcgttaacctctcctcgttctcgtcgctgtttcttcccgatctttgctatagttctggattcaaaatctttcttccccaatagatgtttgtctcttaatttttgatttttctgcaaaatcaaatttttaagagctatggaggaagagaatgttactagttcaccttcaacaccggtacataggcttaggcatcgaagacgttctaatgaggttgttacggatggggataaagtgaatgcaagtcctttgttggttaatgatcggaataagtacaaatctttcatggtccggacctactctacgttatggatgattggtggttttgttttggttgtctacatgggtcatctttatatcacagctatggttgttgttattcaaatatttatggctaaagagttgtttaatctgctgaggaaagctcctgaggataaatgtctcccctatattaaacagctcaattggcacttctttttcactgccatgcttttcgtttatggacggatccttagtcaacggttagccaataccatgactgcagatcagttcttctatcggctagtcagcggcttaatcaaataccatatggcaatctgttacttgttgtatattataggtttcatgtggttcattctcacattaaagaagaagatgtacaagtaccagtttggccagtatgcttggacccacatgatcttgatagtcgtgtttactcaatcgtcgttcactgttgccaacatatttgaagggatcttctggtttcttctcccagcatctttaattataatcaacgacatcttcgcctacattttcggtttcttctttggaagaacgcctttaataaagctgtctccaaagaaaacatgggagggattcatcggagcctctgtgacaactatcatctctgcatttgttctggcaaatattttgggtcgtttcccttggttgacatgcccacgacaggatttgtccactggctggctacagtgtgacgctgatccattgttcaaacctgaaccttttgctttacctgcatggattccagaatggtttccttggaaggaaatgacgatcctccctgttcagtggcatgctttatgcctcggtttgttcgcttcaatcatagcaccttttggaggatttttcgctagcggtttcaaaagagcattcaaaattaaggactttggtgatagtattccaggacatggtggaatcacagatagaatggactgccagatggttatggcagtatttgcctacatatatcttcaatcatttattgtctcccaaagcgtttcggttgacaaaatcctagaccagatattgacgaaccttacctttgaggaacaacaagcgctcttcgtgaagttaggacaaatgctgaaggacaagctctcataggctccattgccaaaagtttcttttattcagattctgattctccaagaacaggttcctctggaatatccttttatctttgtccttactagagacaataaatttaaaattggattaagatttgttgtttcctgccattgtaaatcctctcgaaatttgtcgaaaaaaatagaagtttttttttttaagtcttctcattggatacaaaaggtttgaaggaagttgtatctactactatctacttatttagtagctttggtggtttttagctgtattttgtatattggttaaaatgaaacaacatttggtttgtttgtctcatgattcgatttgttc

SEQ ID NO: 102602 - protein, 421 aa, Arabidopsis thaliana; identical to SEQ ID NO: 23228
  peptide (1)..(421): Ceres Seq. ID no. 13610783

SEQ ID NO: 102603 - protein, 372 aa, Arabidopsis thaliana; identical to SEQ ID NO: 23229
  peptide (1)..(372): Ceres Seq. ID no. 13610784

SEQ ID NO: 102604 - protein, 363 aa, Arabidopsis thaliana; identical to SEQ ID NO: 23230
  peptide (1)..(363): Ceres Seq. ID no. 13610785

SEQ ID NO: 102605 - DNA, 846 bp, Arabidopsis thaliana
  misc_feature (1)..(846): Ceres Seq. ID no. 13610800
  misc_feature (1)..(846): Ortholog of  Ceres SEQ ID NO 12474478 as cited in SEQ ID NO 96
  misc_feature (1)..(846): Ortholog of  Ceres SEQ ID NO 14302025 as cited in SEQ ID NO 52138
  misc_feature (1)..(846): Ortholog of  Ceres SEQ ID NO 14309053 as cited in SEQ ID NO 0
attttagaaaaaataaacaaacaaacaaaccaaaacaccatggagcttaaaaatacaatctttctagtcatacttctatcaataaccattctccaatcttcatctgcaaccccaaaccggtcggaatcagaccagtttattgtgtcttcatgccaaaccacccaatatccatcactatgcgtgcacacactctctgcttacgccaccaagatccgccacaacaatgaccaagatctcgcccagactgctctcatcatcagcttggctcgagccaaatccgttactatcttcgtcgccaaactaaccaaagagacaccaaaatttaaacgtagggaatatctagcaatcaaagattgcatcgaagtgctaggcaatagcgtggaccggttagctcaatcggttaaggaacttgctcgagctggtcatgctgtggctagtgaggacttcatgtggaaaatgagtaacgttcaaacatgggtcagtgccgctttgacggacgagacaacgtgtctagatggattctcagaacgagccatgggaggcaaagtcaaaagactgattcggtataaggtggttcacgtggctcaagtcactagcaatgctcttgctttggttaatcagtttgcagagaagcgaagtgtgaagtttccttaaatggacttaaatgtgaaaattttggcttgtaagtgagagtttgaatctaaacttcaattagttgtgtaaattgttatctttttttttcgtcggtcggaaagtaaactcaagattgtgtaacaatctttgttgtgtcctgtataatattgtattttaagataatgatatatagtcaccttttttgggtgtaaa

SEQ ID NO: 102606 - protein, 217 aa, Arabidopsis thaliana
  peptide (1)..(217): Ceres Seq. ID no. 13610801
ILEKINKQTNQNTMELKNTIFLVILLSITILQSSSATPNRSESDQFIVSSCQTTQYPSLCVHTLSAYATKIRHNNDQDLAQTALIISLARAKSVTIFVAKLTKETPKFKRREYLAIKDCIEVLGNSVDRLAQSVKELARAGHAVASEDFMWKMSNVQTWVSAALTDETTCLDGFSERAMGGKVKRLIRYKVVHVAQVTSNALALVNQFAEKRSVKFP

SEQ ID NO: 102607 - protein, 204 aa, Arabidopsis thaliana
  peptide (1)..(204): Ceres Seq. ID no. 13610802
MELKNTIFLVILLSITILQSSSATPNRSESDQFIVSSCQTTQYPSLCVHTLSAYATKIRHNNDQDLAQTALIISLARAKSVTIFVAKLTKETPKFKRREYLAIKDCIEVLGNSVDRLAQSVKELARAGHAVASEDFMWKMSNVQTWVSAALTDETTCLDGFSERAMGGKVKRLIRYKVVHVAQVTSNALALVNQFAEKRSVKFP

SEQ ID NO: 102608 - DNA, 923 bp, Arabidopsis thaliana
  misc_feature (1)..(923): Ceres Seq. ID no. 13610803
  misc_feature (1)..(923): Ortholog of  Ceres SEQ ID NO 13594248 as cited in SEQ ID NO 57340
agtgccgagaaagataaacaaaatggcggcaatcagaacgatgacgaacatgattctacgcgagttcatccatcatccacttctccttcactcttcatcgaaatcgtgtcaatctcttttaccatgtctccgtctcactcccctaatttctccaattcactctaattcccggctcgtatccgtccgatgtgcggcatcgacctccggtggaagcggtggtgatcggaaagtctcttcacggttgtcgcaggtgcaacagatgcttcatgaagccgaagagagagctagttccgctggcaatgagcctactcctcaaatcactctagacaatgttacacttaactttgctagaagtggtggtcctggaggccagaatgtgaacaaattgaataccaaagtagatatgcgcttcaatgttaagaacgcgtattggctgagtgacaggatcagagagaaaatcttactgacggagaagaatcggatcaacaaggatggtgaacttgtgatatcttctaccaaaaccagaacgcagaaaggtaacatcgacgatgcacttgaaaaactacaggcgataattgatgcggcttcatatgttccacctccaccatcagaagaacaaaagaagaaaatagtaaagctcgctgcgaaagctgacaataaacgacttaaaagcaaaaaagttctgtcagacaagaaatctgcgagaagaagccgcggtagttacgatgattaaacttaaaaccatacaatggagtccaggttgattctaaagcttttaacttaaaatgattgttattttcttggaatttaatgtaacacaacaatcaaatcatccaataaaaatttgcagtatattggattttatgtacaaaccactcttatacaaattatgaacaaaaaaagtatcaaacataacattcctc

SEQ ID NO: 102609 - protein, 243 aa, Arabidopsis thaliana
  peptide (1)..(243): Ceres Seq. ID no. 13610804
VPRKINKMAAIRTMTNMILREFIHHPLLLHSSSKSCQSLLPCLRLTPLISPIHSNSRLVSVRCAASTSGGSGGDRKVSSRLSQVQQMLHEAEERASSAGNEPTPQITLDNVTLNFARSGGPGGQNVNKLNTKVDMRFNVKNAYWLSDRIREKILLTEKNRINKDGELVISSTKTRTQKGNIDDALEKLQAIIDAASYVPPPPSEEQKKKIVKLAAKADNKRLKSKKVLSDKKSARRSRGSYDD

SEQ ID NO: 102610 - protein, 236 aa, Arabidopsis thaliana; identical to SEQ ID NO: 26577
  peptide (1)..(236): Ceres Seq. ID no. 13610805

SEQ ID NO: 102611 - protein, 230 aa, Arabidopsis thaliana; identical to SEQ ID NO: 26578
  peptide (1)..(230): Ceres Seq. ID no. 13610806

SEQ ID NO: 102612 - DNA, 881 bp, Arabidopsis thaliana
  misc_feature (1)..(881): Ceres Seq. ID no. 13610810
  misc_feature (1)..(881): Ortholog of  Ceres SEQ ID NO 13594962 as cited in SEQ ID NO 56140
  misc_feature (1)..(881): Ortholog of  Ceres SEQ ID NO 13598378 as cited in SEQ ID NO 62631
gtttcgtgtttggtcatcggtgttccgtgtttctcccaaacttttattacacgaacacaacaaaacaacacaagtgagagaaccctagattcttcttctattcccttcttccttcaagtcctttttatttctctaccaacctcgaaaacgaatcaagagattagcatcttatcgagatttaaaccatcaattaatcggctgccatggctgggagactacttgcaaatttgattgtgatgggttctgggatcattggtcgtgctgtctttcaagcctatcgtcaagcacttgctaatgcgtctaaatctggtgttgcgcaggaagcaatgcaaaatggagtacgtcaagcagggaaagccatcactgagcaagaggctaggcagattcttggtgtaaccgagaagacctcttgggaagagatattacagaaatatgacaaactgtttgagaataatgcgaaagcagggagcttttaccttcaatctaaagttcatcgagccaaagaatgtctagaagttgtgtacagaagccaaggcaacggtacacctagttaagaccttactctttttgttttccagactcaaaattcttgctcttaatgtaaaatcaagacgagttcatggtttctttgagatgatgtggaacttacaaaacggccatagttttcttcacacattaaattagtaataactaagacaggtttgctctgatcagttgatcagtgtcaaagaacctctgaaaactagaaaggattgttctgtttgtgtatgttttatccttctctcctgagagaagactcttttaaagctatccttcctgtttttgattcagattccaaactgatcatctacactctgtaatgtataatgtataataaaaaa

SEQ ID NO: 102613 - protein, 116 aa, Arabidopsis thaliana; identical to SEQ ID NO: 37830
  peptide (1)..(116): Ceres Seq. ID no. 13610811

SEQ ID NO: 102614 - protein, 105 aa, Arabidopsis thaliana; identical to SEQ ID NO: 37831
  peptide (1)..(105): Ceres Seq. ID no. 13610812

SEQ ID NO: 102615 - protein, 76 aa, Arabidopsis thaliana; identical to SEQ ID NO: 41050
  peptide (1)..(76): Ceres Seq. ID no. 13610813

SEQ ID NO: 102616 - DNA, 1256 bp, Arabidopsis thaliana
  misc_feature (1)..(1256): Ceres Seq. ID no. 13610818
  misc_feature (1)..(1256): Ortholog of  Ceres SEQ ID NO 14316124 as cited in SEQ ID NO 50904
  misc_feature (1)..(1256): Ortholog of  Ceres SEQ ID NO 13585382 as cited in SEQ ID NO 63889
attatatccaaaacataatctctctctatctctctctattttgctcaatcttaatcgtccgatcaaaacactccgactaaaaatggctgcatctaacggcgagaaaagcttgatcgtgagcttcggtgaaatgctcatcgatttcgtcccaaccgtctccggtgtatccctcgccgatgctcctggcttcatcaaagcccccggtggtgcacctgccaacgttgccatcgccatttcccgtctaggcggtcgtgccgctttcgttggaaaactcggtgacgacgagttcggtcacatgctcgccggaatcttgaaacagaacggtgtctctgctgaaggtatcaatttcgacactggagccaggactgcacttgcgttcgtgacactaagatctgatggagaacgtgagttcatgttctaccggaaccctagtgccgatatgctcctccgtcccgacgagctcaatcttgatgtcatcagatctgctaaggtgttccactacggatccataagcttgatcgttgagccatgtcgatctgctcacttgaaagccatggaggtggctaaggaagctggtgcgttgctttcatatgatccgaacttgaggcttcctttgtggccctcgaaggaggaggctcagaagcagattcttagcatctgggacaaagctgaagtgatcaaagtcagcgatgaagagcttatgttcttgactggatctgataaggttgatgatgagactgctttgtctctgtggcactctaatctgaaacttctcttggtcactctaggtgaaaagggttgtagatactacaccaagagcttccgtggatctgttgatcccttccatgtggatgcagtagatacaactggtgctggtgattcatttgttggtgcattgctttgcaagattgttgatgaccgtgctgtgcttgaggacgaagctcggctgagagaagtgcttaggcttgcgaatgcttgtggagccatcacaacaacaaagaaaggagctattccagctctccctacagagtctgaagttcagagcctcctgaaaggaaactgatttcacaatgtctggatttttaggacttcaagttttaccttttcttggctttgttttttattttcccctgcttttggctctgtgttcttgtagaaccgttctattctgttatgaatctcgttttattccaattgcaaggttttttgtcgtttgagtaactttgatgaataaaaactctttaccaagttcagtg

SEQ ID NO: 102617 - protein, 353 aa, Arabidopsis thaliana
  peptide (1)..(353): Ceres Seq. ID no. 13610819
LYPKHNLSLSLSILLNLNRPIKTLRLKMAASNGEKSLIVSFGEMLIDFVPTVSGVSLADAPGFIKAPGGAPANVAIAISRLGGRAAFVGKLGDDEFGHMLAGILKQNGVSAEGINFDTGARTALAFVTLRSDGEREFMFYRNPSADMLLRPDELNLDVIRSAKVFHYGSISLIVEPCRSAHLKAMEVAKEAGALLSYDPNLRLPLWPSKEEAQKQILSIWDKAEVIKVSDEELMFLTGSDKVDDETALSLWHSNLKLLLVTLGEKGCRYYTKSFRGSVDPFHVDAVDTTGAGDSFVGALLCKIVDDRAVLEDEARLREVLRLANACGAITTTKKGAIPALPTESEVQSLLKGN

SEQ ID NO: 102618 - protein, 326 aa, Arabidopsis thaliana
  peptide (1)..(326): Ceres Seq. ID no. 13610820
MAASNGEKSLIVSFGEMLIDFVPTVSGVSLADAPGFIKAPGGAPANVAIAISRLGGRAAFVGKLGDDEFGHMLAGILKQNGVSAEGINFDTGARTALAFVTLRSDGEREFMFYRNPSADMLLRPDELNLDVIRSAKVFHYGSISLIVEPCRSAHLKAMEVAKEAGALLSYDPNLRLPLWPSKEEAQKQILSIWDKAEVIKVSDEELMFLTGSDKVDDETALSLWHSNLKLLLVTLGEKGCRYYTKSFRGSVDPFHVDAVDTTGAGDSFVGALLCKIVDDRAVLEDEARLREVLRLANACGAITTTKKGAIPALPTESEVQSLLKGN

SEQ ID NO: 102619 - protein, 310 aa, Arabidopsis thaliana
  peptide (1)..(310): Ceres Seq. ID no. 13610821
MLIDFVPTVSGVSLADAPGFIKAPGGAPANVAIAISRLGGRAAFVGKLGDDEFGHMLAGILKQNGVSAEGINFDTGARTALAFVTLRSDGEREFMFYRNPSADMLLRPDELNLDVIRSAKVFHYGSISLIVEPCRSAHLKAMEVAKEAGALLSYDPNLRLPLWPSKEEAQKQILSIWDKAEVIKVSDEELMFLTGSDKVDDETALSLWHSNLKLLLVTLGEKGCRYYTKSFRGSVDPFHVDAVDTTGAGDSFVGALLCKIVDDRAVLEDEARLREVLRLANACGAITTTKKGAIPALPTESEVQSLLKGN

SEQ ID NO: 102620 - DNA, 629 bp, Arabidopsis thaliana
  misc_feature (1)..(629): Ceres Seq. ID no. 13610826
  misc_feature (1)..(629): Ortholog of  Ceres SEQ ID NO 13584363 as cited in SEQ ID NO 64285
acacatcggttagggttttagtttctcttaccgagattcaaatggcgcttagaggagtttggcagctcaagaaactcgttgtgagctactgtaattggggtggtagcagtagaggcatcagagcctttatggaatcagaattgcctgctctaaaggagaaaaacccgcagctcgaagtaattaccgagctttcacggggacaacatccttatttgaagggcatttacaggaatagaaatgaaagggtagtgtgtgtgaagaacatggatcctgaagaagtgcttttgaatgcaacgaggctgaggaactcgcttggacggaaagtggttaaactgaggaccagacatgtcaccaaacaccccagtgttcaaggcacctggacaactgctgtcaaattctgagactttcctgctaaattgtttgcaggttttcatcttctagctgttaaatcgaatgttgcaagtatcaggattggtcgtttatctgtattgcaaccccaagttgtttgtaccgtctgtgacttgggacaaagatgtagtcttcaaatgttttgcagtttttgcaatgtttgaattttgtcttgtccttctggttgagtctataataagattacacaagggtttaaggtt

SEQ ID NO: 102621 - protein, 132 aa, Arabidopsis thaliana; identical to SEQ ID NO: 37958
  peptide (1)..(132): Ceres Seq. ID no. 13610827

SEQ ID NO: 102622 - protein, 119 aa, Arabidopsis thaliana; identical to SEQ ID NO: 37959
  peptide (1)..(119): Ceres Seq. ID no. 13610828

SEQ ID NO: 102623 - protein, 90 aa, Arabidopsis thaliana; identical to SEQ ID NO: 37960
  peptide (1)..(90): Ceres Seq. ID no. 13610829

SEQ ID NO: 102624 - DNA, 1489 bp, Arabidopsis thaliana
  misc_feature (1)..(1489): Ceres Seq. ID no. 13610838
  misc_feature (1)..(1489): Ortholog of  Ceres SEQ ID NO 13596891 as cited in SEQ ID NO 62868
  misc_feature (1)..(1489): Ortholog of  Ceres SEQ ID NO 12617235 as cited in SEQ ID NO 63990
  misc_feature (1)..(1489): Ortholog of  Ceres SEQ ID NO 13655371 as cited in SEQ ID NO 68945
atggagaccaccgtgaaaaacaagcaagtgatactgagaaattatgtgaagggtatccctaaagaatctgacctaatgattatcacagcttcagaccccgtggaactcaaggttaagcccggatcagcggcggttatggtgaggaatctttacttgtcttgtgacccttacatggggattctcatgagagaaccaactccttccactctagcacttttggatgccttcatccccggaaagcctatagctggaattggagtgtctcaagtaatagattctgatgatccatcttttacgaaaggcgatatgatttggggaattgtgaactgggaggagtttagtactatcaacccggctgctatattcaaaatcgacgtcaatatcaatgttcctctcagctactatactggaatcctcggtatgataggtttaactgcttacgccgggtttttcgagatatgttcacctaagaaaggagacacagtgttcgtgtctgctgcttctggcgcggttggacagctcgtgggtcagtttgcaaagttgatgggctgctatgttgttggaagtgccggaagtaaacaaaaggtcgatctcctgctgaacaaattcggttacgatgatgcattcaattataaggaagagcctgaccttgactccgccttgaagaggtgtgtaccaaaaggtattgacatatactttgagaacgtgggaggcaaaatgcttgacgcggttctacttaacatgaaaacgtatggacgaatcgctgtatgtgggatgatatctcagtaccatcttgaaaccagagacaggttacaaaatctacctgacatcatattcaagaagataaggatgcaagggtttgcttcttatgactttatagatagattcccaaagttcttggagtttgttcttccctacataaaagaagagaaattagcgtacgtggaagacattgttgaaggactcgagaatggtcctgctgctcttgtaggacttcttcatggaaaaaacgttgatcagaaggggaaaaagataaaccctaattcctcagattacaatttgagaaccaccgattcgagagtagcaatggggattctatcatggttcacgggaagtcctaagccatcacagtccgagacgtctaagccggagatgattcagatgccgaaatcagaaactccagccccggggatgaatggagccatagaagttcctcggcccgatcgcgcgacggttttcgagttcggctccgttgctgctactggagacagagtcactctcgctggttactgtcccgtttccgatgatctcgaaccttgccgttgggagattcttcccgccgacggcaaagacgctccacagtttcgcgtcgtcttctgaggaatcagtcaataatctgtagaagatgtaaacttgttcaatctcgtcgttgataattgtatttggtctggtaatgtcatctctttcatttgaaatcgaacaagttctc

SEQ ID NO: 102625 - protein, 459 aa, Arabidopsis thaliana
  peptide (1)..(459): Ceres Seq. ID no. 13610839
METTVKNKQVILRNYVKGIPKESDLMIITASDPVELKVKPGSAAVMVRNLYLSCDPYMGILMREPTPSTLALLDAFIPGKPIAGIGVSQVIDSDDPSFTKGDMIWGIVNWEEFSTINPAAIFKIDVNINVPLSYYTGILGMIGLTAYAGFFEICSPKKGDTVFVSAASGAVGQLVGQFAKLMGCYVVGSAGSKQKVDLLLNKFGYDDAFNYKEEPDLDSALKRCVPKGIDIYFENVGGKMLDAVLLNMKTYGRIAVCGMISQYHLETRDRLQNLPDIIFKKIRMQGFASYDFIDRFPKFLEFVLPYIKEEKLAYVEDIVEGLENGPAALVGLLHGKNVDQKGKKINPNSSDYNLRTTDSRVAMGILSWFTGSPKPSQSETSKPEMIQMPKSETPAPGMNGAIEVPRPDRATVFEFGSVAATGDRVTLAGYCPVSDDLEPCRWEILPADGKDAPQFRVVF

SEQ ID NO: 102626 - protein, 434 aa, Arabidopsis thaliana
  peptide (1)..(434): Ceres Seq. ID no. 13610840
MIITASDPVELKVKPGSAAVMVRNLYLSCDPYMGILMREPTPSTLALLDAFIPGKPIAGIGVSQVIDSDDPSFTKGDMIWGIVNWEEFSTINPAAIFKIDVNINVPLSYYTGILGMIGLTAYAGFFEICSPKKGDTVFVSAASGAVGQLVGQFAKLMGCYVVGSAGSKQKVDLLLNKFGYDDAFNYKEEPDLDSALKRCVPKGIDIYFENVGGKMLDAVLLNMKTYGRIAVCGMISQYHLETRDRLQNLPDIIFKKIRMQGFASYDFIDRFPKFLEFVLPYIKEEKLAYVEDIVEGLENGPAALVGLLHGKNVDQKGKKINPNSSDYNLRTTDSRVAMGILSWFTGSPKPSQSETSKPEMIQMPKSETPAPGMNGAIEVPRPDRATVFEFGSVAATGDRVTLAGYCPVSDDLEPCRWEILPADGKDAPQFRVVF

SEQ ID NO: 102627 - protein, 414 aa, Arabidopsis thaliana
  peptide (1)..(414): Ceres Seq. ID no. 13610841
MVRNLYLSCDPYMGILMREPTPSTLALLDAFIPGKPIAGIGVSQVIDSDDPSFTKGDMIWGIVNWEEFSTINPAAIFKIDVNINVPLSYYTGILGMIGLTAYAGFFEICSPKKGDTVFVSAASGAVGQLVGQFAKLMGCYVVGSAGSKQKVDLLLNKFGYDDAFNYKEEPDLDSALKRCVPKGIDIYFENVGGKMLDAVLLNMKTYGRIAVCGMISQYHLETRDRLQNLPDIIFKKIRMQGFASYDFIDRFPKFLEFVLPYIKEEKLAYVEDIVEGLENGPAALVGLLHGKNVDQKGKKINPNSSDYNLRTTDSRVAMGILSWFTGSPKPSQSETSKPEMIQMPKSETPAPGMNGAIEVPRPDRATVFEFGSVAATGDRVTLAGYCPVSDDLEPCRWEILPADGKDAPQFRVVF

SEQ ID NO: 102628 - DNA, 1218 bp, Arabidopsis thaliana
  misc_feature (1)..(1218): Ceres Seq. ID no. 13610842
  misc_feature (1)..(1218): Ortholog of  Ceres SEQ ID NO 13662054 as cited in SEQ ID NO 61539
  misc_feature (1)..(1218): Ortholog of  Ceres SEQ ID NO 13663665 as cited in SEQ ID NO 67230
  misc_feature (1)..(1218): Ortholog of  Ceres SEQ ID NO 15174315 as cited in SEQ ID NO 0
atccatcatctcagctcacctttagcttcttcttcttcctcttccgatttcaacgttgtgtttatcttcttcttcataattccgacgaatttcaccagagagaatcaaacccccgaagaatcttaattttctctctgtattatcatcttccaattcaagtgaagaaactcgtacgtggtcgtagtggagatgagttcggctctacctttgaagcttttgttgcctcttacaacaacttcattgctaccttctcctttccgatcggataaccctaacttctatcgccgtcgttcctcttcctctacttcgtgttcttctcaatcccaatcgtttcagcttttctctgttagacgacgccgatccagatcctcctctccctctattcccatgtgctttcctgaacaaacgagagatcaagacgacgtggatagttgggtgaacaaagaggacaatgtgacttgtaggtttgactcagatgaagacaccaccaccaccggactccggattccaacacaagctcaagctatcgttgaaggacctggttcacttgctgtgtcggagctacaacgagtccctgatgtagattatatacaagaactgttggctatacagcaacaaggaccaagaacaattggcttctttggaactagaaatatgggtttcatgcatcaagagctcattcagattcttagctatgctatggttataactaaaaaccatatctacacatcaggtgcagctggaaccaatgcagctgttataagaggtgcacttagagcagagagaccagagcttcttacagttatcttacctcaaagtttgaaaaagcaacctcctgaaagccaggaactactgtcaaaagtacaaaacgtgatagaaaagcctcacaacgaccatttaccgttattagaagccagcaggctatgtaacatggatatcatatcacaagtgcaacaaatcatttgctttgcgtttcatgatagtaagcttctcatggagacatgtcaagaagctagaaatctccggaagattgttaccctcttctacctggattgagtgattcagtgtttcccacttcaaaaaactcttctttgtcttcttagtgttttgttcatcttcctcttcggagaaagacaagttccattgtaattaggaatcgtcgtttacacatgcacaacctattctttggtctttcatttttttatttgctttataggg

SEQ ID NO: 102629 - protein, 288 aa, Arabidopsis thaliana
  peptide (1)..(288): Ceres Seq. ID no. 13610843
MSSALPLKLLLPLTTTSLLPSPFRSDNPNFYRRRSSSSTSCSSQSQSFQLFSVRRRRSRSSSPSIPMCFPEQTRDQDDVDSWVNKEDNVTCRFDSDEDTTTTGLRIPTQAQAIVEGPGSLAVSELQRVPDVDYIQELLAIQQQGPRTIGFFGTRNMGFMHQELIQILSYAMVITKNHIYTSGAAGTNAAVIRGALRAERPELLTVILPQSLKKQPPESQELLSKVQNVIEKPHNDHLPLLEASRLCNMDIISQVQQIICFAFHDSKLLMETCQEARNLRKIVTLFYLD

SEQ ID NO: 102630 - protein, 222 aa, Arabidopsis thaliana
  peptide (1)..(222): Ceres Seq. ID no. 13610844
MCFPEQTRDQDDVDSWVNKEDNVTCRFDSDEDTTTTGLRIPTQAQAIVEGPGSLAVSELQRVPDVDYIQELLAIQQQGPRTIGFFGTRNMGFMHQELIQILSYAMVITKNHIYTSGAAGTNAAVIRGALRAERPELLTVILPQSLKKQPPESQELLSKVQNVIEKPHNDHLPLLEASRLCNMDIISQVQQIICFAFHDSKLLMETCQEARNLRKIVTLFYLD

SEQ ID NO: 102631 - DNA, 1322 bp, Arabidopsis thaliana
  misc_feature (1)..(1322): Ceres Seq. ID no. 13610845
  misc_feature (1)..(1322): Ortholog of  Ceres SEQ ID NO 13659644 as cited in SEQ ID NO 67118
  misc_feature (1)..(1322): Ortholog of  Ceres SEQ ID NO 14302856 as cited in SEQ ID NO 68824
aaggtttgaacataaattctaatttcgttgctcgacagcaatctcggaccaagtggaaaccgaaaatggcggcgaatgggctaatggcggcatctagtgtgtttctccaccgtcctgtacatccccatttctcgttctcttctagaacgaatcaaatggttccactcggcttcaaaggccgtgttagtttcatcggcaatgtgaaacgctgttttccggtggtattgtcaatgggaaagtcggagactttcgaggaagctggaaattccgttgcgcctggtaacggcatatcgatcatggtgaatggatgcagtggtaaaatggggaaagctgtcatcaaagcggcagattctgctggagtgaatattgttcctacatcatttgggtctgttgaagaggctggccagactgttgaggtctgtggaaaggagattcttgtgcatggtcctactgaaagagaaaaggtgctgtcttcagtgtttgagaagtatcctgaactaattgttgtggactacacaattccctctgcagtaaatgataatgcagagctgtatggcaaagtaggagttccgttcgtaatgggaacaactggaggagacaggacaagattgtataaaactgtcgaggaatcaaagatttatgctgtgatttctccacagatgggtaaacaggttgttgcgtttcttgcagcaatggagatcatgtctgagcagtttcctggtgcatttgctggttattccttagaggtgatggagtctcatcaagctagcaaattggatgcatctggtactgcaaaagctgttatttcttgctttcagaaattaggcgtgtcttacgacatggaccagatacaattaattcgagatcctaagcagcagattgaggtggtgggtgttccagaggagcatgtctcgggtcatgctttccatctttatcacttgacatcaccagataaaactgtgtcctttgagttccagcacaatgtttgcggaagatcaatatatgctgagggtactgttgatgcagtgctattccttgccaaaaagatccggtctaaagcagagaagaggatctataacatgattgatgtcttgagagagggaaacatgcgttgaacaaaccccaagctgcagtggctagtaaagaagagtatatgaaactctatataaaaaaatgtcatgccaagttaaatgtgctttggttcttcatttctttgtagggttttgtctttttatggcttctctgtttctcttttcggatttgcaaaattcctgagaaaattgtcatttcttttcgattatagtcgtctttcttcgggatct

SEQ ID NO: 102632 - protein, 370 aa, Arabidopsis thaliana
  peptide (1)..(370): Ceres Seq. ID no. 13610846
GLNINSNFVARQQSRTKWKPKMAANGLMAASSVFLHRPVHPHFSFSSRTNQMVPLGFKGRVSFIGNVKRCFPVVLSMGKSETFEEAGNSVAPGNGISIMVNGCSGKMGKAVIKAADSAGVNIVPTSFGSVEEAGQTVEVCGKEILVHGPTEREKVLSSVFEKYPELIVVDYTIPSAVNDNAELYGKVGVPFVMGTTGGDRTRLYKTVEESKIYAVISPQMGKQVVAFLAAMEIMSEQFPGAFAGYSLEVMESHQASKLDASGTAKAVISCFQKLGVSYDMDQIQLIRDPKQQIEVVGVPEEHVSGHAFHLYHLTSPDKTVSFEFQHNVCGRSIYAEGTVDAVLFLAKKIRSKAEKRIYNMIDVLREGNMR

SEQ ID NO: 102633 - protein, 349 aa, Arabidopsis thaliana
  peptide (1)..(349): Ceres Seq. ID no. 13610847
MAANGLMAASSVFLHRPVHPHFSFSSRTNQMVPLGFKGRVSFIGNVKRCFPVVLSMGKSETFEEAGNSVAPGNGISIMVNGCSGKMGKAVIKAADSAGVNIVPTSFGSVEEAGQTVEVCGKEILVHGPTEREKVLSSVFEKYPELIVVDYTIPSAVNDNAELYGKVGVPFVMGTTGGDRTRLYKTVEESKIYAVISPQMGKQVVAFLAAMEIMSEQFPGAFAGYSLEVMESHQASKLDASGTAKAVISCFQKLGVSYDMDQIQLIRDPKQQIEVVGVPEEHVSGHAFHLYHLTSPDKTVSFEFQHNVCGRSIYAEGTVDAVLFLAKKIRSKAEKRIYNMIDVLREGNMR

SEQ ID NO: 102634 - protein, 343 aa, Arabidopsis thaliana
  peptide (1)..(343): Ceres Seq. ID no. 13610848
MAASSVFLHRPVHPHFSFSSRTNQMVPLGFKGRVSFIGNVKRCFPVVLSMGKSETFEEAGNSVAPGNGISIMVNGCSGKMGKAVIKAADSAGVNIVPTSFGSVEEAGQTVEVCGKEILVHGPTEREKVLSSVFEKYPELIVVDYTIPSAVNDNAELYGKVGVPFVMGTTGGDRTRLYKTVEESKIYAVISPQMGKQVVAFLAAMEIMSEQFPGAFAGYSLEVMESHQASKLDASGTAKAVISCFQKLGVSYDMDQIQLIRDPKQQIEVVGVPEEHVSGHAFHLYHLTSPDKTVSFEFQHNVCGRSIYAEGTVDAVLFLAKKIRSKAEKRIYNMIDVLREGNMR

SEQ ID NO: 102635 - DNA, 844 bp, Arabidopsis thaliana
  misc_feature (1)..(844): Ceres Seq. ID no. 13610849
  misc_feature (1)..(844): Ortholog of  Ceres SEQ ID NO 13661801 as cited in SEQ ID NO 61655
  misc_feature (1)..(844): Ortholog of  Ceres SEQ ID NO 13596450 as cited in SEQ ID NO 68838
gtcaaacttgtgcgtgattcatcgtcacatcgccttgatcatggaaactcctatcgatgctccgaataaggacgaacatgaatgccctaggtggaagaaatcaactgtagtttttgtgttgggtggtcctggaagtggaaaaggtactcagtgtgctaatgttgtgaagcactttagctatacccattttagtgctggtgatcttctcagagcagaaattaagtccggttctgaatttggagccatgatccaaagtatgattgcagaggggagaatagtgccgtctgagatcacagtgaaacttttgtgtaaagctatggaggaaagtggtaatgataagttccttattgatggcttccctcgcaatgaagaaaatcgaaacgtattcgaaaatgttgctagaatcgagcctgcttttgttctattctttgattgtccagaagaagaactagaaagacgcattatgagcaggaaccagggaagagaagacgataatatagagaccataaagaagcgatttaaagtgtttgttgaatctaccctcccaattattagctactacgaatcgaaagggaaacttcgaaagatcaatgctgcaaaatccagcgaagaggttttcgaggctgtcagagttctatttgcatctgaaacttgacaagcatcaaggacttggattcaccgaacagaacaaaacagagactccaaagtcaatgatgtgccttgtcgtatacgtaactaagtttacagattcatgctttatttgtatatgtaattatctctacattttacatgttctcatcatacgatatagccaaactttcgtcgcaataaccatatttttagc

SEQ ID NO: 102636 - protein, 217 aa, Arabidopsis thaliana
  peptide (1)..(217): Ceres Seq. ID no. 13610850
SNLCVIHRHIALIMETPIDAPNKDEHECPRWKKSTVVFVLGGPGSGKGTQCANVVKHFSYTHFSAGDLLRAEIKSGSEFGAMIQSMIAEGRIVPSEITVKLLCKAMEESGNDKFLIDGFPRNEENRNVFENVARIEPAFVLFFDCPEEELERRIMSRNQGREDDNIETIKKRFKVFVESTLPIISYYESKGKLRKINAAKSSEEVFEAVRVLFASET

SEQ ID NO: 102637 - protein, 204 aa, Arabidopsis thaliana; identical to SEQ ID NO: 30135
  peptide (1)..(204): Ceres Seq. ID no. 13610851

SEQ ID NO: 102638 - protein, 136 aa, Arabidopsis thaliana; identical to SEQ ID NO: 30136
  peptide (1)..(136): Ceres Seq. ID no. 13610852

SEQ ID NO: 102639 - DNA, 902 bp, Arabidopsis thaliana
  misc_feature (1)..(902): Ceres Seq. ID no. 13610853
  misc_feature (1)..(902): Ortholog of  Ceres SEQ ID NO 14314838 as cited in SEQ ID NO 52573
acaccgagaaaggcaatggagtcggctaaatcaatcatcggtggccaccaaaatgtcatcctgatgcgtcatggtgatcgactcgacaatttcgagccactctggacttcaacagctgcgagaccgtgggatccaccgcttgctcaagacggtaaggatcgggcctttagaactggtcagagaatccggtctcaacttggggttccgattcaccgtgtcttcgtctcccctttcctccgctgcatccagaccgcttccgaagtcgttgccgccctctcagccgtcgatttcgatcccattgctatgtcatctaaagacgtgctttccatcgacaatactaagatcaaggtggctattgaatttggattgtccgagataccgcacccaatctttattaagagtgaagttgctcccaaagatgggaaatttgatttcaagatttcagatcttgaagctatgtttcctgaaggaacagtggattctaatgtggatatggtttataaagaggtgccagaatggggagaatctgcacaagcctttgaggatcgatattataagacagtgaagattcttgcggagaagtatccttctgagaacttgctcttagtcactcattggggagcagtaagtgttgcattttacaactacttcaaagacgcaactaagtacgtggtagattattgtggtagtgttgaaatgagaaggcagattttgaatggtgatgggtttggtaaatttgaggtagttactagtcatggagtatcttataagtacaccaaaatcccagtccatgatcatgtagttgtaagccgccaatctcccctttaaccggtttatatgtgaatatctggtttaacgggttgcttcaataaaaaaaaatatataagaataatggttcagtt

SEQ ID NO: 102640 - protein, 275 aa, Arabidopsis thaliana
  peptide (1)..(275): Ceres Seq. ID no. 13610854
TPRKAMESAKSIIGGHQNVILMRHGDRLDNFEPLWTSTAARPWDPPLAQDGKDRAFRTGQRIRSQLGVPIHRVFVSPFLRCIQTASEVVAALSAVDFDPIAMSSKDVLSIDNTKIKVAIEFGLSEIPHPIFIKSEVAPKDGKFDFKISDLEAMFPEGTVDSNVDMVYKEVPEWGESAQAFEDRYYKTVKILAEKYPSENLLLVTHWGAVSVAFYNYFKDATKYVVDYCGSVEMRRQILNGDGFGKFEVVTSHGVSYKYTKIPVHDHVVVSRQSPL

SEQ ID NO: 102641 - protein, 270 aa, Arabidopsis thaliana; identical to SEQ ID NO: 21722
  peptide (1)..(270): Ceres Seq. ID no. 13610855

SEQ ID NO: 102642 - protein, 254 aa, Arabidopsis thaliana; identical to SEQ ID NO: 21723
  peptide (1)..(254): Ceres Seq. ID no. 13610856

SEQ ID NO: 102643 - DNA, 965 bp, Arabidopsis thaliana
  misc_feature (1)..(965): Ceres Seq. ID no. 13610857
  misc_feature (1)..(965): Ortholog of  Ceres SEQ ID NO 14314838 as cited in SEQ ID NO 52573
agaagaagaaagaaacaatggagtctcccaaatctaacgtcgacgatggctaccaaaacatcttcgtcatgcgtcacggtgatcgaatcgacaatttcgagccactctgggtttcaaccgccgagagaccttgggatccacctttggttcaagacggtatgattcgagcgtttcgaaccggtcaaaggatccgatctcagatcgggttcccgattcaccgtgtcttcgtctcccctttcctccgatgtcttcagacagcttccgaagtcgtcgcagctctatcagccgtcaatgtcgatcctaacgccatgtcttccaaagacgtcccttccattgataaatctaagctcaaggtttctattgaattaggtttgtgtgagatgttgaactcagtggctataaggcgtgagcttgctcctaaagatgggaaatttgacttcactgtttcagatattgaaactatgtttcctgagggaatggttgatcataatgtggatatggtttataaagagttgcctaaatgggaagagtctgtggaaggttgcagagatcgatatgttaaagttgtaaaggctcttgctgataagtatcctgaagagaacttgctcttagtaacccacggggaaggagttggaactacattttcgacattctataaagatacaacagtgtacgaagtagactactgtgcttatgttgaaatgagaagacaagtctcaagtgaagatgggtctgttaaagctggggactatgaggtggttttgagtcatggtcaagctgggatcaggtttagtcatgatcctgtcagttatgaacctgtcataagccattcacctgtttagtcaaattgtcttcagtgtcctctgtttctgtacttttgaattgtatttgaactgcttttgtatgaattatgaaacattgtttcaaagttttcattcaatcgaatcagagtccaaagaaaacaa

SEQ ID NO: 102644 - protein, 279 aa, Arabidopsis thaliana
  peptide (1)..(279): Ceres Seq. ID no. 13610858
KKKETMESPKSNVDDGYQNIFVMRHGDRIDNFEPLWVSTAERPWDPPLVQDGMIRAFRTGQRIRSQIGFPIHRVFVSPFLRCLQTASEVVAALSAVNVDPNAMSSKDVPSIDKSKLKVSIELGLCEMLNSVAIRRELAPKDGKFDFTVSDIETMFPEGMVDHNVDMVYKELPKWEESVEGCRDRYVKVVKALADKYPEENLLLVTHGEGVGTTFSTFYKDTTVYEVDYCAYVEMRRQVSSEDGSVKAGDYEVVLSHGQAGIRFSHDPVSYEPVISHSPV

SEQ ID NO: 102645 - protein, 274 aa, Arabidopsis thaliana
  peptide (1)..(274): Ceres Seq. ID no. 13610859
MESPKSNVDDGYQNIFVMRHGDRIDNFEPLWVSTAERPWDPPLVQDGMIRAFRTGQRIRSQIGFPIHRVFVSPFLRCLQTASEVVAALSAVNVDPNAMSSKDVPSIDKSKLKVSIELGLCEMLNSVAIRRELAPKDGKFDFTVSDIETMFPEGMVDHNVDMVYKELPKWEESVEGCRDRYVKVVKALADKYPEENLLLVTHGEGVGTTFSTFYKDTTVYEVDYCAYVEMRRQVSSEDGSVKAGDYEVVLSHGQAGIRFSHDPVSYEPVISHSPV

SEQ ID NO: 102646 - protein, 257 aa, Arabidopsis thaliana
  peptide (1)..(257): Ceres Seq. ID no. 13610860
MRHGDRIDNFEPLWVSTAERPWDPPLVQDGMIRAFRTGQRIRSQIGFPIHRVFVSPFLRCLQTASEVVAALSAVNVDPNAMSSKDVPSIDKSKLKVSIELGLCEMLNSVAIRRELAPKDGKFDFTVSDIETMFPEGMVDHNVDMVYKELPKWEESVEGCRDRYVKVVKALADKYPEENLLLVTHGEGVGTTFSTFYKDTTVYEVDYCAYVEMRRQVSSEDGSVKAGDYEVVLSHGQAGIRFSHDPVSYEPVISHSPV

SEQ ID NO: 102647 - DNA, 1215 bp, Arabidopsis thaliana
  misc_feature (1)..(1215): Ceres Seq. ID no. 13610865
  misc_feature (1)..(1215): Ortholog of  Ceres SEQ ID NO 15169005 as cited in SEQ ID NO 55180
aagaaacagccaacggattagggatcttaccgttctgcgattcgccgaacagagtttgaagctttttttagagacttcaatggtgagccaaggaatggtatctcttacaaagtctctatgcactatgactccaagagtccgtctcaagaatccgaatatgttgcagaaactaaagactggatcttgtaatttccgtttcagaaatctccgtgtcttatgcacaccaaagctgtctcagtgggaaccgtcacctttcattcatgcttctgcagaagaagctgctgatatagtattggacaaaaccgcgaatgtgttcgaatctattgtctccgagagtgcagaggaagagaaagtagatatgtcagcgcaacaacgaactaattctcaagttcaggtacttaaatggccaatatggcttttgggtccatctgttctcctcacaagcggtatggcgcctactttatggcttccgttgtcatcggtttttctcggttccaacgtggttagtctactttctttgatcggtctagattgcattttcaatcttggagcaacccttttcctcttaatggctgattcttgcgcacgtcctaaagacccatcacagtcctgcaacagcaaaccaccatttagctataagttctggaacatgttttcactcataatcgggtttctagtcccaatgttacttctcttcggatcccaatctggccttctcgcttctctccagccccagattcctttcctctcgtccgctgttatcctcttcccgtacttcattctccttgctgttcagacattaacagagatcctcacatggcactggcaatcaccggtctggctagtcacaccagttgtctacgaggcttaccgaatcttgcaactgatgagagggttgacacttagtgcagaggtcaacgcaccggtttgggtggttcatatgcttcgtgggcttgtctcttggtgggtattgatcttgggaatgcaactcatgagagttgcttggtttgctggttttgcatctagaacaacaacaggtcagcaaccacaatctgttgcttctaagtaaagacagataaatgtttcttcgtttagtttttaaagtcatgtcaaagatttgtaactctttcttcactgtatagcttttattattcgtgggttggtgataaggattaaaaaaaaacacatattctttatgatcatattcgctctttt

SEQ ID NO: 102648 - protein, 355 aa, Arabidopsis thaliana
  peptide (1)..(355): Ceres Seq. ID no. 13610866
RNSQRIRDLTVLRFAEQSLKLFLETSMVSQGMVSLTKSLCTMTPRVRLKNPNMLQKLKTGSCNFRFRNLRVLCTPKLSQWEPSPFIHASAEEAADIVLDKTANVFESIVSESAEEEKVDMSAQQRTNSQVQVLKWPIWLLGPSVLLTSGMAPTLWLPLSSVFLGSNVVSLLSLIGLDCIFNLGATLFLLMADSCARPKDPSQSCNSKPPFSYKFWNMFSLIIGFLVPMLLLFGSQSGLLASLQPQIPFLSSAVILFPYFILLAVQTLTEILTWHWQSPVWLVTPVVYEAYRILQLMRGLTLSAEVNAPVWVVHMLRGLVSWWVLILGMQLMRVAWFAGFASRTTTGQQPQSVASK

SEQ ID NO: 102649 - protein, 329 aa, Arabidopsis thaliana; identical to SEQ ID NO: 71900
  peptide (1)..(329): Ceres Seq. ID no. 13610867

SEQ ID NO: 102650 - protein, 324 aa, Arabidopsis thaliana; identical to SEQ ID NO: 71901
  peptide (1)..(324): Ceres Seq. ID no. 13610868

SEQ ID NO: 102651 - DNA, 1116 bp, Arabidopsis thaliana
  misc_feature (1)..(1116): Ceres Seq. ID no. 13610869
  misc_feature (1)..(1116): Ortholog of  Ceres SEQ ID NO 14306439 as cited in SEQ ID NO 53628
  misc_feature (1)..(1116): Ortholog of  Ceres SEQ ID NO 12611235 as cited in SEQ ID NO 56101
  misc_feature (1)..(1116): Ortholog of  Ceres SEQ ID NO 15226202 as cited in SEQ ID NO 65001
  misc_feature (1)..(1116): Ortholog of  Ceres SEQ ID NO 15177896 as cited in SEQ ID NO 0
agctctgtctaatctctctcgatcgacgactgctctctctctgaaccggagacggtgtcacgggacgaatctaatcgccgggaaaccgttttttttttctctcggaaaatcgatttgaatctccggcgatctgatcgggatgagtaacatcgatctgattgggatgagtaaccgcgatctgatcgggatgagtaacagcgagcttctcaccgtcgagcctctcgatcttcaattcccttttgaattgaagaagcagatctcttgctctctctatttgacgaacaagaccgacaataatgttgcctttaaggttaagacgacgaatccgaaaaagtattgtgttaggcctaatactggagttgttctcccgaggtctacttgcgaagttcttgtgaccatgcaagctcaaaaggaagctccttccgatatgcagtgcaaggacaagtttctgcttcaaggtgtgatagctagtcctggtgtcacagccaaggaagttactcctgagatgtttagcaaagaggctggacatcgagttgaggaaactaaactgagagttacttatgttgctccaccacgaccaccatcaccggttcacgaaggatctgaagagggttcttcacccagggcttctgtctcagataatggacatggttctgaattttcgtttgagagatttatcgtggacaacaaggctggacatcaagaaaacacatctgaggcgagggcactcattaccaagctaaccgaagaaaaacagtctgccattcaactgaacaacagacttcaaagagaactggatcagttaaggcgtgaaagcaaaaagagccaaagtggtggtatcccattcatgtacgttcttttggtcggactcatcggtctaattttgggatacattatgaagaggacataaaccacccaccttgaaattaatccctcacccgccacgaaggaaaaaaaaaagacttttaactcttttcagtcggacatttttttctcttctgtatttgtcaatttcgccttaaaaaggtgtcctagaagatttgtgtttcgtaactcagtttgctatgtttttttcaacttttgtaatccaaatgactttgcgttggttctttctcc

SEQ ID NO: 102652 - protein, 256 aa, Arabidopsis thaliana; identical to SEQ ID NO: 30972
  peptide (1)..(256): Ceres Seq. ID no. 13610870

SEQ ID NO: 102653 - protein, 248 aa, Arabidopsis thaliana; identical to SEQ ID NO: 30973
  peptide (1)..(248): Ceres Seq. ID no. 13610871

SEQ ID NO: 102654 - protein, 240 aa, Arabidopsis thaliana; identical to SEQ ID NO: 30974
  peptide (1)..(240): Ceres Seq. ID no. 13610872

SEQ ID NO: 102655 - DNA, 829 bp, Arabidopsis thaliana
  misc_feature (1)..(829): Ceres Seq. ID no. 13610873
  misc_feature (1)..(829): Ortholog of  Ceres SEQ ID NO 13595532 as cited in SEQ ID NO 56705
tttagcgtttacacagccacaaattcctcaatactctatatttctcttcccgtttgaaactccaaagcttgtttgatgaaaacagagtaaacggttctgttcaaaacatttttcaagctctgttactttgttttttcaacgatgaggaagttaagaggaatcaaaattagaagaccgattaaacaaatctcaagatggatcctccggagaattaagattcgtcgttcaagatacacccggttaagcccaaaccgcccggtttgcaagccgagagccatcacaaaactcataagttggggtcgaagtctcacatcccacagcgccaggtttattgggtctaaatgctccaattcagggtacataccaattggtcaagaacccattcgagaaaagcccgacccggttccgaaaggtcactcggcggtttacatcggtaaaaaagacggcgactttcagagagttttggtgcctatcgtttactttaaccatcctctgtttggtgagcttcttagagaggctgaagaagaatttgggttttctcaagaaggtggaatcactatcccttgtccttactcagatttcaaacgggtccaaacccgaattgaatccgggtcgggtttctgtaaatttccctggagccggcggtggcaataacgacggtggaagaagatgatgatgatgaaaaagttctttaactcttttttactattttctaccttttcacttttgttactatttttacccttttgttagatatgtacatattctgtatgtgaaaagtgaggtttgaatttaggcgataatgtaaataatatagagattttttatt

SEQ ID NO: 102656 - protein, 170 aa, Arabidopsis thaliana
  peptide (1)..(170): Ceres Seq. ID no. 13610874
MRKLRGIKIRRPIKQISRWILRRIKIRRSRYTRLSPNRPVCKPRAITKLISWGRSLTSHSARFIGSKCSNSGYIPIGQEPIREKPDPVPKGHSAVYIGKKDGDFQRVLVPIVYFNHPLFGELLREAEEEFGFSQEGGITIPCPYSDFKRVQTRIESGSGFCKFPWSRRWQ

SEQ ID NO: 102657 - DNA, 1592 bp, Arabidopsis thaliana
  misc_feature (1)..(1592): Ceres Seq. ID no. 13610879
  misc_feature (1)..(1592): Ortholog of  Ceres SEQ ID NO 14312176 as cited in SEQ ID NO 59203
gattgactaaaagtcattaaattacaaatctaaagttaaaagtgtttcgtctgaaatttcttgttagctccaaaagaggaaaacgaatccaagaaggagaaaaagtctcattcctcaagctccgcatcattcctccttcatggggtctctgcatcttacaatttagcactctcatattattattccttaaaccccttgttttgattttgtttccagatttaaagaaaccctaagacctcttcgaaatctccccagaaacacttatttcatttcttccttggccttgactacgcgtctttccttttactccggaaggaagatccagaaaggttttctttcgatcgttgcttttgactatgcatagatctggtacaacaatggcgtggaacgtattcaagttctgtactgccttacgaggtcttggatcgatcatgatccttttggttcttggtgttgtcggtgttacttattacgctgtcgttttgactaattatggtcctgcactctctcaaggtggccttgattctcttgctgctctcactatcttaatcctcttccatttcctcctggcaatgcttttgtggagctatttctcagtggtttttactgatcctggtgttgtgcctcctaattggagaccatctactgatgaagaaagaggtgaatctgatccgttaaatagtttggactttgttggtttacaatccgattcttcttcttcaaacccaagagttcggttttgtcggaagtgcaatcaactaaaaccttctcgttgtcatcattgttctgtttgtggtcggtgtgtgttgaagatggatcaccattgtgtttgggttgttaactgtgtaggagcactgaactataagtattttcttcttttcttgttctacacatttttagagacgacccttgtgactttggttcttatgccgcacttcattgcattctttagtgatgaagaaatacctggaaccccaggcactcttgctactacttttcttgcatttgttttgaacttggcatttgcgttgagcgtgatgggtttcttaattatgcatatttccttggtagctggcaataccacaactatagaggcatatgagaagaaaaccactacaaaatggcggtatgacctcggtaaaaagaaaaactttgaacaggtatttggaatggataagagatactggttaatcccaggatacacagaagaagatctaaggcgaatgccggagctgcagggacttgaatacccttcgaaacccgactttgattcccagtgatgctcaagaagactttgatcatcatcatcatcccatgtaaaacagcaatacgtagaaaaacagagcaagtggcatgtcaaggagaaatctactaacatgaagatggatgcttcactttaggcagtgtagatgtcttcccatggaaggctaagtcatcatcaaatttgtgggttttgaaaagaggatgattacaatttagctttgttggccacatatatgttcatcatcttcaatagttcatatatagatatgatcttattataaatgtagaacacacatgatttaccctaaatcctcttgactcttttgttt

SEQ ID NO: 102658 - protein, 307 aa, Arabidopsis thaliana; identical to SEQ ID NO: 30864
  peptide (1)..(307): Ceres Seq. ID no. 13610880

SEQ ID NO: 102659 - protein, 300 aa, Arabidopsis thaliana; identical to SEQ ID NO: 30865
  peptide (1)..(300): Ceres Seq. ID no. 13610881

SEQ ID NO: 102660 - protein, 282 aa, Arabidopsis thaliana; identical to SEQ ID NO: 30866
  peptide (1)..(282): Ceres Seq. ID no. 13610882

SEQ ID NO: 102661 - DNA, 1172 bp, Arabidopsis thaliana
  misc_feature (1)..(1172): Ceres Seq. ID no. 13610891
  misc_feature (1)..(1172): Ortholog of  Ceres SEQ ID NO 14314442 as cited in SEQ ID NO 52358
  misc_feature (1)..(1172): Ortholog of  Ceres SEQ ID NO 12610442 as cited in SEQ ID NO 56281
  misc_feature (1)..(1172): Ortholog of  Ceres SEQ ID NO 12610713 as cited in SEQ ID NO 56591
  misc_feature (1)..(1172): Ortholog of  Ceres SEQ ID NO 12587345 as cited in SEQ ID NO 62844
  misc_feature (1)..(1172): Ortholog of  Ceres SEQ ID NO 13597357 as cited in SEQ ID NO 68961
  misc_feature (1)..(1172): Ortholog of  Ceres SEQ ID NO 13587656 as cited in SEQ ID NO 0
  misc_feature (1)..(1172): Ortholog of  Ceres SEQ ID NO 14309353 as cited in SEQ ID NO 0
  misc_feature (1)..(1172): Ortholog of  Ceres SEQ ID NO 15177686 as cited in SEQ ID NO 0
tttgtctcgtcttccatgtccgatatatcgttaccagagaaagagagctcagagatttagttagcttaatttttcttttcgttttgaaattaaggaagtgattgttatcaccggaggagagagagaaaatgttgggaattttcagtggagctatagtatcgccgccggaagagttagtggctgccggaagcagaactccgtcgccgaaaacaaccggatcaactttagtaaaccggttcgtcgagaaaaatccatccgctgtttctgtacaagtcggcgactatgttcagcttgcttacagccatcacaacgagagtcctctccggcctagatcatttggagctaaggatgaaatattctgcttgttccaaggctcacttgacaacctaggaagcttgaaacagcagtacgggcttgcaaaaaacgcaaacgaggttctcttggtcatcgaggcttataagactctccgtgacagagctccttacccggctaaccacgttgttgctcacctaagtggcgatttcgcctttgtggtctttgataaatcaacctccactctgtttgtagcctctgaccaagttggcaaggttccattgtattggggaataacagctgatggctatgtggcatttgctgatgatgttgacttactaaaaggtgcttgtggcaagtctcttgcgtctttccctcaaggctgttattactcgacggcattaggtgggcttaggagcttcgagaaccctaagaacaagatcactgcagttcctgctaatgagggagaaatttggggagctaccttcaaggtggaaggagcaacagttcttgcagattgaaaatgaaagagaaacacaaaagaagtttcatgtctcttaaagctctcgaactgtaacagcacaaacaaaaaaaaatatgtaggaaaaacaaaaagctgttctatgagtacttgaagctatcaatggttggtgataatgtgtgtagtgttgtatctctcttatgtcttatgcttctttgtacagcacgtgtgtgtcttctggtgttattagtgtcttcttcctaataagttaatgtctctgaaacaaaaatctaccttctcttgatccttttgcctctgtttctatagtaaatctcacaatggtaatgaggaagaacaggcgatatctctgtttctatcg

SEQ ID NO: 102662 - protein, 234 aa, Arabidopsis thaliana; identical to SEQ ID NO: 23037
  peptide (1)..(234): Ceres Seq. ID no. 13610892

SEQ ID NO: 102663 - DNA, 560 bp, Arabidopsis thaliana
  misc_feature (1)..(560): Ceres Seq. ID no. 13610893
  misc_feature (1)..(560): Ortholog of  Ceres SEQ ID NO 14309497 as cited in SEQ ID NO 0
  misc_feature (1)..(560): Ortholog of  Ceres SEQ ID NO 15180320 as cited in SEQ ID NO 0
aaaacacagaacaacggaaaaggcaaatcgggatcagccaccggcgatgaaggaagacatggataagatggtggcggtagggctcgtatggggagccaccaatgctctgatccgtcgtggcgctcttgcctgggataaaacaaagtcttcttcgacaacagaatctcattctcctcctcttcagatccgccgcaaaatcatgattgctctccgcgactggatcaatctcctcctcttctggcaatactcaattcctttcctcataaacctctccgcctccgccacattcttcgcccttctcagtcacgctcccatctctcttgccgttccggtgactaacgccacaacctttgccgcaaccgccgcttttgggatccttttaggggaagaaactcaaatcggacttgctttgttaggtacgagctttattgtatttggaatttggctttgtgttctgtgaaattcgaattttgtaaaaccgtgactctgtttctgtgagatctattttgcgaaagaactatttgtgtaccatcttttgagaattttagctaactctctgc

SEQ ID NO: 102664 - protein, 152 aa, Arabidopsis thaliana; identical to SEQ ID NO: 36953
  peptide (1)..(152): Ceres Seq. ID no. 13610894

SEQ ID NO: 102665 - protein, 137 aa, Arabidopsis thaliana; identical to SEQ ID NO: 36954
  peptide (1)..(137): Ceres Seq. ID no. 13610895

SEQ ID NO: 102666 - protein, 133 aa, Arabidopsis thaliana; identical to SEQ ID NO: 36955
  peptide (1)..(133): Ceres Seq. ID no. 13610896

SEQ ID NO: 102667 - DNA, 1333 bp, Arabidopsis thaliana
  misc_feature (1)..(1333): Ceres Seq. ID no. 13610897
  misc_feature (1)..(1333): Ortholog of  Ceres SEQ ID NO 12578784 as cited in SEQ ID NO 20729
  misc_feature (1)..(1333): Ortholog of  Ceres SEQ ID NO 13658847 as cited in SEQ ID NO 66674
acatcttccttgtttcttctctctctctctctcccctcaaacttaaattcacattttaatacttgttacttcaactataataataataataatctttcttcattatatattttcctctcctctcagatcttctctctcaccatcttctcttgagatcaagattgagtattcttgtctcaagaatcgatactcgagagctcttatggaccaaaatggtcataacgacgaagcagaaacagtttcatgcggcaacggcaactgcaaaagcaagatcgtgcctggagatgatcacggtggagatgagagtagtggtaccaagagaaggaagaagagaaaaacgcaacaaaagacaatgaaacgacgtgaattaatgtcgtattgtgagctaccggagtacatgaaagacaacgaatacatattgaattattacagagctgattggtccattagagatgctttcttcagcgtatttagtttccacaatgagtccctcaatgtttggacacatttgattggttttatcttctttgtggcactaaccgtcgccaatattattcatcacgacggattcttccccgtggatgcaaagagtccagggaatgtaacaagatggcccttcttcgttttcttaggaggctcaatgttctgcctactcgcaagcagcatttgtcacctcttctgttgccactcaaaagagcttaatgtcttccttctccgaatagactatgccggtatcaccgccatgatcatcacttccttcttcccaccaatcttctacatcttccagtgcactcctcggtggtacttcatctacctcgcaggcatcacatccatgggaatcttcacaatcatcacacttttcaccccatcactttccgctcccaagtaccgagctttccgcgctttgctctttgcctccatggggctgtttgggattgtcccagctgcccacgcgctagtggtcaattggggaaacccgcaaaggaacgtgacgctcgtgtacgagttgcttatggcagtgttctatcttgttggaacaggattctacgtagggagagtgccagaaaggcttaaaccgggatggtttgatcgtgtgggacatagtcatcagatcttccatgtgttcgttttgttgggtgctttgtctcactatgcagctgctctcttgttcttggactggcgtgaccacgttggttgttaaaccatatatttgtaattcttttaaatataatattattaatttgttgtatcgtggtgaacaaaattgtaataacccatttgttttaaattgaattgtaattcaacttgtgttaattgttatgtttgttgaata

SEQ ID NO: 102668 - protein, 332 aa, Arabidopsis thaliana; identical to SEQ ID NO: 35710
  peptide (1)..(332): Ceres Seq. ID no. 13610898

SEQ ID NO: 102669 - protein, 282 aa, Arabidopsis thaliana; identical to SEQ ID NO: 35711
  peptide (1)..(282): Ceres Seq. ID no. 13610899

SEQ ID NO: 102670 - protein, 276 aa, Arabidopsis thaliana; identical to SEQ ID NO: 35712
  peptide (1)..(276): Ceres Seq. ID no. 13610900

SEQ ID NO: 102671 - DNA, 656 bp, Arabidopsis thaliana
  misc_feature (1)..(656): Ceres Seq. ID no. 13610905
  misc_feature (1)..(656): Ortholog of  Ceres SEQ ID NO 13622871 as cited in SEQ ID NO 0
tctctctacaacaaaatcagcgacagctcaaacgttgatatttttctccggcttttctagggtttaaattttctttccgatcagagattaatggcgactctagactccgacgttaccatgattcctgccggagaagcctccagcagcgtagccgcgtcgtcttccaacaagaaagctaagcgattcgaaattaagaagtggagcgccgttgctctctgggcttgggatatcgttgttgacaactgtgcgatctgcagaaaccacatcatggatctttgtatcgagtgtcaggctaatcaggccagtgccacaagtgaagagtgcactgtagcttggggggtttgcaatcacgccttccactttcactgcatcagcagatggctaaagactcgtcaagtttgtccattggataacagtgagtgggagtttcagaaatatggtcactaaatcaacaaatggttccagcaagcatgtgtctaatcgtgaagacatcaggttcatttggttaccaccgcatatgataactaaagattgttcaagtttttgccctttttttggtactgtattttacaatttgtggaaacagagatttactgttcagtgttcactaaacctattatggttgtgctttgggtgacgtctttgatttcaaaatt

SEQ ID NO: 102672 - protein, 118 aa, Arabidopsis thaliana; identical to SEQ ID NO: 21264
  peptide (1)..(118): Ceres Seq. ID no. 13610906

SEQ ID NO: 102673 - protein, 109 aa, Arabidopsis thaliana; identical to SEQ ID NO: 21265
  peptide (1)..(109): Ceres Seq. ID no. 13610907

SEQ ID NO: 102674 - protein, 66 aa, Arabidopsis thaliana; identical to SEQ ID NO: 21266
  peptide (1)..(66): Ceres Seq. ID no. 13610908

SEQ ID NO: 102675 - DNA, 2729 bp, Arabidopsis thaliana
  misc_feature (1)..(2729): Ceres Seq. ID no. 13610909
  misc_feature (1)..(2729): Ortholog of  Ceres SEQ ID NO 13597957 as cited in SEQ ID NO 60744
atgacctcatcgccatcagtggagaatggcggctcaggctcctctggatcatctgctcttttaggctgtatgcaacaattcaagctcttcgagactcaagcgaatttctatatgattggttggaacggtagtggagtatatagaatacttaagatagaccggctcgaagcatctgagcttaatctcagagaggattcgactgcgtataccaaaaaagaatgctacgagttgcttaaacggatacacgaaggaaacaaggcgactggtggactgaaacttgtcactgtttgttatggaatcattgggttcattaagtttttgggaccatattacatgctgcttataactgaaagaagagagataggtgaaatttgtggtcacattgtttacgaagtgtcaaagagtgatatgattgcattgcaacattctagcgtgctttgcaacactgcaaatttaagagacgagaacagtttccagaagaatatatgcgaccatgagagtggaggtactctctataagaaaatgtttgtgtggaacgaattcttgactcggggaactcgacatcaccttcggaataccctgtggactgtagcattggtgtatgggttttttaagcagacaatactttccgaagctggacggaatttcaaactcactcttattgctaggcgttcccgccataatgctggaaccaggtacttgaaacgaggaataaacgaaagtggcaatgttgctaatgatgtggaaacagaacagatagtgtctgaggatgttccagtagaccgtcccatgcaaataagttctgttgtgcagaatcgtggctcaatccctctattctggtcacaggagacctcacggatgaaagttaagcctgatatagcaactagagttcactttgaaaatcttgtggagcgttatggagtccccatcattattctgaacttgatcaagaccaacgagaggaaacccagggagtcgattctccgggcagagtttgctaatgcaattgactttataaacaaagatctgccggaagaaaatcggcttagattcctccactgggacttgcacaaacattttcacagcaaaacagaaaatgtattggcacttcttggaaaagtagctgcctgtgctttgatgctaacaggtttcttttattatcaacttacaccagcaatgaagcttgagggttatatgagcttgtcttcgtctgatgccgacacgtctccacataatagttctgatgatgatagtagggattatgactcattagagaagaattgccgcccaagtaagaatgttgcaaatggtgattatgatgtcaagcctagcaggctccagagtggagtgctgcggaccaactgcatagattgccttgatcgtacaaatgttgcccaatatgcatatggttgggctgctctagggcaacagcttcatgctttaggaattagagatgctccaacaatagaacttgatgatcctttgtctagtactttaatggggttatacgagagaatgggagacacactagcttatcaatatggtggatctgcagcccacaataaggcgaggccagtggagagcagcaacccagtcacaagagttcttgaggactctgcaacatttcttggtactttccggcctgaacaagggagccaggcggtttgggagttgcgttcagattcccactctaatggacgaagtggagagataagcatgggggaagatgaaaagtttcttgtaaagaggtgcttatcagatgggaatattctccatgaaagtcacactccgatgtctgcaatgagtagaaagaatgaaagcatatcacatagaggttttgtgtcgtcacaccaagtgactcgtactcatataatttcagaatcatcaccagatatgccagctgccggtgatgtaacattatcgaggtgtactccgtcaatgcctagcacacatttttttggagatgtccaaaaagttcaacataatggtagtagctccatttacttgtccgagcaagaagatatgtctagtgtctcaaatttcgttgatattgagtggctttcgtcgtcagaaaatctatgtgagaacgatcacttgtccaggccgtcagcgcttacaatatattcaaccgcagagacgtcttcatcagagaatatcatcactgaagtaaaacaattgacgccagctatgagagagagtggatcaagcagcaggaagggaaaagaaccagtggaaaccgaactgtctgtacacacaaagattcgcgatgatttcccagatagcttcaaacaatgggtagcatacggggaagcactctgccattgaagatctctcaactttccatttccaacaaagaacatactttgctttcaccaaacttaaaagtcttctgaacatttgggtataacggtgcaaacatggagaagcgactggtggaaagatcctcagtaccatgtatatgaggcttcacggtgacgaccgaacggtcaaaagagatagaactattaagaggagcaaatactaaataagctgagaagtttgagtttgcagtcttgcagagaaaacgaaaatttcatctttatggagagaagaaattaaacttgtgataatctgagacttttgttagggtctttttttggggggtttgaagtctgttgtaaatatctgtatcatttgttaatccatctcgtaaggtctttactattcgtaaaaaaaaaatccattcgtct

SEQ ID NO: 102676 - protein, 774 aa, Arabidopsis thaliana
  peptide (1)..(774): Ceres Seq. ID no. 13610910
MTSSPSVENGGSGSSGSSALLGCMQQFKLFETQANFYMIGWNGSGVYRILKIDRLEASELNLREDSTAYTKKECYELLKRIHEGNKATGGLKLVTVCYGIIGFIKFLGPYYMLLITERREIGEICGHIVYEVSKSDMIALQHSSVLCNTANLRDENSFQKNICDHESGGTLYKKMFVWNEFLTRGTRHHLRNTLWTVALVYGFFKQTILSEAGRNFKLTLIARRSRHNAGTRYLKRGINESGNVANDVETEQIVSEDVPVDRPMQISSVVQNRGSIPLFWSQETSRMKVKPDIATRVHFENLVERYGVPIIILNLIKTNERKPRESILRAEFANAIDFINKDLPEENRLRFLHWDLHKHFHSKTENVLALLGKVAACALMLTGFFYYQLTPAMKLEGYMSLSSSDADTSPHNSSDDDSRDYDSLEKNCRPSKNVANGDYDVKPSRLQSGVLRTNCIDCLDRTNVAQYAYGWAALGQQLHALGIRDAPTIELDDPLSSTLMGLYERMGDTLAYQYGGSAAHNKARPVESSNPVTRVLEDSATFLGTFRPEQGSQAVWELRSDSHSNGRSGEISMGEDEKFLVKRCLSDGNILHESHTPMSAMSRKNESISHRGFVSSHQVTRTHIISESSPDMPAAGDVTLSRCTPSMPSTHFFGDVQKVQHNGSSSIYLSEQEDMSSVSNFVDIEWLSSSENLCENDHLSRPSALTIYSTAETSSSENIITEVKQLTPAMRESGSSSRKGKEPVETELSVHTKIRDDFPDSFKQWVAYGEALCH

SEQ ID NO: 102677 - protein, 751 aa, Arabidopsis thaliana
  peptide (1)..(751): Ceres Seq. ID no. 13610911
MQQFKLFETQANFYMIGWNGSGVYRILKIDRLEASELNLREDSTAYTKKECYELLKRIHEGNKATGGLKLVTVCYGIIGFIKFLGPYYMLLITERREIGEICGHIVYEVSKSDMIALQHSSVLCNTANLRDENSFQKNICDHESGGTLYKKMFVWNEFLTRGTRHHLRNTLWTVALVYGFFKQTILSEAGRNFKLTLIARRSRHNAGTRYLKRGINESGNVANDVETEQIVSEDVPVDRPMQISSVVQNRGSIPLFWSQETSRMKVKPDIATRVHFENLVERYGVPIIILNLIKTNERKPRESILRAEFANAIDFINKDLPEENRLRFLHWDLHKHFHSKTENVLALLGKVAACALMLTGFFYYQLTPAMKLEGYMSLSSSDADTSPHNSSDDDSRDYDSLEKNCRPSKNVANGDYDVKPSRLQSGVLRTNCIDCLDRTNVAQYAYGWAALGQQLHALGIRDAPTIELDDPLSSTLMGLYERMGDTLAYQYGGSAAHNKARPVESSNPVTRVLEDSATFLGTFRPEQGSQAVWELRSDSHSNGRSGEISMGEDEKFLVKRCLSDGNILHESHTPMSAMSRKNESISHRGFVSSHQVTRTHIISESSPDMPAAGDVTLSRCTPSMPSTHFFGDVQKVQHNGSSSIYLSEQEDMSSVSNFVDIEWLSSSENLCENDHLSRPSALTIYSTAETSSSENIITEVKQLTPAMRESGSSSRKGKEPVETELSVHTKIRDDFPDSFKQWVAYGEALCH

SEQ ID NO: 102678 - protein, 737 aa, Arabidopsis thaliana
  peptide (1)..(737): Ceres Seq. ID no. 13610912
MIGWNGSGVYRILKIDRLEASELNLREDSTAYTKKECYELLKRIHEGNKATGGLKLVTVCYGIIGFIKFLGPYYMLLITERREIGEICGHIVYEVSKSDMIALQHSSVLCNTANLRDENSFQKNICDHESGGTLYKKMFVWNEFLTRGTRHHLRNTLWTVALVYGFFKQTILSEAGRNFKLTLIARRSRHNAGTRYLKRGINESGNVANDVETEQIVSEDVPVDRPMQISSVVQNRGSIPLFWSQETSRMKVKPDIATRVHFENLVERYGVPIIILNLIKTNERKPRESILRAEFANAIDFINKDLPEENRLRFLHWDLHKHFHSKTENVLALLGKVAACALMLTGFFYYQLTPAMKLEGYMSLSSSDADTSPHNSSDDDSRDYDSLEKNCRPSKNVANGDYDVKPSRLQSGVLRTNCIDCLDRTNVAQYAYGWAALGQQLHALGIRDAPTIELDDPLSSTLMGLYERMGDTLAYQYGGSAAHNKARPVESSNPVTRVLEDSATFLGTFRPEQGSQAVWELRSDSHSNGRSGEISMGEDEKFLVKRCLSDGNILHESHTPMSAMSRKNESISHRGFVSSHQVTRTHIISESSPDMPAAGDVTLSRCTPSMPSTHFFGDVQKVQHNGSSSIYLSEQEDMSSVSNFVDIEWLSSSENLCENDHLSRPSALTIYSTAETSSSENIITEVKQLTPAMRESGSSSRKGKEPVETELSVHTKIRDDFPDSFKQWVAYGEALCH

SEQ ID NO: 102679 - DNA, 1916 bp, Arabidopsis thaliana
  misc_feature (1)..(1916): Ceres Seq. ID no. 13610921
  misc_feature (1)..(1916): Ortholog of  Ceres SEQ ID NO 13600220 as cited in SEQ ID NO 0
gagctctccttcatttcatcctcaacaaattcctacaccaatatctttagctagagagaaaaaaagagtgaggaaactagagagagagaccacccaataatggtgaggttcgagaaggttcatttagtgttagggttagctctggttctaactctggtcggagctccgaccaaagcccaaggacctgtttgcggtgcaggcctgcctgacaaatttagcagattaaacttccctgaaggcttcatttggggaaccgcaacagcagcatttcaggttgaaggagctgttaatgaaggttgcagaggtccaagcatgtgggatactttcactaagaagttcccacatagatgtgaaaatcataacgctgatgttgctgtggatttctatcatcgttacaaggaagatatccagttgatgaaagaccttaacactgatgcttttagactttctattgcgtggcccagaatattcccccatggaaggatgtctaagggaataagcaaagtgggagtccaattctaccacgacctcatcgatgagcttctcaaaaacaatataataccattagttacagtctttcattgggatactccccaagacttggaagatgaatatggtggtttcttaagtggtcgcatcgtgcaagattttaccgaatatgcgaatttcactttccacgaatatggacacaaagtgaaacattggatcacatttaacgagccatgggtgtttagtcgtgccggttacgacaacggaaagaaagctccgggacgttgttcgccgtacatccccggttatggacagcattgtcaggatgggcggtctggatacgaagcttatcaagtcagtcacaacttactcttgtcgcatgcttacgctgttgacgcattcagaaactgcaaacagtgtgctggaggtaaaattggaattgcacacagtccagcttggttcgaaccacaagaccttgagcatgttggaggttccattgaacgtgtgcttgatttcatcctaggatggcatttggctccaacaacttatggagattatccacaatcgatgaaggatcgtgtcggtcatagattgccaaaattcacagaagctgagaagaagttgctaaagggttctacagattacgtaggaatgaattactatacttcagtgtttgcaaaagaaattagccctgatcctaagagtccgagttggacgactgattctcttgttgattgggatagcaagagtgtggatggatacaaaattggtagcaagccgtttaatggtaaactggatgtgtattcaaaaggtttgagataccttttgaagtatattaaggataactatggcgacccagaagttatcattgccgagaatggatacggagaagaccttggagagaagcacaatgacgtaaactttgggacacaagatcacaacagaaaatattatatccaaaggcatctcttgagtatgcacgacgccatttgcaaggacaaagtgaacgttacgggatactttgtgtggtctttgatggacaactttgagtggcaagatgggtacaaggcgaggttcggactttactacatcgatttccagaacaacttgacccgtcaccaaaaagtttcgggcaaatggtattccgaattcctcaaaccacagtttccaacctccaagctgagggaagaactctagatgatcaagaatcctatcgggacaaaataattgagtacaagagtcttgaagatgttgttgaggataatatcagtttgtgtgttctatggatcgttttcatctaccggtccttcctatgttagaaggacttgtgagttgttcgagttttaataatatcaataaatgtcttcttttttaatatatgttgagttaataattaaatctgcttatcgaaaagaacagataaaata

SEQ ID NO: 102680 - protein, 528 aa, Arabidopsis thaliana [sequence omitted]

SEQ ID NO: 102681 - protein, 457 aa, Arabidopsis thaliana; identical to SEQ ID NO: 36062
  peptide (1)..(457): Ceres Seq. ID no. 13610923

SEQ ID NO: 102682 - protein, 423 aa, Arabidopsis thaliana; identical to SEQ ID NO: 36063
  peptide (1)..(423): Ceres Seq. ID no. 13610924

SEQ ID NO: 102683 - DNA, 776 bp, Arabidopsis thaliana
  misc_feature (1)..(776): Ceres Seq. ID no. 13610933
  misc_feature (1)..(776): Ortholog of  Ceres SEQ ID NO 14311545 as cited in SEQ ID NO 51451
aaagctaagccaaactcagtggctctccggtgaagctttgagatggcgatccttattccggcgagtttcgggcgattaacaattacgtcgcgtgcacaagttagagtgagagtttctgcttctgctaaccaacgcactattcgtcgcgattcagtggattgggttaaggaaacttcaagctttttcgaagaagataaaaggccgatcatgttgttcgacggtgtttgtaatctctgtaatggaggtgtgaaatttgttagagaccatgatcgaaacaggagcataaggtttgaagcattacagagtgaagcgggcaagaaactgttattgcggtcaggaagagctcctgacgatatatcgagtgtcgtactagtcgaaaacgataggtcttacataaagtcagaagcagttttgaagatcatgaaatacattgacttaccatttccacagcttgcgttcttcttgcagtttgctcctctgtttgtgagagactttttgtatgaaaatgttgcaaacaatcgatatgcaatgtttggtcgatctgattcatgtgagctctaagaatacatatgtgatcctactttgccacaaaaaaaaaaactagatatgtaatcctacagattaatataagcttttatacagatgtatagtttacaacagccattaaacaatagatacatatgtactacttttcgaatcatgtactcgtcaaatgtataacctttccgacgttgatatttgtgttatatatatggaaaaaaacttgggattgtgtg

SEQ ID NO: 102684 - protein, 172 aa, Arabidopsis thaliana; identical to SEQ ID NO: 25746
  peptide (1)..(172): Ceres Seq. ID no. 13610934

SEQ ID NO: 102685 - protein, 117 aa, Arabidopsis thaliana; identical to SEQ ID NO: 25747
  peptide (1)..(117): Ceres Seq. ID no. 13610935

SEQ ID NO: 102686 - DNA, 765 bp, Arabidopsis thaliana
  misc_feature (1)..(765): Ceres Seq. ID no. 13610960
  misc_feature (1)..(765): Ortholog of  Ceres SEQ ID NO 13662677 as cited in SEQ ID NO 63824
atcttcgagggaaagagaaagatcacaagaaaagctctctcagaataatcgcaatggcttcaaagctcgtgatcatcattgtgttcattctagatctcattgctgttggattagccattgctgccgaacaaagaagaagtgtcggtaaggttgttccggatggtgagaaggaatttgagcattgtgagtatggctcagacatagctacaagttatggagctggtgcatttgtgcttctcttcattagtcaagtcattattatggtggctagtcggtgtttctgctgcggcaaagctcttaaacccggtggttcaagagcttgtggcattatgctcttccttatttgctgggtgtttttcttgattgctgaggtatgtttgctcgcgggatcaatcagaaacgcgtaccacactacgtacagaaggatgtggaacatcgaaaaccctcctagctgtgaagtgatccgtaaaggagtgtttgctgctggtgcttcctttgctctcttcactgctattgtctctcagttctattacatctcctattctcgtgcccgagacggttaccaaaccccacattactagtgagtagtgagatccagaacaagaaaagctaaaccctgaatgagtttgtccatttatccactcactgatcaataggatattaaaatttgatgatgttagtcattttgcttcttgcttgtatcacaattgtttttttttgttttcttgtgatgtataaaatcttattaatatagacagctattct

SEQ ID NO: 102687 - protein, 192 aa, Arabidopsis thaliana
  peptide (1)..(192): Ceres Seq. ID no. 13610961
LRGKEKDHKKSSLRIIAMASKLVIIIVFILDLIAVGLAIAAEQRRSVGKVVPDGEKEFEHCEYGSDIATSYGAGAFVLLFISQVIIMVASRCFCCGKALKPGGSRACGIMLFLICWVFFLIAEVCLLAGSIRNAYHTTYRRMWNIENPPSCEVIRKGVFAAGASFALFTAIVSQFYYISYSRARDGYQTPHY

SEQ ID NO: 102688 - protein, 175 aa, Arabidopsis thaliana
  peptide (1)..(175): Ceres Seq. ID no. 13610962
MASKLVIIIVFILDLIAVGLAIAAEQRRSVGKVVPDGEKEFEHCEYGSDIATSYGAGAFVLLFISQVIIMVASRCFCCGKALKPGGSRACGIMLFLICWVFFLIAEVCLLAGSIRNAYHTTYRRMWNIENPPSCEVIRKGVFAAGASFALFTAIVSQFYYISYSRARDGYQTPHY

SEQ ID NO: 102689 - protein, 106 aa, Arabidopsis thaliana
  peptide (1)..(106): Ceres Seq. ID no. 13610963
MVASRCFCCGKALKPGGSRACGIMLFLICWVFFLIAEVCLLAGSIRNAYHTTYRRMWNIENPPSCEVIRKGVFAAGASFALFTAIVSQFYYISYSRARDGYQTPHY

SEQ ID NO: 102690 - DNA, 1615 bp, Arabidopsis thaliana
  misc_feature (1)..(1615): Ceres Seq. ID no. 13610972
  misc_feature (1)..(1615): Ortholog of  Ceres SEQ ID NO 14308598 as cited in SEQ ID NO 60416
  misc_feature (1)..(1615): Ortholog of  Ceres SEQ ID NO 13502952 as cited in SEQ ID NO 62271
  misc_feature (1)..(1615): Ortholog of  Ceres SEQ ID NO 13502973 as cited in SEQ ID NO 68052
  misc_feature (1)..(1615): Ortholog of  Ceres SEQ ID NO 13596000 as cited in SEQ ID NO 68188
atacaatcgtcttcttcatcattttctcttcttcttctccaagaaaacactgaagaagaaatggggttccttaagccaaccatggcgattctttttctagcgatggtcgccgtttcatcagccgtggacatgtcaatcatctcctacgacgagaaacatggcgtctccaccaccggtggccgtagcgaagccgaggttatgagtatctacgaggcatggttggtgaaacacggcaaggctcagagccagaactctcttgttgagaaagatcgacggttcgagatctttaaagacaatcttcgtttcgtcgatgaacataacgagaagaatcttagttatagattgggtttgactcgttttgcggatcttactaacgatgagtatagatccaagtatcttggagctaagatggagaagaaaggtgagagaaggactagcctacggtacgaggctcgtgtcggtgatgagctaccggagtctattgactggaggaagaaaggagccgtggctgaggtcaaagatcagggtggttgcgggagttgttgggcgttttcaaccattggagcagtggagggaataaaccagatcgtaaccggagacctaataaccttgtctgaacaagagttggtcgattgtgacacttcatacaacgaaggttgtaacggaggtcttatggactatgcttttgagttcattatcaagaatggtggaatcgatacagacaaagattatccttacaagggtgttgatggaacttgtgaccagatcaggaaaaacgctaaagttgtcactatcgattcatatgaggatgttccaacttacagcgaggaatcgttgaagaaagcagttgctcatcaacccattagcattgccattgaggctggtggtcgtgcgttccagctctatgattcgggtatatttgatggaagttgtggaacacaactagaccacggagttgtggcggttggatacggaactgagaacggcaaagattactggattgtgagaaactcatggggtaaaagctggggagagagtggatacctaaggatggcgcgtaacattgcgtcttcatcaggaaaatgtggaatcgcgattgaaccttcatacccgataaagaatggcgaaaacccgccaaacccgggaccttcacctccatctcccatcaagcctccaacccaatgtgacagttactacacttgtcctgagagcaacacttgttgttgtctgtttgagtatggcaagtattgctttgcttggggatgttgcccactagaagcagccacttgctgtgatgacaactatagttgctgccctcacgagtacccggtttgtgaccttgatcaaggaacctgtttattgagcaagaacagtccatttagtgttaaggccttaaagcgtaaacccgcaacgccattctggtcacaaggcagaaagaacattgcctaaacattgcttcttcaagaggactctggctcatgagagaagagatctctctgaagggatttatcagatgctttttaatgttgttgtttatgccataactagatacataaaaaatgcagctgttgggtttcgtgtatataaaaaaaggaccctatgtttcattcagttt

SEQ ID NO: 102691 - protein, 482 aa, Arabidopsis thaliana
  peptide (1)..(482): Ceres Seq. ID no. 13610973
IQSSSSSFSLLLLQENTEEEMGFLKPTMAILFLAMVAVSSAVDMSIISYDEKHGVSTTGGRSEAEVMSIYEAWLVKHGKAQSQNSLVEKDRRFEIFKDNLRFVDEHNEKNLSYRLGLTRFADLTNDEYRSKYLGAKMEKKGERRTSLRYEARVGDELPESIDWRKKGAVAEVKDQGGCGSCWAFSTIGAVEGINQIVTGDLITLSEQELVDCDTSYNEGCNGGLMDYAFEFIIKNGGIDTDKDYPYKGVDGTCDQIRKNAKVVTIDSYEDVPTYSEESLKKAVAHQPISIAIEAGGRAFQLYDSGIFDGSCGTQLDHGVVAVGYGTENGKDYWIVRNSWGKSWGESGYLRMARNIASSSGKCGIAIEPSYPIKNGENPPNPGPSPPSPIKPPTQCDSYYTCPESNTCCCLFEYGKYCFAWGCCPLEAATCCDDNYSCCPHEYPVCDLDQGTCLLSKNSPFSVKALKRKPATPFWSQGRKNIA

SEQ ID NO: 102692 - protein, 462 aa, Arabidopsis thaliana; identical to SEQ ID NO: 25940
  peptide (1)..(462): Ceres Seq. ID no. 13610974

SEQ ID NO: 102693 - protein, 455 aa, Arabidopsis thaliana; identical to SEQ ID NO: 25941
  peptide (1)..(455): Ceres Seq. ID no. 13610975

SEQ ID NO: 102694 - DNA, 1475 bp, Arabidopsis thaliana
  misc_feature (1)..(1475): Ceres Seq. ID no. 13610984
  misc_feature (1)..(1475): Ortholog of  Ceres SEQ ID NO 15170155 as cited in SEQ ID NO 64363
ttttttgttctccgaacgttctctcctctctgtctatcatcgaacgccgtcgctctcgccgttgacttctaccagtgaccccaacgccttcaatttccgcctcgtcggataatttcatcggagaagacaatggtgatggaagttacagagactgagcgatggtgcgttgtaactggtggtagaggattcgctgcaagacatcttgtagaaatgctcgtacgttaccaaatgttccacgttcgtatcgccgatttagctcctgcgatagtgctcaatcctcacgaggaaactggaattctcggtgaagcaattagatccggtagagttcaatacgtctccgctgatcttcggaacaaaactcaagttgtcaaaggttttcaaggagcagaagtggtgtttcatatggcagctccagattcatcgattaacaatcaccagcttcagtactcagttaatgttcaagggacaacaaatgtaattgatgcttgtattgaggttggagtaaagaggctaatctatacaagttctccgagtgttgtgtttgacggggtccatggtactttgaatgctgatgaatcactgccgtatccacctaagcataatgattcatattcagctactaaagctgaaggggaagctttgattttgaaagcgaatggaagaagtggactactcacttgttgcatacgtcctagcagcatatttggtcctggtgataaattaatggttccatcgcttgttactgctgccagggctgggaaatccaagttcattataggtgatgggagtaacttctatgatttcacttatgttgaaaatgttgtgcacgcccatgtctgtgctgagcgagctctagcatcaggaggagaagtatgtgcaaaagctgctggccaggcttacttcattaccaacatggagccaattaaattttgggagtttatgtcacagcttcttgaaggacttggctatgagaggccaagtataaagatacctgcaagtctcatgatgccaatagcatatcttgtggaactagcatataaattactcggaccgtatgggatgaaagtaccagtgctaacaccttctagggttaggctactctcttgcaacagaacatttgattcttcaaaagcaaaggatcgtttaggctattctcctgttgtcccacttcaggaaggtataaagaggacaatagattcattctcacacttgaaagctcaaaatcaacccaaaacagaagagaaaatgaaagtgttcgggagcaagaagatcgactaaagaatactccaaatttgagctttgtgtaaggtaaacaacgacttattttttcctctatacattgataaacatgactcctgcctgtgtagatggatgttgtttggtctgagttttgcgtcgtttattttacgatttgtaatttgaactctgtaactgtcgatttcggttactctgataccaaaatctatgaattgatg

SEQ ID NO: 102695 - protein, 382 aa, Arabidopsis thaliana
  peptide (1)..(382): Ceres Seq. ID no. 13610985
MVMEVTETERWCVVTGGRGFAARHLVEMLVRYQMFHVRIADLAPAIVLNPHEETGILGEAIRSGRVQYVSADLRNKTQVVKGFQGAEVVFHMAAPDSSINNHQLQYSVNVQGTTNVIDACIEVGVKRLIYTSSPSVVFDGVHGTLNADESLPYPPKHNDSYSATKAEGEALILKANGRSGLLTCCIRPSSIFGPGDKLMVPSLVTAARAGKSKFIIGDGSNFYDFTYVENVVHAHVCAERALASGGEVCAKAAGQAYFITNMEPIKFWEFMSQLLEGLGYERPSIKIPASLMMPIAYLVELAYKLLGPYGMKVPVLTPSRVRLLSCNRTFDSSKAKDRLGYSPVVPLQEGIKRTIDSFSHLKAQNQPKTEEKMKVFGSKKID

SEQ ID NO: 102696 - protein, 380 aa, Arabidopsis thaliana
  peptide (1)..(380): Ceres Seq. ID no. 13610986
MEVTETERWCVVTGGRGFAARHLVEMLVRYQMFHVRIADLAPAIVLNPHEETGILGEAIRSGRVQYVSADLRNKTQVVKGFQGAEVVFHMAAPDSSINNHQLQYSVNVQGTTNVIDACIEVGVKRLIYTSSPSVVFDGVHGTLNADESLPYPPKHNDSYSATKAEGEALILKANGRSGLLTCCIRPSSIFGPGDKLMVPSLVTAARAGKSKFIIGDGSNFYDFTYVENVVHAHVCAERALASGGEVCAKAAGQAYFITNMEPIKFWEFMSQLLEGLGYERPSIKIPASLMMPIAYLVELAYKLLGPYGMKVPVLTPSRVRLLSCNRTFDSSKAKDRLGYSPVVPLQEGIKRTIDSFSHLKAQNQPKTEEKMKVFGSKKID

SEQ ID NO: 102697 - protein, 355 aa, Arabidopsis thaliana
  peptide (1)..(355): Ceres Seq. ID no. 13610987
MLVRYQMFHVRIADLAPAIVLNPHEETGILGEAIRSGRVQYVSADLRNKTQVVKGFQGAEVVFHMAAPDSSINNHQLQYSVNVQGTTNVIDACIEVGVKRLIYTSSPSVVFDGVHGTLNADESLPYPPKHNDSYSATKAEGEALILKANGRSGLLTCCIRPSSIFGPGDKLMVPSLVTAARAGKSKFIIGDGSNFYDFTYVENVVHAHVCAERALASGGEVCAKAAGQAYFITNMEPIKFWEFMSQLLEGLGYERPSIKIPASLMMPIAYLVELAYKLLGPYGMKVPVLTPSRVRLLSCNRTFDSSKAKDRLGYSPVVPLQEGIKRTIDSFSHLKAQNQPKTEEKMKVFGSKKID

SEQ ID NO: 102698 - DNA, 1582 bp, Arabidopsis thaliana
  misc_feature (1)..(1582): Ceres Seq. ID no. 13611006
  misc_feature (1)..(1582): Ortholog of  Ceres SEQ ID NO 15169350 as cited in SEQ ID NO 53271
cgatttgtccgactcatcatcttctttctctttctgtctctctctctctctgttcgaatcgaaaccctaacaaatccgaaattgtctctgagattgaaattgccccaatttaatggcgtaaagcttcaccaatttcatcaattcgatatcaatttttgaaatttcgaagaaaggaagaaactttgaaaagagaaagcaaaatgtcaagagagacgacgacggaagcaacgcctttgattttaaccgacggaggaggaggaaggagatcggtgagaagacaagggttaagagaagcggcgaggttactaagacatgcaagtagcgggagaatgatgatgagagagccatcgatgcttgttcgtgaagctgcggctgagcagcttgaagagagacaaagcgattgggcttattcgaaacctgtagtggttttggatttcgtttggaatcttgcttttgtcgttgttgctacagctgttttggtacttagcagcgatgagaatccgaatatgcctcttagggtttggattattgggtatgggttgcaatgtatgatgcatatggtttgtgtttgtgttgagtatcgtaggaggaatagtagaagaagaagagatttgagtccaagatctagctcttcttcttcttcttcttcttcttctatggatgaagaagaaggtttgggtttgagtagaaactcagatgaacgttacttggagctaggtcaattagagaatgaaaacaatagttttgctaagcatctagaatctgcaaatacgatgatctcatttatatggtgggttattggattttattgggtatcttctggtggtcaagagttagcacaaggatccccacagctttattggttgtgtatagtctttcttggtttcgatgtgttctttgttgttttctgcgttgcattggcttgtgttatcggcattgctgtttgctgctgcttgccttgcatcattgcagttctatacgccgtagcagaacaggaaggagcttcgaaagaagacattgaccaacttactaaattcaaattccgaaaggttggtgatactatgaaacacactgttgatgaagaacaaggacaaggagattctggaggagtgatgactgaatgtggtacagattcacccgttgaacatgctcttcctcatgaggatgcagaatgctgcatttgtctttccgcttatgaagacgagacagagctaagagaacttccttgtggccaccatttccattgcggttgtgtggataaatggctttacataaatgctacttgtcccctctgcaaatacaacatcctcaagagtagcaactacgaagaaggcgaggaagtctagaagactagaacagtaagaagaggaaacttgcaaatatgcgaatatctgtatcatttagcagctgaggaacccatgagaaaaagggttcgagatttgatcaatttgttgtttacattgcttgttatatgtttacacattttagttgcttttttctttggagtctgtatgttctgttgttgtcgactcttgttaacatgttttggtacttacttgctcaacaagttaacaacatcttg

SEQ ID NO: 102699 - protein, 381 aa, Arabidopsis thaliana
  peptide (1)..(381): Ceres Seq. ID no. 13611007
MSRETTTEATPLILTDGGGGRRSVRRQGLREAARLLRHASSGRMMMREPSMLVREAAAEQLEERQSDWAYSKPVVVLDFVWNLAFVVVATAVLVLSSDENPNMPLRVWIIGYGLQCMMHMVCVCVEYRRRNSRRRRDLSPRSSSSSSSSSSSMDEEEGLGLSRNSDERYLELGQLENENNSFAKHLESANTMISFIWWVIGFYWVSSGGQELAQGSPQLYWLCIVFLGFDVFFVVFCVALACVIGIAVCCCLPCIIAVLYAVAEQEGASKEDIDQLTKFKFRKVGDTMKHTVDEEQGQGDSGGVMTECGTDSPVEHALPHEDAECCICLSAYEDETELRELPCGHHFHCGCVDKWLYINATCPLCKYNILKSSNYEEGEEV

SEQ ID NO: 102700 - protein, 338 aa, Arabidopsis thaliana
  peptide (1)..(338): Ceres Seq. ID no. 13611008
MMMREPSMLVREAAAEQLEERQSDWAYSKPVVVLDFVWNLAFVVVATAVLVLSSDENPNMPLRVWIIGYGLQCMMHMVCVCVEYRRRNSRRRRDLSPRSSSSSSSSSSSMDEEEGLGLSRNSDERYLELGQLENENNSFAKHLESANTMISFIWWVIGFYWVSSGGQELAQGSPQLYWLCIVFLGFDVFFVVFCVALACVIGIAVCCCLPCIIAVLYAVAEQEGASKEDIDQLTKFKFRKVGDTMKHTVDEEQGQGDSGGVMTECGTDSPVEHALPHEDAECCICLSAYEDETELRELPCGHHFHCGCVDKWLYINATCPLCKYNILKSSNYEEGEEV

SEQ ID NO: 102701 - protein, 337 aa, Arabidopsis thaliana
  peptide (1)..(337): Ceres Seq. ID no. 13611009
MMREPSMLVREAAAEQLEERQSDWAYSKPVVVLDFVWNLAFVVVATAVLVLSSDENPNMPLRVWIIGYGLQCMMHMVCVCVEYRRRNSRRRRDLSPRSSSSSSSSSSSMDEEEGLGLSRNSDERYLELGQLENENNSFAKHLESANTMISFIWWVIGFYWVSSGGQELAQGSPQLYWLCIVFLGFDVFFVVFCVALACVIGIAVCCCLPCIIAVLYAVAEQEGASKEDIDQLTKFKFRKVGDTMKHTVDEEQGQGDSGGVMTECGTDSPVEHALPHEDAECCICLSAYEDETELRELPCGHHFHCGCVDKWLYINATCPLCKYNILKSSNYEEGEEV

SEQ ID NO: 102702 - DNA, 1394 bp, Arabidopsis thaliana
  misc_feature (1)..(1394): Ceres Seq. ID no. 13611010
  misc_feature (1)..(1394): Ortholog of  Ceres SEQ ID NO 14312844 as cited in SEQ ID NO 55601
  misc_feature (1)..(1394): Ortholog of  Ceres SEQ ID NO 14312866 as cited in SEQ ID NO 55630
  misc_feature (1)..(1394): Ortholog of  Ceres SEQ ID NO 13597376 as cited in SEQ ID NO 64002
  misc_feature (1)..(1394): Ortholog of  Ceres SEQ ID NO 13503573 as cited in SEQ ID NO 65402
  misc_feature (1)..(1394): Ortholog of  Ceres SEQ ID NO 13659615 as cited in SEQ ID NO 67248
aaaagcaaaaaagctttctctttctctacctttttccttaatttcacttttgcggcgtcgttcttatctactcacaagaaagcaaccgatcaaataactcccagaataaagaaagactcaaactttattctctctctctttcttaaatagtgaagaaagcttcgattttgggaagtgggtttgttcgaaaaatgggttcttctgtggaacagaacattttggtgactggtggtgctggattcattggaacacatactgttgttcagcttttgaatcagggttttaaggttacgatcattgataatcttgataactctgtcgttgaagctgttcatagggttagggaacttgttggtcctgatctctctaccaagcttgaattcaatctgggtgatctaagaaacaaaggagatattgagaaactcttttccaatcagagatttgatgctgtgattcactttgctggtcttaaagctgtgggagaaagtgttggaaaccctcgtcgttactttgataataacttagttggaactatcaatctatatgagaccatggcaaaatacaactgcaaaatgatggtgttttcgtcgtctgcaacagtttatggtcaacctgaaatagtcccatgtgtggaagactttgagttacaggctatgaatccttatggtcgtactaagctgtttcttgaagagatagctagagacattcacgctgcggaaccagaatggaagataattcttctgaggtacttcaatccggttggagctcacgagagtggaagaattggagaagatccaaagggcataccgaataatctcatgccttatatccaacaagtggcggttggaagattacctgaactcaatgtatttggacatgattatcctaccatggatggtagcgcggttagagactacatccatgtaatggatttagcagatggccatgtggctgcgttaaacaaattgttttcagactcaaagattggctgtactgcttataatcttggcactggtcaaggaacttctgtcttagaaatggtttcttcttttgaaaaagcttctggcaagaaaatacctatcaagctatgtccaagaagagctggagatgcaacagctgtttatgcttcaactcagaaagctgagaaggaacttggctggaaggcaaaatatggagttgatgagatgtgcagagatcaatggaactgggcaaataagaatccatggggtttccagaagaagccttgattgattttgttttgtttcaccactcaatataaagaaaaaaaaagatatagatgtcgttttattttcctgcatctatttgatttctctcttcaaaaaaagttgtattgaactcgtcatctttcggttaataaagtataaagtttatct

SEQ ID NO: 102703 - protein, 351 aa, Arabidopsis thaliana
  peptide (1)..(351): Ceres Seq. ID no. 13611011
MGSSVEQNILVTGGAGFIGTHTVVQLLNQGFKVTIIDNLDNSVVEAVHRVRELVGPDLSTKLEFNLGDLRNKGDIEKLFSNQRFDAVIHFAGLKAVGESVGNPRRYFDNNLVGTINLYETMAKYNCKMMVFSSSATVYGQPEIVPCVEDFELQAMNPYGRTKLFLEEIARDIHAAEPEWKIILLRYFNPVGAHESGRIGEDPKGIPNNLMPYIQQVAVGRLPELNVFGHDYPTMDGSAVRDYIHVMDLADGHVAALNKLFSDSKIGCTAYNLGTGQGTSVLEMVSSFEKASGKKIPIKLCPRRAGDATAVYASTQKAEKELGWKAKYGVDEMCRDQWNWANKNPWGFQKKP

SEQ ID NO: 102704 - protein, 231 aa, Arabidopsis thaliana
  peptide (1)..(231): Ceres Seq. ID no. 13611012
MAKYNCKMMVFSSSATVYGQPEIVPCVEDFELQAMNPYGRTKLFLEEIARDIHAAEPEWKIILLRYFNPVGAHESGRIGEDPKGIPNNLMPYIQQVAVGRLPELNVFGHDYPTMDGSAVRDYIHVMDLADGHVAALNKLFSDSKIGCTAYNLGTGQGTSVLEMVSSFEKASGKKIPIKLCPRRAGDATAVYASTQKAEKELGWKAKYGVDEMCRDQWNWANKNPWGFQKKP

SEQ ID NO: 102705 - protein, 224 aa, Arabidopsis thaliana
  peptide (1)..(224): Ceres Seq. ID no. 13611013
MMVFSSSATVYGQPEIVPCVEDFELQAMNPYGRTKLFLEEIARDIHAAEPEWKIILLRYFNPVGAHESGRIGEDPKGIPNNLMPYIQQVAVGRLPELNVFGHDYPTMDGSAVRDYIHVMDLADGHVAALNKLFSDSKIGCTAYNLGTGQGTSVLEMVSSFEKASGKKIPIKLCPRRAGDATAVYASTQKAEKELGWKAKYGVDEMCRDQWNWANKNPWGFQKKP

SEQ ID NO: 102706 - DNA, 1339 bp, Arabidopsis thaliana
  misc_feature (1)..(1339): Ceres Seq. ID no. 13611018
  misc_feature (1)..(1339): Ortholog of  Ceres SEQ ID NO 14313060 as cited in SEQ ID NO 59447
  misc_feature (1)..(1339): Ortholog of  Ceres SEQ ID NO 12624676 as cited in SEQ ID NO 61197
atgggacaaaataaaccagtccagaaaaagtctccattatatgaagaaagtactatcatttttgcttcaagtcaaaatgaaaaacttgttgagatagagaaagagaagagacttgcgttaatagatgcatgggaagagaacgagaaggcaaaagctcaaaccaaggcttacaaagaactttgctcgattgaatcatgggaaaacaacatgaagacagctctagagttagatttgaagaaaatggaggagaatttacaagtggagaaaactgaattctcaaaaaaattcaagaaaaaaatacctgaaattgagaagattgcagaagccaaaagagaaaaaatagagaaacaaaaggagcaagaatctatcaaagtcgaaaaaataatgctctcacctaacgcagattcttcttctctaccatattcgttgaaaccagagaagatggtgggtgtgtcgccgaagatcgctccgtcgatgttgtcatcggactttgcaaatcttgccgcggaggctaagcggatgatcgatttgggcgccaattggcttcacatggacattatggacgggcattttgtttctaacctaacgattggtgctcctgtcatcgagagtttgaggaagcacacaaatgcatatcttgattgccacttaatggtgacgaaccccatggattatgtggatcagatggctaaagctggggcgtctggtttcacattccacgttgaggtggcccaagagaattggcaagaacttgtgaagaagattaaggctgctgggatgaggccaggtgtggctctaaagcctggaacacctgttgaacaagtctatcctctggtcgaaggtacaaatccggtcgaaatggttcttgtgatgactgtggagcctggatttggaggccagaagttcatgcccagcatgatggacaaggtcagggcattgaggaacaagtacccaacacttgatattgaggtggacggcggcttaggcccttccacaatcgatgcagcagctgcagctggagccaactgtatcgtcgcaggaagttcagtgtttggagctccgaagcctggggacgtcatatcccttttgcgggctagtgttgagaaagcacaaccctccacttaaggaagttggtgccctaactctatgagccaaggtcttaagctaatacttttttatttctttgaaatggaataaaccttagatcttagttacttgttatacaattaaaatgtgtctgagagcttttgccctagcgatgaaattccacaagaaaatcaccggagatagaattttttgttaagaaattgtttattatgtagcagttacattttagtct

SEQ ID NO: 102707 - protein, 374 aa, Arabidopsis thaliana
  peptide (1)..(374): Ceres Seq. ID no. 13611019
MGQNKPVQKKSPLYEESTIIFASSQNEKLVEIEKEKRLALIDAWEENEKAKAQTKAYKELCSIESWENNMKTALELDLKKMEENLQVEKTEFSKKFKKKIPEIEKIAEAKREKIEKQKEQESIKVEKIMLSPNADSSSLPYSLKPEKMVGVSPKIAPSMLSSDFANLAAEAKRMIDLGANWLHMDIMDGHFVSNLTIGAPVIESLRKHTNAYLDCHLMVTNPMDYVDQMAKAGASGFTFHVEVAQENWQELVKKIKAAGMRPGVALKPGTPVEQVYPLVEGTNPVEMVLVMTVEPGFGGQKFMPSMMDKVRALRNKYPTLDIEVDGGLGPSTIDAAAAAGANCIVAGSSVFGAPKPGDVISLLRASVEKAQPST

SEQ ID NO: 102708 - protein, 305 aa, Arabidopsis thaliana
  peptide (1)..(305): Ceres Seq. ID no. 13611020
MKTALELDLKKMEENLQVEKTEFSKKFKKKIPEIEKIAEAKREKIEKQKEQESIKVEKIMLSPNADSSSLPYSLKPEKMVGVSPKIAPSMLSSDFANLAAEAKRMIDLGANWLHMDIMDGHFVSNLTIGAPVIESLRKHTNAYLDCHLMVTNPMDYVDQMAKAGASGFTFHVEVAQENWQELVKKIKAAGMRPGVALKPGTPVEQVYPLVEGTNPVEMVLVMTVEPGFGGQKFMPSMMDKVRALRNKYPTLDIEVDGGLGPSTIDAAAAAGANCIVAGSSVFGAPKPGDVISLLRASVEKAQPST

SEQ ID NO: 102709 - protein, 294 aa, Arabidopsis thaliana
  peptide (1)..(294): Ceres Seq. ID no. 13611021
MEENLQVEKTEFSKKFKKKIPEIEKIAEAKREKIEKQKEQESIKVEKIMLSPNADSSSLPYSLKPEKMVGVSPKIAPSMLSSDFANLAAEAKRMIDLGANWLHMDIMDGHFVSNLTIGAPVIESLRKHTNAYLDCHLMVTNPMDYVDQMAKAGASGFTFHVEVAQENWQELVKKIKAAGMRPGVALKPGTPVEQVYPLVEGTNPVEMVLVMTVEPGFGGQKFMPSMMDKVRALRNKYPTLDIEVDGGLGPSTIDAAAAAGANCIVAGSSVFGAPKPGDVISLLRASVEKAQPST

SEQ ID NO: 102710 - DNA, 1053 bp, Arabidopsis thaliana
  misc_feature (1)..(1053): Ceres Seq. ID no. 13611041
  misc_feature (1)..(1053): Ortholog of  Ceres SEQ ID NO 13594252 as cited in SEQ ID NO 57528
  misc_feature (1)..(1053): Ortholog of  Ceres SEQ ID NO 14315060 as cited in SEQ ID NO 60039
  misc_feature (1)..(1053): Ortholog of  Ceres SEQ ID NO 13597809 as cited in SEQ ID NO 64598
  misc_feature (1)..(1053): Ortholog of  Ceres SEQ ID NO 12617960 as cited in SEQ ID NO 69051
  misc_feature (1)..(1053): Ortholog of  Ceres SEQ ID NO 13589401 as cited in SEQ ID NO 0
  misc_feature (1)..(1053): Ortholog of  Ceres SEQ ID NO 15179361 as cited in SEQ ID NO 0
ttttcgttttcttctccgtttctcgctcatcgcttactgaaaccagaaacaagtttagggtttttgcggaggtttcaaagttaacaatggcggaagagcacaagcacgaggaatcgatcatggagaagatctctgagaagatccatggtcacgatgactcttcttcttcttcttccgattcggatgacgataagaactctgcgtctctcaaaaccaagatttatcgtcttttcggaagagaacagcctcttcacaagcttttcggtggcggaaaacctgccgacattttcctgtggaggaacaagaaggtatcaggaggagtattgggtgctgcaactgtttcctggatcttattcgagttacttgagtacaatcttctcacactcttcggccacatttcaattcttgctctcgcagtattgttcttgtggtctagtgctagtaccttcattcacaagtcacctcttcatatccctgaagttcacatccccgaggatgttgttcttcagcttgcttctggattaaggattgaaatcaatcgtggatttactgttcttagggacattgcatcaggaagagatcttaagaagtttctgttggtgattgctggtttatgggttttgtccaaagttggtagctcctgcaacttcttgaccttaatctacatcgcaactgtacttctcttcacgattcccgtgctttacgagaagtatgaagataaagtagatgactttggtgaaaaggcgatgagggagatcaagaagcaatacgtggagttcgacgtgaaggttttgagtaaggtgatgagcaaaattcctaaaggagcctttgcctttatcaagaagaaagattagagagtgtgtaagtttctctcatcatcattatccgagattattcaagattgatatataaatctcgaagcattgtttttttggctgttggttaataaccctttattctctcaaatatctgctatatggattttattcgggttttaaccaaattttatagcaatattgaatctgattgaaatttgaattgatccttttttcg

SEQ ID NO: 102711 - protein, 283 aa, Arabidopsis thaliana
  peptide (1)..(283): Ceres Seq. ID no. 13611042
FVFFSVSRSSLTETRNKFRVFAEVSKLTMAEEHKHEESIMEKISEKIHGHDDSSSSSSDSDDDKNSASLKTKIYRLFGREQPLHKLFGGGKPADIFLWRNKKVSGGVLGAATVSWILFELLEYNLLTLFGHISILALAVLFLWSSASTFIHKSPLHIPEVHIPEDVVLQLASGLRIEINRGFTVLRDIASGRDLKKFLLVIAGLWVLSKVGSSCNFLTLIYIATVLLFTIPVLYEKYEDKVDDFGEKAMREIKKQYVEFDVKVLSKVMSKIPKGAFAFIKKKD

SEQ ID NO: 102712 - protein, 255 aa, Arabidopsis thaliana; identical to SEQ ID NO: 38059
  peptide (1)..(255): Ceres Seq. ID no. 13611043

SEQ ID NO: 102713 - protein, 244 aa, Arabidopsis thaliana; identical to SEQ ID NO: 38060
  peptide (1)..(244): Ceres Seq. ID no. 13611044

SEQ ID NO: 102714 - DNA, 869 bp, Arabidopsis thaliana
  misc_feature (1)..(869): Ceres Seq. ID no. 13611045
  misc_feature (1)..(869): Ortholog of  Ceres SEQ ID NO 12584790 as cited in SEQ ID NO 62648
ctctctctttgtttattcgttaggtctcaaaggctctctctgtctctttctcaaaaatcatctgcaggaagtgaatcgtcaaaaccgagtttggaggatctgtcttgaggagtttttttttggttgagaaatggcttcgaaaaggatcttgaaagagctcaaggatctccagaaggatcctccaacttcctgcagtgctggcccagttgctgaagacatgtttcattggcaagctacaataatgggtccatctgatagtccttattcaggcggtgtctttctcgtaaccattcacttccctccggattatcctttcaaaccaccaaaggttgcattcaggacaaaagtgttccaccctaatgtcaacagcaatggaagcatttgccttgacattttgaaagaacaatggagtcctgcactcaccatatcgaaggttttgctttcgatatgttcattgttaacggacccaaacccagatgatccattggttccagagattgctcacatgtacaaaaccgatagagcaaagtatgagtctactgcgagaagctggactcagaaatatgcaatgggatgaaagtttgtgtcctttgatccctcacagactcggttttaatagagagagagagagaaagagagaggacttcttcacatagggatcttccatgaaataagttagattcctatgttttatcatctctttgtttgaaacctctttaatctcaaacaaaaacattacttcacctctttattatccatatgttccctatctttgtttctatgctttttccaaaaaattataagaaaaattatttatgtaaagctggaaactttgagcttttacctaacaaagtatgacgatgattaaa

SEQ ID NO: 102715 - protein, 148 aa, Arabidopsis thaliana; identical to SEQ ID NO: 23173
  peptide (1)..(148): Ceres Seq. ID no. 13611046

SEQ ID NO: 102716 - protein, 119 aa, Arabidopsis thaliana; identical to SEQ ID NO: 23174
  peptide (1)..(119): Ceres Seq. ID no. 13611047

SEQ ID NO: 102717 - protein, 111 aa, Arabidopsis thaliana; identical to SEQ ID NO: 23175
  peptide (1)..(111): Ceres Seq. ID no. 13611048

SEQ ID NO: 102718 - DNA, 1486 bp, Arabidopsis thaliana
  misc_feature (1)..(1486): Ceres Seq. ID no. 13611057
  misc_feature (1)..(1486): Ortholog of  Ceres SEQ ID NO 14312844 as cited in SEQ ID NO 55601
  misc_feature (1)..(1486): Ortholog of  Ceres SEQ ID NO 14312866 as cited in SEQ ID NO 55630
  misc_feature (1)..(1486): Ortholog of  Ceres SEQ ID NO 13597376 as cited in SEQ ID NO 64002
  misc_feature (1)..(1486): Ortholog of  Ceres SEQ ID NO 13503573 as cited in SEQ ID NO 65402
  misc_feature (1)..(1486): Ortholog of  Ceres SEQ ID NO 13659615 as cited in SEQ ID NO 67248
atgcaagcatttgttagtataaacaaaaaagccacgtggcttctcttctccactcctctttttattccttcccaaacaagaaggttagttattattatttccagagaagcttctcttttgattctctcgctctctctttcttcatcgcctcttcgagcttcgatggttgggaatattctggtgaccggtggtgctggttacatcggaagtcacacggttcttcagcttcttctcggaggctataacaccgtcgttatagacaacctcgacaattcctctctcgtttcgatccaacgcgtcaaggatctcgccggagatcatggacaaaatctcaccgtccaccaggtggaccttcgcgataaacccgcacttgagaaggttttctccgaaacaaagtttgatgcagtaatgcattttgctggattgaaagcagttggtgagagcgtggcgaaaccacttctgtattataacaataacttgattgcgactattacacttttggaagtaatggctgcacacggatgtaaaaagcttgtattttcttcgtccgctactgtgtatggctggccaaaggaggttccttgtacagaagagtctcccctgtctggaatgagtccttatggacggacaaagctgttcatagaggacatttgccgtgatgtacaacgtggtgatcctgaatggagaatcataatgctgaggtactttaaccctgtgggagctcaccctagcggtcgcattggtgaggatccttgtgggactccaaataatctcatgccttatgtccagcaagtcgttgttgggaggctacctaacctaaaaatttatggaactgactataccactaaagatggcactggtgtacgagactatattcatgttgttgatctagcagatggccatatatgtgcgcttcaaaagctagacgatactgaaataggttgtgaggtatacaacctgggaaccggaaaaggaacaacagtgttggagatggttgatgcatttgagaaagcttctggaatgaaaatcccactggtgaaggttggaaggagaccaggtgatgcagaaaccgtctatgcgtcaacagaaaaagctgaacgcgaactaaactggaaggcaaattttggaatcgaagaaatgtgtagggatcagtggaactgggcaagcaacaatcctttcggttacggttcttcaccaaactcaacataacgaagctaatgtatccaacactccattctttttcttttgggtcgtcggctgttatctttatgttacacactcaggttttagctttaaagcctaaacacagtgagggagaagttacttctctattcatatatctgctttctccttttgtaatttatatatatcttatatacgcataggtttaacttaagcggatccttttgttttttggatttgtataatctctcttaggaaattaattgtcatgggattatatttgtattaaatagaaactgaattc

SEQ ID NO: 102719 - protein, 402 aa, Arabidopsis thaliana
  peptide (1)..(402): Ceres Seq. ID no. 13611058
MQAFVSINKKATWLLFSTPLFIPSQTRRLVIIISREASLLILSLSLSSSPLRASMVGNILVTGGAGYIGSHTVLQLLLGGYNTVVIDNLDNSSLVSIQRVKDLAGDHGQNLTVHQVDLRDKPALEKVFSETKFDAVMHFAGLKAVGESVAKPLLYYNNNLIATITLLEVMAAHGCKKLVFSSSATVYGWPKEVPCTEESPLSGMSPYGRTKLFIEDICRDVQRGDPEWRIIMLRYFNPVGAHPSGRIGEDPCGTPNNLMPYVQQVVVGRLPNLKIYGTDYTTKDGTGVRDYIHVVDLADGHICALQKLDDTEIGCEVYNLGTGKGTTVLEMVDAFEKASGMKIPLVKVGRRPGDAETVYASTEKAERELNWKANFGIEEMCRDQWNWASNNPFGYGSSPNST

SEQ ID NO: 102720 - protein, 348 aa, Arabidopsis thaliana
  peptide (1)..(348): Ceres Seq. ID no. 13611059
MVGNILVTGGAGYIGSHTVLQLLLGGYNTVVIDNLDNSSLVSIQRVKDLAGDHGQNLTVHQVDLRDKPALEKVFSETKFDAVMHFAGLKAVGESVAKPLLYYNNNLIATITLLEVMAAHGCKKLVFSSSATVYGWPKEVPCTEESPLSGMSPYGRTKLFIEDICRDVQRGDPEWRIIMLRYFNPVGAHPSGRIGEDPCGTPNNLMPYVQQVVVGRLPNLKIYGTDYTTKDGTGVRDYIHVVDLADGHICALQKLDDTEIGCEVYNLGTGKGTTVLEMVDAFEKASGMKIPLVKVGRRPGDAETVYASTEKAERELNWKANFGIEEMCRDQWNWASNNPFGYGSSPNST

SEQ ID NO: 102721 - protein, 266 aa, Arabidopsis thaliana
  peptide (1)..(266): Ceres Seq. ID no. 13611060
MHFAGLKAVGESVAKPLLYYNNNLIATITLLEVMAAHGCKKLVFSSSATVYGWPKEVPCTEESPLSGMSPYGRTKLFIEDICRDVQRGDPEWRIIMLRYFNPVGAHPSGRIGEDPCGTPNNLMPYVQQVVVGRLPNLKIYGTDYTTKDGTGVRDYIHVVDLADGHICALQKLDDTEIGCEVYNLGTGKGTTVLEMVDAFEKASGMKIPLVKVGRRPGDAETVYASTEKAERELNWKANFGIEEMCRDQWNWASNNPFGYGSSPNST

SEQ ID NO: 102722 - DNA, 713 bp, Arabidopsis thaliana
  misc_feature (1)..(713): Ceres Seq. ID no. 13611076
  misc_feature (1)..(713): Ortholog of  Ceres SEQ ID NO 13495070 as cited in SEQ ID NO 53216
  misc_feature (1)..(713): Ortholog of  Ceres SEQ ID NO 13661333 as cited in SEQ ID NO 61620
  misc_feature (1)..(713): Ortholog of  Ceres SEQ ID NO 13596812 as cited in SEQ ID NO 62283
  misc_feature (1)..(713): Ortholog of  Ceres SEQ ID NO 13623021 as cited in SEQ ID NO 0
  misc_feature (1)..(713): Ortholog of  Ceres SEQ ID NO 14309080 as cited in SEQ ID NO 0
agaaagagaaaagaaattgagaagaaaaaagaaaaaaaggtgaccgtattctccgtcgattgtagccgcccgaagaaatatcttctcctctctcgtttaaccacgaatttgctctgatattagtgtttctctagccatggtaagctcaattttccacttgttatctcgatctgcgaacgcggcatctggaatggctgtgcatgatgattgcaagctgagatttctggaactgaaggctaaaaggacacaccgtttcatagtttacaagattgaggagaagcagaagcaagttgttgttgagaaagttggtcaaccgatccaaacttacgaggagtttgcagcatgtcttccagctgatgaatgccgttacgccatttacgattttgactttgtaactgctgagaattgccagaagagcaagatcttcttcatcgcgtggtgtccggatattgctaaggtgagaagcaagatgatctacgcgagctccaaggacaggttcaagagggaactagatgggattcaagtagagctacaggcaactgatccaacagagatggatctcgatgttttcaggagccgtgccaactaaaaagtaaaaaccaaagtttattatcatcatccccttgaaagatctattctcttattctgttatttttgagtgatggtactggtacttgattatgtttttacattgtgttgtgaagttatgaacc

SEQ ID NO: 102723 - protein, 150 aa, Arabidopsis thaliana; identical to SEQ ID NO: 28254
  peptide (1)..(150): Ceres Seq. ID no. 13611077

SEQ ID NO: 102724 - protein, 132 aa, Arabidopsis thaliana; identical to SEQ ID NO: 26127
  peptide (1)..(132): Ceres Seq. ID no. 13611078

SEQ ID NO: 102725 - DNA, 683 bp, Arabidopsis thaliana
  misc_feature (1)..(683): Ceres Seq. ID no. 13611079
  misc_feature (1)..(683): Ortholog of  Ceres SEQ ID NO 14314198 as cited in SEQ ID NO 57472
  misc_feature (1)..(683): Ortholog of  Ceres SEQ ID NO 12783998 as cited in SEQ ID NO 61535
  misc_feature (1)..(683): Ortholog of  Ceres SEQ ID NO 15174264 as cited in SEQ ID NO 61877
aacaaacacaaaacttgatctcacgactccatcttctaaaattcagaatctttctttgaaacttttttcgtgtgaagaaaatggcaccaaaggcagagaagaagccggcagagaagaaaccagtagaggagaaatcaaaagccgagaaagctcctgcagagaagaaaccaaaagccggcaagaaactcccgaaggaagccggtgccggcggcgataagaagaagaagatgaagaagaagagtgttgagacgtacaagatctacatcttcaaggttctgaaacaagttcatccagatattggtatttcaagcaaagctatggggattatgaacagtttcatcaacgacatctttgagaaattggcatcggaatcgtcgaagctcgcgaggtataataagaagccgacgattacttctcgggagattcagactgctgttagacttgttcttcctggtgagcttgcgaaacatgctgtttctgaaggaactaaggcggtgactaagtttactagctcttgaattgtggatcttgttgaaatcgatgtttgtaaaattagggttttttagatttgatggttgttgttgactctttgatcgatttctgtttcgttttcttgttgcgatgttaatcaaatcggatccgatttctttcttaaatcaaatctatcaagtaaaatcttttgc

SEQ ID NO: 102726 - protein, 145 aa, Arabidopsis thaliana; identical to SEQ ID NO: 21275
  peptide (1)..(145): Ceres Seq. ID no. 13611080

SEQ ID NO: 102727 - protein, 96 aa, Arabidopsis thaliana; identical to SEQ ID NO: 21276
  peptide (1)..(96): Ceres Seq. ID no. 13611081

SEQ ID NO: 102728 - DNA, 1206 bp, Arabidopsis thaliana
  misc_feature (1)..(1206): Ceres Seq. ID no. 13611104
  misc_feature (1)..(1206): Ortholog of  Ceres SEQ ID NO 14307053 as cited in SEQ ID NO 54262
atcacagatttggacttttcttggttatattaaagttttttttgtccatatattcaatgaccaatctagaattcatctgtttttgaactaacccaacactaaagaaatagatccaaaggcctctctcctctctctcgtttttctcatatggttcttgataataatttgaaagaaagatgtcaatgatgagcagaactcgaagcagcatcgccatgggaacaccatctttccttgagttgaagaaacaagcttcatttttcttcaaagagaagcttaaaacggcgcgtttagctctcaccgatgttactcctcttcaactaatgactgaggaagctacggatggtgagtcatgtggaccaaatacacaaaccttagggtccatttcaaaggctgcttttgagtttgaagattacttggcgattgttgaagtcttgcacaaaagattggcaaagttcgataagagaaactggaggatggcttataactcactaatagttgttgagcatttactcactcatggaccagagagtgtttccgatgagtttcaaggtgatatagatgttatctcccaaatgcaaaccttccaacagattgacgagaaagggtttaattggggattagctgttagaaagaaagcagagaaggttttaaagctacttgagaaaggggaattacttaaggaagaaaggaagcgagctcgtgagctgtctcgagggattcaaggtttcggtagctttaaccacaagtcttcatctcattctttgtcagagcatgaagtcttacaagaatctacagtctataggaaatgtaattccaattttaccaagaattacgatgaggatgaccaagagaacactatggtttctcctaatgacgccaacctttttcctcagccgctggtagctgacccgagcgaggaatctaggacgggtatgaaagaaaatatggatcctgaagatgatgagaacacagaggtaaacccacttttgggttttagtaaaaaggagggtcaagaactagccggagaagacgagaaccatccatttacggatggcgagagtaagcatacagtagtcttgcttgatgagaacacagattaaattttaattacgtgatatcgcaatctgtataagagaaaaaacacgagaagaagataatgtgtgtataccaatatgtatacatatctacaataataacacttctgtt

SEQ ID NO: 102729 - protein, 307 aa, Arabidopsis thaliana; identical to SEQ ID NO: 40556
  peptide (1)..(307): Ceres Seq. ID no. 13611105

SEQ ID NO: 102730 - protein, 305 aa, Arabidopsis thaliana; identical to SEQ ID NO: 40557
  peptide (1)..(305): Ceres Seq. ID no. 13611106

SEQ ID NO: 102731 - protein, 304 aa, Arabidopsis thaliana; identical to SEQ ID NO: 40558
  peptide (1)..(304): Ceres Seq. ID no. 13611107

SEQ ID NO: 102732 - DNA, 496 bp, Arabidopsis thaliana
  misc_feature (1)..(496): Ceres Seq. ID no. 13611108
  misc_feature (1)..(496): Ortholog of  Ceres SEQ ID NO 13586586 as cited in SEQ ID NO 0
atgaagaattgaatctgtagtcgaaagaaaagagttgggaaaaaaatggacgcaagcatgatggctggacttgatggtcttcctgaagaagacaaagccaaaatggcctccatgatcgatcagcttcagctccgtgatagtttgaggatgtacaattcattggtggagaggtgtttcgtggactgtgttgatagcttcacacgcaaatctctgcagaaacaagaggagacttgtgtgatgcgttgcgctgagaagttccttaagcatacgatgcgtgttggtatgcggtttgctgagctcaatcagaacgcaccaacccaagactgatatagtctgctttttctgtttggttttttcgtacggtttacgagtccgaaaccagaataaaccggttgttagttgttcaggttactactccgatactgttttttgaacatcttgtactgtgaaattattttgactgtatccagttctgatattgatattgacttgtatt

SEQ ID NO: 102733 - protein, 93 aa, Arabidopsis thaliana; identical to SEQ ID NO: 28221
  peptide (1)..(93): Ceres Seq. ID no. 13611109

SEQ ID NO: 102734 - protein, 89 aa, Arabidopsis thaliana; identical to SEQ ID NO: 28222
  peptide (1)..(89): Ceres Seq. ID no. 13611110

SEQ ID NO: 102735 - protein, 88 aa, Arabidopsis thaliana; identical to SEQ ID NO: 28223
  peptide (1)..(88): Ceres Seq. ID no. 13611111

SEQ ID NO: 102736 - DNA, 1740 bp, Arabidopsis thaliana
  misc_feature (1)..(1740): Ceres Seq. ID no. 13611120
  misc_feature (1)..(1740): Ortholog of  Ceres SEQ ID NO 13595747 as cited in SEQ ID NO 58679
atggtgtctcatcttcaatgtatggcatccacattgtttacttgaggtacaagcaaaacgtctaagctcgtcgacctcctcttaatggcttcaagttcaacttcattcccgttaaccaccgcgccaccgcagggtgtcaggtttaaccggagaaaaccgaggttaaccgtgtgggctaagcaaacggcgtttcaactcgggaaaacgaagggtgatgatgactcggaggggaaacaaaaagggaagaacccgttccagtttgatttcggtaagttaccggacatgaagtcactgataccggttgtgacgaatccttctaccggtttagtgtttggtaataacagaaagaaagatcctggtactatttttgtggctggtgctacgggacaagctggtatacgcatagctcaaacgctcttacaacgaggattcagtgttcgagccggtgttcctgaccttggagctgcccaggacctagctcgtgtcgcggctacttacaagattttatcaaatgatgaagtcaagaggctaaacgcagttcaatcccccttccaagacgctgaatcaatagcaaaagcgattggaaacgcaaccaaagttgttgttacggtcggggcaacagagaatggtccggacgcccaagtttcgacctcagacgcattgctcgtggtccaagcagctgagctagccggcgtaagccacgtggcgatagtctacgacggcaccatcagcgggtccacatacaacgtgctcgacgggattacttcgtttttcggcaatcttttcgcaaaatctcagccattgactatctctgacctcatcgagaaagtagctcaaaccgacgtggcctacacactcataaagacgagtttgacggaggatttctctccggagaaagcttataacgtcgtcgtttcagctgaagggagtaacagcggcagtggcagtagttcgtccgaggcctacaaagttccgaagttgaagattgcgtcgctggttgcagacatttttgcgaatacggccgtggcagaaaataaggtggtggaagtttctacagatccatcagcaccatcgcggccagtggacgagcttttcagtgtaatcccggaagatgggaggagaaaagtgtacgcagatgcgatcgcaagggaaagagcagaggaagaagctaaagttgcagctgacaaagctcgagaggcagcagaagcagcgaaagagtttgagaagcaaatgcaaaagctctctgagaaagaagcagaagctgcaagcttagctgaggatgcgcagcagaaagcagatgccgtgggagtcacagtggacggtttatttaacaaggcgaaagatatcagctcaggtctctcctggaataaactcggctctcagttcgcaactgcgattcagaacgcttcagagacgcctaaagtacaggttgctacggtcagaggacaagcaaaagcgagaaacttgccacccaagaaagcagtggtgaagcagagaccatcatctccgtttgcatccaaaccgaaagaagaacgtccgaagaagccggagaaagaggtgaggaaagtgttcggaggattgtttaagcaagagaccatctacatcgacgatgattgaaaaggccatatgcgatgtccttttgaagttccgtacagtttccttttttctctttccttctgtttcaagttaaaattctgtaatcgtatgacaaaattatacataaaaaaccatcattctctc

SEQ ID NO: 102737 - protein, 510 aa, Arabidopsis thaliana
  peptide (1)..(510): Ceres Seq. ID no. 13611121
MASSSTSFPLTTAPPQGVRFNRRKPRLTVWAKQTAFQLGKTKGDDDSEGKQKGKNPFQFDFGKLPDMKSLIPVVTNPSTGLVFGNNRKKDPGTIFVAGATGQAGIRIAQTLLQRGFSVRAGVPDLGAAQDLARVAATYKILSNDEVKRLNAVQSPFQDAESIAKAIGNATKVVVTVGATENGPDAQVSTSDALLVVQAAELAGVSHVAIVYDGTISGSTYNVLDGITSFFGNLFAKSQPLTISDLIEKVAQTDVAYTLIKTSLTEDFSPEKAYNVVVSAEGSNSGSGSSSSEAYKVPKLKIASLVADIFANTAVAENKVVEVSTDPSAPSRPVDELFSVIPEDGRRKVYADAIARERAEEEAKVAADKAREAAEAAKEFEKQMQKLSEKEAEAASLAEDAQQKADAVGVTVDGLFNKAKDISSGLSWNKLGSQFATAIQNASETPKVQVATVRGQAKARNLPPKKAVVKQRPSSPFASKPKEERPKKPEKEVRKVFGGLFKQETIYIDDD

SEQ ID NO: 102738 - protein, 444 aa, Arabidopsis thaliana
  peptide (1)..(444): Ceres Seq. ID no. 13611122
MKSLIPVVTNPSTGLVFGNNRKKDPGTIFVAGATGQAGIRIAQTLLQRGFSVRAGVPDLGAAQDLARVAATYKILSNDEVKRLNAVQSPFQDAESIAKAIGNATKVVVTVGATENGPDAQVSTSDALLVVQAAELAGVSHVAIVYDGTISGSTYNVLDGITSFFGNLFAKSQPLTISDLIEKVAQTDVAYTLIKTSLTEDFSPEKAYNVVVSAEGSNSGSGSSSSEAYKVPKLKIASLVADIFANTAVAENKVVEVSTDPSAPSRPVDELFSVIPEDGRRKVYADAIARERAEEEAKVAADKAREAAEAAKEFEKQMQKLSEKEAEAASLAEDAQQKADAVGVTVDGLFNKAKDISSGLSWNKLGSQFATAIQNASETPKVQVATVRGQAKARNLPPKKAVVKQRPSSPFASKPKEERPKKPEKEVRKVFGGLFKQETIYIDDD

SEQ ID NO: 102739 - DNA, 1164 bp, Arabidopsis thaliana
  misc_feature (1)..(1164): Ceres Seq. ID no. 13611135
  misc_feature (1)..(1164): Ortholog of  Ceres SEQ ID NO 12611829 as cited in SEQ ID NO 56771
  misc_feature (1)..(1164): Ortholog of  Ceres SEQ ID NO 15171735 as cited in SEQ ID NO 57234
  misc_feature (1)..(1164): Ortholog of  Ceres SEQ ID NO 13597018 as cited in SEQ ID NO 64288
  misc_feature (1)..(1164): Ortholog of  Ceres SEQ ID NO 14305124 as cited in SEQ ID NO 0
tcttttcctctatctctctcctctctttgtctctctcgcttctgtgatttgggctttttcagatgggaaatgcgaacggcaaagacgaagacgccgccgccggtagcggtggtgcagatgttacctcgtcctcggcgagatctaatggcggcgatccttctgcacgcagtcgtcaccgtcgtccttcttcagactctatgagcagttctcctcccggaagtcctgctcgatctccatctcctttcttattcgctcctcaggttcccgtggctccattgcagagagcaaacgcccctcctcctaataacatccaatggaaccaatcacagagagtttttgataatcccccagagcaaggaatccctaccatcattacatggaaccaaggaggtaatgatgtggcggtggaaggatcatgggacaattggagatcaaggaagaagctgcagaaatcagggaaagaccactcgattctctttgtccttccatctggcatataccactacaaggtgattgtggacggtgaatccaaatacatcccagatttaccctttgtagcagacgaagttggcaatgtctgtaacattctcgatgttcataactttgtgccagaaaacccagaaagcatagtggagtttgaggcgccaccatcacctgatcatagctacggtcaaaccctaccagccgcagaagattacgcgaaagagccactggcggtgccacctcagcttcatctaacacttcttggcactactgaagagacagccatagccacaaagcctcaacatgtggtgcttaaccatgtgttcatagagcaaggatggactcctcaatccatagtagctttgggtttaacccacaggttcgagtctaagtacataactgttgtcctctacaaaccgctcacacggtaaccctaaaaattcagtgccacattgttctctctctttctttctttttcatctctcaattatgtgaaaacatgttctttgttcatagtgactagtgagtgcccaacatttgagtttattaacctctttcttacctggtttgtggtgcttgtgtacaaagcttctctcattgtaacgattgttgttttattttctgcaaaaactgtaaaatacattcgctaataatggctataacaagcttatctgctagcaa

SEQ ID NO: 102740 - protein, 283 aa, Arabidopsis thaliana; identical to SEQ ID NO: 86076
  peptide (1)..(283): Ceres Seq. ID no. 13611136

SEQ ID NO: 102741 - protein, 238 aa, Arabidopsis thaliana; identical to SEQ ID NO: 86077
  peptide (1)..(238): Ceres Seq. ID no. 13611137

SEQ ID NO: 102742 - DNA, 4260 bp, Arabidopsis thaliana
  misc_feature (1)..(4260): Ceres Seq. ID no. 13611138
  misc_feature (1)..(4260): Ortholog of  Ceres SEQ ID NO 15177611 as cited in SEQ ID NO 59034
atggcacagatccgacccggaggcccaattagagacccaaatttcacaaaatacatcgcttcttcttcctcggctttcatcggccttgttcgtcgtctttttcttcttccgcttgagtggcttcgggaagtaaaaatgagaagacagggaaactttgcggactcatcacctgccagtgcatatggagctggacagatacaggatccccattctgattttcaaggtcaattagaggcattcacgcctgagagggatcagccatattcagattcacaagctgagggtcaatggagatgggaaagagatggccctaatatgtcaaggccaatggctactgctgtttacaatgaaggacaacaaggtgttgattcatcgaggacgtattaccgtggccaaatagatccaaaatcaggaatggagaagcaaggcagtgatccaagagctcaaccacaacaccaagaaaatccaaaaaccggttatgataataaccgtggggtgcagacatttgaaggtcttgaacagaagttcatggatgatataacaagactagcaaaagatcaaatcgaagcagaggatgcagagatcgccagacatcgagagaaaataaacactataaacgctagatacgaagaacagttagctacacttagagcacggcacacaggtaagagagaagagatcatgaggaaagaatcactagctaggcagcaacaattcaagcagcaaaccatggggatgatggaccaataccatccaaacgtggttggtcaggccaatctaatgccatctggtcatccccaaggctacattggcagtgctcaagatccagcggctgtggcggatgcaccaccaagatcatatggctcagatcggtttgaagcatacggagagagagctaggtttcagggaggaaacagagatcacgggttcgagcctaggggtccataccctggtgggaatgtctatgacaccagctcacgatcaaaatcaagcttttcagactatccggaatttgaaaatgaaatcagggttccattttttaatcctgacgagagcattttagaattcattgttgaaccgtttaaagaaattgctgtacttagatgctgctggttgtctgaaaaacatttatctttcgctctgcgaatcttcctgtgcggaggaggaacaatgaacgggacatcgcccgacgaatctcccgattcgacaactcagcggatcgattcgttcaacggcgagcagagagtctacttcgttcccttgaggtggtggaaagatgcgcaagattcaatgccttctgaatcagttgaaaaaagagagatcttgtatacagcaagttgcgggtcgtcttatggaggcccaatgaagttgataaataacatttttaactctgatattttgttcgatctgaggagagaaggagatgcgttacagaatggtgaaacgggagaagcaagcgtctcaggcagggactttgctttggtctcaagtgatatgtggctgcaggcactaaaatgtatccgatcaaatgattcttttatggaatttttcgtattttctgcatctgttcattctttggagaacgagtttttaaagaagaggctgaggtatcatgatgataaaaatactgagaaaggcgtaaaaagtttctcggctggaggagttgacagaggtgatgtttatcctgtacaactcaggctctccgttttgcaggaaaccaattcattggcggtcaaaatttgcaaaaaggacaattcagttgaatgcttcagaagagcatgcaagatattcagtttggattctgagcagttgcgcatttgggatatttctggccaaacaaccttgtttttcgaaagtgatgtgagcaattccaaggattgtcaacaacaagcagatcaggaaatcctcctagagctgcagatttatggattatcagactccatcaaattgaaggaatcaaaaaaagaagatggttccacacagcaaaccaatgggattaccaatggcatgaatggtggcacagtgttcagatttggacgaagtaattctttgagctttttgggtaaagctggagaagctggaactttggggttgacaggcttgcagaatctaggaaacacttgtttcatgaacagttcccttcagtgcttggctcacacaccgaagcttgtcgacttctttcttggcgagtacagtaaagaaataaatcttgacaatccattgggaatgaaaggtgagatcgccttagcttttggtgacttgttaaggagtctgtgggctccaggtgcatcaacagtggccccaaggacatttaaagcaaaacttgctcgctttgctcctcagtttagtggctttaatcagcatgattcgcaggagcttctagctttcttgctggatggactccacgaggacttaaaccgtgtaaagaacaagccttacgtggaagcaaaagatggagatggccgtccagacgcagaagtggctgatgaatattggcgaaatcatgtggctcgcaatgattcaataattgttgatgtgtgccaaggccaatacaagtcaacattagtttgtcctatttgcaaaaaggtttctgttatgtttgatccgttcatgtacctatcgctaccattgccatgcacatcaatgcgaacaatggatttaacagtcatgagtgccgatgggagtagtttgcctattccattgactgtcaacgttcctaagtttggaaaatttgaagatcttcataaggctcttgtcactgcctgttctttaccagaggaggagactttattggttactgaggtatacaacaatcggattattcgcttcctggaggagcctactgattcattaaccttgatcagagatggtgacaaacttgtcgtgtatcggttaaagaaggatgcaaacaattctcctttaattgtgtatatgcatcagaagctggaagagcagtttatatctgggaaatctagcccaacttggaaggcatttggaatccccttggtctcaaggctttgtgatgtcgagaatggatctgatgtcgagaacctgtacctgaagctgcttagttcatttaagatgcctactgaattctttacagagaatcttgaaaacccaactgaagaagaagccactgataaaacagataccgatggtactacttcagttgaggatacaaattccactgatgtgaaggagactactgaatctcttccagatcctgtgttgaggctttacctcaccgacgacagaggaaactcgatagaagctgaaatgttgaaagaaaagcctgtaaataaatccaagcggttgaatgtgcttgcacgttggcctgtaaaagagcttgacgtttatgatacttgtcttctgagctccttacctgaggtttccaaatctggaactaagagaccccaagaatccgtttcgcttttcaagtgccttgaagcattcttgacggaggagcctcttggtcctgatgacatgtggtattgtcctgggtgcaaagaacaccggcaagccattaaaaagttagatctctggaggttgccagagatcctggttattcatctgaagaggttttcgtatagccggtttatgaagaacaagctggaggcatatgtggatttcccgctagataatcttgatctatcaagctacatctcctacaagaatggtcagacaacatatcgttacatgctctatgcgattagcaatcactatgggagcatgggaggtggtcattacactgcatatgttcaccatggaggtgatcgatggtatgactttgatgatagccatgtccaccaaatcagccaagaaaagatcaagacctcggctgcttacgttctgttctataaacgccttgtagactaaagaaactgaagcggaaaagacaagaaagtgatcaagatgaaagcagctctgcgttgaggctaatttacagaagagagagagagagttgggaagaagagcaaaagaccgagaggacatgttgcggggaatttattttattcttacaaaaattggtatctgattattttattaaccatattcaattagagaatagaagaatagagaaaagcccttttgtgggatatggttctaaattgttgtttagttcttgtgtgtcagttttggctctcgtcgaccaaagaagattaaagaaacctctaccttattttaactcaattcttttgtttttgcaatgtcctttgctttccaaaattgttagtcttacttttcactactttgatagac

SEQ ID NO: 102743 - protein, 1291 aa, Arabidopsis thaliana
  peptide (1)..(1291): Ceres Seq. ID no. 13611139
MAQIRPGGPIRDPNFTKYIASSSSAFIGLVRRLFLLPLEWLREVKMRRQGNFADSSPASAYGAGQIQDPHSDFQGQLEAFTPERDQPYSDSQAEGQWRWERDGPNMSRPMATAVYNEGQQGVDSSRTYYRGQIDPKSGMEKQGSDPRAQPQHQENPKTGYDNNRGVQTFEGLEQKFMDDITRLAKDQIEAEDAEIARHREKINTINARYEEQLATLRARHTGKREEIMRKESLARQQQFKQQTMGMMDQYHPNVVGQANLMPSGHPQGYIGSAQDPAAVADAPPRSYGSDRFEAYGERARFQGGNRDHGFEPRGPYPGGNVYDTSSRSKSSFSDYPEFENEIRVPFFNPDESILEFIVEPFKEIAVLRCCWLSEKHLSFALRIFLCGGGTMNGTSPDESPDSTTQRIDSFNGEQRVYFVPLRWWKDAQDSMPSESVEKREILYTASCGSSYGGPMKLINNIFNSDILFDLRREGDALQNGETGEASVSGRDFALVSSDMWLQALKCIRSNDSFMEFFVFSASVHSLENEFLKKRLRYHDDKNTEKGVKSFSAGGVDRGDVYPVQLRLSVLQETNSLAVKICKKDNSVECFRRACKIFSLDSEQLRIWDISGQTTLFFESDVSNSKDCQQQADQEILLELQIYGLSDSIKLKESKKEDGSTQQTNGITNGMNGGTVFRFGRSNSLSFLGKAGEAGTLGLTGLQNLGNTCFMNSSLQCLAHTPKLVDFFLGEYSKEINLDNPLGMKGEIALAFGDLLRSLWAPGASTVAPRTFKAKLARFAPQFSGFNQHDSQELLAFLLDGLHEDLNRVKNKPYVEAKDGDGRPDAEVADEYWRNHVARNDSIIVDVCQGQYKSTLVCPICKKVSVMFDPFMYLSLPLPCTSMRTMDLTVMSADGSSLPIPLTVNVPKFGKFEDLHKALVTACSLPEEETLLVTEVYNNRIIRFLEEPTDSLTLIRDGDKLVVYRLKKDANNSPLIVYMHQKLEEQFISGKSSPTWKAFGIPLVSRLCDVENGSDVENLYLKLLSSFKMPTEFFTENLENPTEEEATDKTDTDGTTSVEDTNSTDVKETTESLPDPVLRLYLTDDRGNSIEAEMLKEKPVNKSKRLNVLARWPVKELDVYDTCLLSSLPEVSKSGTKRPQESVSLFKCLEAFLTEEPLGPDDMWYCPGCKEHRQAIKKLDLWRLPEILVIHLKRFSYSRFMKNKLEAYVDFPLDNLDLSSYISYKNGQTTYRYMLYAISNHYGSMGGGHYTAYVHHGGDRWYDFDDSHVHQISQEKIKTSAAYVLFYKRLVD

SEQ ID NO: 102744 - protein, 1246 aa, Arabidopsis thaliana
  peptide (1)..(1246): Ceres Seq. ID no. 13611140
MRRQGNFADSSPASAYGAGQIQDPHSDFQGQLEAFTPERDQPYSDSQAEGQWRWERDGPNMSRPMATAVYNEGQQGVDSSRTYYRGQIDPKSGMEKQGSDPRAQPQHQENPKTGYDNNRGVQTFEGLEQKFMDDITRLAKDQIEAEDAEIARHREKINTINARYEEQLATLRARHTGKREEIMRKESLARQQQFKQQTMGMMDQYHPNVVGQANLMPSGHPQGYIGSAQDPAAVADAPPRSYGSDRFEAYGERARFQGGNRDHGFEPRGPYPGGNVYDTSSRSKSSFSDYPEFENEIRVPFFNPDESILEFIVEPFKEIAVLRCCWLSEKHLSFALRIFLCGGGTMNGTSPDESPDSTTQRIDSFNGEQRVYFVPLRWWKDAQDSMPSESVEKREILYTASCGSSYGGPMKLINNIFNSDILFDLRREGDALQNGETGEASVSGRDFALVSSDMWLQALKCIRSNDSFMEFFVFSASVHSLENEFLKKRLRYHDDKNTEKGVKSFSAGGVDRGDVYPVQLRLSVLQETNSLAVKICKKDNSVECFRRACKIFSLDSEQLRIWDISGQTTLFFESDVSNSKDCQQQADQEILLELQIYGLSDSIKLKESKKEDGSTQQTNGITNGMNGGTVFRFGRSNSLSFLGKAGEAGTLGLTGLQNLGNTCFMNSSLQCLAHTPKLVDFFLGEYSKEINLDNPLGMKGEIALAFGDLLRSLWAPGASTVAPRTFKAKLARFAPQFSGFNQHDSQELLAFLLDGLHEDLNRVKNKPYVEAKDGDGRPDAEVADEYWRNHVARNDSIIVDVCQGQYKSTLVCPICKKVSVMFDPFMYLSLPLPCTSMRTMDLTVMSADGSSLPIPLTVNVPKFGKFEDLHKALVTACSLPEEETLLVTEVYNNRIIRFLEEPTDSLTLIRDGDKLVVYRLKKDANNSPLIVYMHQKLEEQFISGKSSPTWKAFGIPLVSRLCDVENGSDVENLYLKLLSSFKMPTEFFTENLENPTEEEATDKTDTDGTTSVEDTNSTDVKETTESLPDPVLRLYLTDDRGNSIEAEMLKEKPVNKSKRLNVLARWPVKELDVYDTCLLSSLPEVSKSGTKRPQESVSLFKCLEAFLTEEPLGPDDMWYCPGCKEHRQAIKKLDLWRLPEILVIHLKRFSYSRFMKNKLEAYVDFPLDNLDLSSYISYKNGQTTYRYMLYAISNHYGSMGGGHYTAYVHHGGDRWYDFDDSHVHQISQEKIKTSAAYVLFYKRLVD

SEQ ID NO: 102745 - protein, 1186 aa, Arabidopsis thaliana
  peptide (1)..(1186): Ceres Seq. ID no. 13611141
MSRPMATAVYNEGQQGVDSSRTYYRGQIDPKSGMEKQGSDPRAQPQHQENPKTGYDNNRGVQTFEGLEQKFMDDITRLAKDQIEAEDAEIARHREKINTINARYEEQLATLRARHTGKREEIMRKESLARQQQFKQQTMGMMDQYHPNVVGQANLMPSGHPQGYIGSAQDPAAVADAPPRSYGSDRFEAYGERARFQGGNRDHGFEPRGPYPGGNVYDTSSRSKSSFSDYPEFENEIRVPFFNPDESILEFIVEPFKEIAVLRCCWLSEKHLSFALRIFLCGGGTMNGTSPDESPDSTTQRIDSFNGEQRVYFVPLRWWKDAQDSMPSESVEKREILYTASCGSSYGGPMKLINNIFNSDILFDLRREGDALQNGETGEASVSGRDFALVSSDMWLQALKCIRSNDSFMEFFVFSASVHSLENEFLKKRLRYHDDKNTEKGVKSFSAGGVDRGDVYPVQLRLSVLQETNSLAVKICKKDNSVECFRRACKIFSLDSEQLRIWDISGQTTLFFESDVSNSKDCQQQADQEILLELQIYGLSDSIKLKESKKEDGSTQQTNGITNGMNGGTVFRFGRSNSLSFLGKAGEAGTLGLTGLQNLGNTCFMNSSLQCLAHTPKLVDFFLGEYSKEINLDNPLGMKGEIALAFGDLLRSLWAPGASTVAPRTFKAKLARFAPQFSGFNQHDSQELLAFLLDGLHEDLNRVKNKPYVEAKDGDGRPDAEVADEYWRNHVARNDSIIVDVCQGQYKSTLVCPICKKVSVMFDPFMYLSLPLPCTSMRTMDLTVMSADGSSLPIPLTVNVPKFGKFEDLHKALVTACSLPEEETLLVTEVYNNRIIRFLEEPTDSLTLIRDGDKLVVYRLKKDANNSPLIVYMHQKLEEQFISGKSSPTWKAFGIPLVSRLCDVENGSDVENLYLKLLSSFKMPTEFFTENLENPTEEEATDKTDTDGTTSVEDTNSTDVKETTESLPDPVLRLYLTDDRGNSIEAEMLKEKPVNKSKRLNVLARWPVKELDVYDTCLLSSLPEVSKSGTKRPQESVSLFKCLEAFLTEEPLGPDDMWYCPGCKEHRQAIKKLDLWRLPEILVIHLKRFSYSRFMKNKLEAYVDFPLDNLDLSSYISYKNGQTTYRYMLYAISNHYGSMGGGHYTAYVHHGGDRWYDFDDSHVHQISQEKIKTSAAYVLFYKRLVD

SEQ ID NO: 102746 - DNA, 1129 bp, Arabidopsis thaliana
  misc_feature (1)..(1129): Ceres Seq. ID no. 13611142
  misc_feature (1)..(1129): Ortholog of  Ceres SEQ ID NO 13594740 as cited in SEQ ID NO 51721
  misc_feature (1)..(1129): Ortholog of  Ceres SEQ ID NO 14316497 as cited in SEQ ID NO 58285
  misc_feature (1)..(1129): Ortholog of  Ceres SEQ ID NO 13595944 as cited in SEQ ID NO 68153
aaccattcctttccttatcttcttcctcttttgcttttctaatctctcaatggctaccttaaaacacaaacctgtaaatttggtattttacgtttataatttgattattatattctcctcccatagttccacggcggagctccgcaggctactgcagccatcaaaaaccgatggtacagtgagctttctcgttatcggagactggggaagaagaggctcctataatcagtcccaagtagctcttcagatgggagaaatcggagagaaattagatatcgattttgtgatttctactggagataatttttacgacaatggtttaaccagcttgcacgatcctctatttcaagattcttttaccaacatttataccgctccgagcttgcagaaaccttggtatagtgttttaggaaatcatgattatagaggtgacgtcagggcacaacttagccctatgctcagagctctggacaacagatgggtttgcatgagatctttcattgtaaatgctgagatcgtcgatttgttcttcgtcgacacaactccgttcgtcgataaatactttattcaaccaaataagcatgtttatgactggagcggtgtattacctaggcaaacatatctgaataatctcttaaaggaactcgacgtggcgttgagagagtcagtcgcaaagtggaaaatagtgattggtcaccatacgatcaaaagcgcaggccaccacgggaacaccattgagttggagaaacaccttttacctattctccaagcaaatgaagtggatctctacgtaaacggacatgatcattgcttagagcacataagcagcgtggacagtaacatacaatttatgacaagtggaggtggatccaaggcctggaaaggaggtgacgtgaactacgttgaaccagaagagatgaggttttactacgacggacaaggtttcatgtcggttcacgtttcagaagctgaactgcgtgtagtcttttatgatgtttttggacacgttctgcatcattggaagaagacttacaaggaggcgctttatttcgcttcttgattccaatttaatcggacgtaattgtttatgatcgatgtactatgaaattatcaatatcgtacttcgtcg

SEQ ID NO: 102747 - protein, 352 aa, Arabidopsis thaliana
  peptide (1)..(352): Ceres Seq. ID no. 13611143
TIPFLIFFLFCFSNLSMATLKHKPVNLVFYVYNLIIIFSSHSSTAELRRLLQPSKTDGTVSFLVIGDWGRRGSYNQSQVALQMGEIGEKLDIDFVISTGDNFYDNGLTSLHDPLFQDSFTNIYTAPSLQKPWYSVLGNHDYRGDVRAQLSPMLRALDNRWVCMRSFIVNAEIVDLFFVDTTPFVDKYFIQPNKHVYDWSGVLPRQTYLNNLLKELDVALRESVAKWKIVIGHHTIKSAGHHGNTIELEKHLLPILQANEVDLYVNGHDHCLEHISSVDSNIQFMTSGGGSKAWKGGDVNYVEPEEMRFYYDGQGFMSVHVSEAELRVVFYDVFGHVLHHWKKTYKEALYFAS

SEQ ID NO: 102748 - protein, 336 aa, Arabidopsis thaliana; identical to SEQ ID NO: 29307
  peptide (1)..(336): Ceres Seq. ID no. 13611144

SEQ ID NO: 102749 - protein, 270 aa, Arabidopsis thaliana; identical to SEQ ID NO: 29308
  peptide (1)..(270): Ceres Seq. ID no. 13611145

SEQ ID NO: 102750 - DNA, 753 bp, Arabidopsis thaliana
  misc_feature (1)..(753): Ceres Seq. ID no. 13611158
  misc_feature (1)..(753): Ortholog of  Ceres SEQ ID NO 15173624 as cited in SEQ ID NO 60470
gacaaacatcacagagtaagtaagaatggtacagacgaagaagttcagaggtgtcaggcaacgccattggggttcttgggtcgctgagattcgtcatcctctcttgaaacggaggatttggctagggacgttcgagaccgcagaggaggcagcaagagcatacgacgaggccgccgttttaatgagcggccgcaacgccaaaaccaactttcccctcaacaacaacaacaccggagaaacttccgagggcaaaaccgatatttcagcttcgtccacaatgtcatcctcaacatcatcttcatcgctctcttccatcctcagcgccaaactgaggaaatgctgcaagtctccttccccatccctcacctgcctccgtcttgacacagccagctcccatatcggcgtctggcagaaacgggccggttcaaagtctgactccagctgggtcatgacggtggagctaggtcccgcaagctcctcccaagagactactagtaaagcttcacaagacgctattcttgctccgaccactgaagttgaaattggtggcagcagagaagaagtattggatgaggaagaaaaggttgctttgcaaatgatagaggagcttctcaatacaaactaaatcttatttgcttatatatatgtacctattttcattgctgatttacagccaaaataatcaattataccgtgtattttatagatgttttatattaaaaggttgttagctatatattgtttctctttttc

SEQ ID NO: 102751 - protein, 199 aa, Arabidopsis thaliana; identical to SEQ ID NO: 30300
  peptide (1)..(199): Ceres Seq. ID no. 13611159

SEQ ID NO: 102752 - protein, 147 aa, Arabidopsis thaliana; identical to SEQ ID NO: 30301
  peptide (1)..(147): Ceres Seq. ID no. 13611160

SEQ ID NO: 102753 - protein, 115 aa, Arabidopsis thaliana; identical to SEQ ID NO: 30302
  peptide (1)..(115): Ceres Seq. ID no. 13611161

SEQ ID NO: 102754 - DNA, 1004 bp, Arabidopsis thaliana
  misc_feature (1)..(1004): Ceres Seq. ID no. 13611166
  misc_feature (1)..(1004): Ortholog of  Ceres SEQ ID NO 15170745 as cited in SEQ ID NO 52595
tcgtatttcaagaaatgacgaccgatgggactccaccgagacgaagcgacggccatggaaacccttttcagagtctcacttcgtctacttccggtttccgccgccgtgacatgtcgctcgatccgattccccgtttcaagacccggttcctcacacttactgaaccgtaagctgtataatttgcctacttcttcttcctcctctttgtcgacaaaagccggttggttattgggtcttggtgagaagaaaaagaaagtggatttaccggagatagtggcatctggtgacccggttctgcacgagaaggcccgagaagttgacccgggagaaatcgggtcggagcgtattcagaagataattgatgatatgattaaagttatgagattggctcctggagttggcctcgctgctcctcaaattggtgttcccttaaggattattgtattggaagatacaaaagagtatataagttacgcaccaaaggaagagattcttgctcaagaaagacgtcattttgatctcatggtgatggtgaatccggttctcaaggagagaagcaacaagaaagctcttttctttgaaggatgcttgagtgttgatggattcagagctgcggtggagagataccttgaggtggtagtgacgggctacgatcgtcaaggaaagaggattgaagtgaatgcttcaggttggcaagctaggattttgcaacatgagtgtgatcatttggatggtaatctttacgttgataagatggtaccacgcacttttaggacagtcgacaacttggacttgcctttagctgagggctgccctaagctcggacctcaatgacagattcttcaacaaaagttgtaatcttctgttttgattctttactaaaactcttctagattgagcttgactcaaataatttcaaagatgaaactttgtcggaaagagggttcttttttcgggtttggtaatggattgaaagattttcatttaataaaatattataactt

SEQ ID NO: 102755 - protein, 269 aa, Arabidopsis thaliana; identical to SEQ ID NO: 37175
  peptide (1)..(269): Ceres Seq. ID no. 13611167

SEQ ID NO: 102756 - protein, 259 aa, Arabidopsis thaliana; identical to SEQ ID NO: 37176
  peptide (1)..(259): Ceres Seq. ID no. 13611168

SEQ ID NO: 102757 - protein, 155 aa, Arabidopsis thaliana; identical to SEQ ID NO: 37177
  peptide (1)..(155): Ceres Seq. ID no. 13611169

SEQ ID NO: 102758 - DNA, 1033 bp, Arabidopsis thaliana
  misc_feature (1)..(1033): Ceres Seq. ID no. 13611185
  misc_feature (1)..(1033): Ortholog of  Ceres SEQ ID NO 12635513 as cited in SEQ ID NO 0
aatctcctctctttgattctttctgctccgaaaaacagagagagagaacaacaaccaaacactcatttctccacatcttgagagaaaaaaacagagcaagtatattagagatctcatggcgatggcggtctccggagctgtcctcagtgggcttggttcttcgttcctcaccggaggcaagagaggtgccaccgcattggcaagcggcgtaggcactggagctcagagagttggcaggaaaactcttattgtcgctgctgcggctgctcagcctaagaaatcttggatccctgccgttaaaggtggtggcaacttccttgaccctgaatggctcgatggctcgctaccaggagatttcgggttcgacccattgggtttggggaaagacccggcttttctgaaatggtacagagaggctgagctgatccatggccgatgggcgatggcagcggttcttgggatcttcgtcggccaggcctggagcggtgtggcatggtttgaagctggagcccagccagacgcgatcgctcccttctcgttcgggtcgcttcttggaacccaattgcttctcatgggttgggtggagagcaaacgatgggtcgatttcttcaacccggattctcaatcggttgagtgggcaacgccatggtcgaagaccgccgagaatttcgcgaactataccggcgatcagggataccccggtgggagattcttcgatccgttgggtctcgccgggaaaaaccgcgacggtgtttatgagccggactttgagaagctggagaggctgaaattggcagagattaagcactcgaggctcgcaatggttgccatgttgatcttttactttgaggccgggcaggggaaaacgcctctcggtgctcttggtttgtgagaaaacggcatgatgtttttgattctgtagatacaatttctcttccaaaaacctaatgtttctcttcttcaatgtgacatttgggaaaagatcatcaaaccattgctataaatgtaaaatgaaatcatgaggcttgttcgt

SEQ ID NO: 102759 - protein, 258 aa, Arabidopsis thaliana; identical to SEQ ID NO: 40172
  peptide (1)..(258): Ceres Seq. ID no. 13611186

SEQ ID NO: 102760 - protein, 256 aa, Arabidopsis thaliana; identical to SEQ ID NO: 40173
  peptide (1)..(256): Ceres Seq. ID no. 13611187

SEQ ID NO: 102761 - protein, 149 aa, Arabidopsis thaliana; identical to SEQ ID NO: 40174
  peptide (1)..(149): Ceres Seq. ID no. 13611188

SEQ ID NO: 102762 - DNA, 1982 bp, Arabidopsis thaliana
  misc_feature (1)..(1982): Ceres Seq. ID no. 13611193
  misc_feature (1)..(1982): Ortholog of  Ceres SEQ ID NO 15226493 as cited in SEQ ID NO 59078
gatccttgtcacaaaatgtcgcgtaattcttctactgatttcagctcaatcgctcaaattcgagtttgcgtttagaaattgaagttgactcttctgttcttgaatctatctccgatcggtgaactatctcgcagtaccaggagattgatcactccttcgacattgctctttgaattcgtcctcaagggtattaatgagctcgtagaagctaccagaaatggcgtccatgagctctggtgatgaaagccttcgactttgcatgtttgatttgaggagaggtcaaactgaaggacaagagttagagaaaattttgttcttttatcctgccgatttagacttctcgacgcagttatcagtgatcgggctcagtgaagggcttattacttttactagacttttctctccggaggcggcttgtgaagtgatcgaagcagaaagacattcccatgttttctatgaggctgaacctgatatctggatggttatggttgtggagaaaaataaggagacaggagcgatatggaggatcgatgcattaaggagggtgcttaaagaagtgcactcactctttgtgatgtttcacgggtcaattagggcattaatcgaaaaagaaccaacaggagggcttacccgatcactattgtacccgttcatcacagattatttaagcacatttcaaatatggtctctctcggaagactgctgctgtgaattttttgttgggaagaaacttcagctaccaactttccgtgaaactttgagagagcgtggaactgttcaaatgcttactttagcaagggatactgcagttgaagttcagtctcttgttcaagtactagattcatgtgctgggagcttacgatgtcactctatgatcttatttcaagatcttttggtttcaacaaccctctcagctgatgataccgtcgacttgtttacatttgcggtaatgaggttgacctcaaaagctttatcctctgatacgagttcttggtcatatctacgtaaagggcctggttcatctgaaatctcttctagatctaatctggcacccgttggctcaattgattccctacactcaagaaacggtaataacatgcatcatgttattaggccactacaaaatgataagtggacaaaagggaaagatgggtttctaataaccgatatttggggtcttgagactggcggctcccctgattctgccatccctacaatttggcttcagcagacacaagaaagaatgtatctccttgcctatcagcataaaagtctcaccttacttcttctgatgcctacaaatgccattgtcaatggagatttaagcatctcagccgtgaaacagcaagttattgaagatgcatcactgagaattttgaaaattgaagagaatatttcaagagggtggggcggtgagaatgcttaccatattaagggttaccgttacttagtagttgataatgacacgaaagtatccagatcttctccttcaggaaaagtaacaacacttgcaaaggagtctctacttgcactaaacaagcttagagaagaagtggattcagaaaaaagccgtgcaaaaggacaggagaaagacatggaaatatgcatcagagctaagaacaatgtgtgggtgatcgcccgtgtgaccagaggcaaagagctttacatggctttggagaaaggcagcgacactcttcttgataccacagacgctgttggaagattcagcaacaggtattgcagcggagcattcttgatggactaagttttcgtgttctttcttctggttttgggaagagggttcttctagtttcaagtacgaagtgaaaagctcagaagaagtaatgagcacttctctctcagccattaattttgttttgtgagaaattgcagagaggaaaacgattgtgttcttagttggcctgtagatatgtaacaatgatattccacgttggatcagtgcaaacaaatccttttttgtg

SEQ ID NO: 102763 - protein, 515 aa, Arabidopsis thaliana
  peptide (1)..(515): Ceres Seq. ID no. 13611194
MASMSSGDESLRLCMFDLRRGQTEGQELEKILFFYPADLDFSTQLSVIGLSEGLITFTRLFSPEAACEVIEAERHSHVFYEAEPDIWMVMVVEKNKETGAIWRIDALRRVLKEVHSLFVMFHGSIRALIEKEPTGGLTRSLLYPFITDYLSTFQIWSLSEDCCCEFFVGKKLQLPTFRETLRERGTVQMLTLARDTAVEVQSLVQVLDSCAGSLRCHSMILFQDLLVSTTLSADDTVDLFTFAVMRLTSKALSSDTSSWSYLRKGPGSSEISSRSNLAPVGSIDSLHSRNGNNMHHVIRPLQNDKWTKGKDGFLITDIWGLETGGSPDSAIPTIWLQQTQERMYLLAYQHKSLTLLLLMPTNAIVNGDLSISAVKQQVIEDASLRILKIEENISRGWGGENAYHIKGYRYLVVDNDTKVSRSSPSGKVTTLAKESLLALNKLREEVDSEKSRAKGQEKDMEICIRAKNNVWVIARVTRGKELYMALEKGSDTLLDTTDAVGRFSNRYCSGAFLMD

SEQ ID NO: 102764 - protein, 512 aa, Arabidopsis thaliana
  peptide (1)..(512): Ceres Seq. ID no. 13611195
MSSGDESLRLCMFDLRRGQTEGQELEKILFFYPADLDFSTQLSVIGLSEGLITFTRLFSPEAACEVIEAERHSHVFYEAEPDIWMVMVVEKNKETGAIWRIDALRRVLKEVHSLFVMFHGSIRALIEKEPTGGLTRSLLYPFITDYLSTFQIWSLSEDCCCEFFVGKKLQLPTFRETLRERGTVQMLTLARDTAVEVQSLVQVLDSCAGSLRCHSMILFQDLLVSTTLSADDTVDLFTFAVMRLTSKALSSDTSSWSYLRKGPGSSEISSRSNLAPVGSIDSLHSRNGNNMHHVIRPLQNDKWTKGKDGFLITDIWGLETGGSPDSAIPTIWLQQTQERMYLLAYQHKSLTLLLLMPTNAIVNGDLSISAVKQQVIEDASLRILKIEENISRGWGGENAYHIKGYRYLVVDNDTKVSRSSPSGKVTTLAKESLLALNKLREEVDSEKSRAKGQEKDMEICIRAKNNVWVIARVTRGKELYMALEKGSDTLLDTTDAVGRFSNRYCSGAFLMD

SEQ ID NO: 102765 - protein, 501 aa, Arabidopsis thaliana
  peptide (1)..(501): Ceres Seq. ID no. 13611196
MFDLRRGQTEGQELEKILFFYPADLDFSTQLSVIGLSEGLITFTRLFSPEAACEVIEAERHSHVFYEAEPDIWMVMVVEKNKETGAIWRIDALRRVLKEVHSLFVMFHGSIRALIEKEPTGGLTRSLLYPFITDYLSTFQIWSLSEDCCCEFFVGKKLQLPTFRETLRERGTVQMLTLARDTAVEVQSLVQVLDSCAGSLRCHSMILFQDLLVSTTLSADDTVDLFTFAVMRLTSKALSSDTSSWSYLRKGPGSSEISSRSNLAPVGSIDSLHSRNGNNMHHVIRPLQNDKWTKGKDGFLITDIWGLETGGSPDSAIPTIWLQQTQERMYLLAYQHKSLTLLLLMPTNAIVNGDLSISAVKQQVIEDASLRILKIEENISRGWGGENAYHIKGYRYLVVDNDTKVSRSSPSGKVTTLAKESLLALNKLREEVDSEKSRAKGQEKDMEICIRAKNNVWVIARVTRGKELYMALEKGSDTLLDTTDAVGRFSNRYCSGAFLMD

SEQ ID NO: 102766 - DNA, 1549 bp, Arabidopsis thaliana
  misc_feature (1)..(1549): Ceres Seq. ID no. 13611201
  misc_feature (1)..(1549): Ortholog of  Ceres SEQ ID NO 14316049 as cited in SEQ ID NO 67036
  misc_feature (1)..(1549): Ortholog of  Ceres SEQ ID NO 14313252 as cited in SEQ ID NO 67134
tttgtctcatttttttactcaaacgaacattttcgtggctccagagctacactcaaaagccattcagcggaaggggttaggatttttggcggcgagatctctctgtttctggtagcttagcaatggccttatcttctctcctcagatctgccgccacttccgccgcagctcctcgtgtcgagctttatccatcgtcatcgtacaatcattctcaggtcacgtcaagtcttggattcagtcatagcctgacctcgtctagattttctggtgctgcagtttcaaccggaaaatacaatgcgaagagggttcaacccatcaaggccacagctacggaagcacctcctgctgttcataggtcaaggagcagtggaaagacaaaggttgggatcaacggttttggtcgaattggaagattggtcctccgcatcgcaacctttagggatgatatcgaggttgtagcagtcaacgatccattcatagatgccaagtacatggcttacatgttcaagtatgattctactcatggaaattacaaaggaactatcaatgtaattgatgattcaactttggagatcaatggaaaacaagtcaaagttgtcagcaagagagacccagctgaaatcccgtgggctgatcttggagctgagtatgttgttgagtcttcaggggtattcaccaccgttggacaagcttcatcacatttgaagggtggtgctaagaaggtcatcatttctgcaccttcagcggacgcgcccatgtttgttgttggagtaaatgaaaagacatacctgcctaacatggatatagtctccaatgcaagttgtaccaccaattgtcttgcacctcttgccaaggtggtgcatgaggaatttggtattcttgaaggcttgatgacaacagtccacgcgaccacagctactcagaaaactgtggacggcccatcaatgaaggactggagaggaggccgaggcgcaagtcaaaacatcattcctagctcaacaggcgctgcaaaggctgttggtaaggtccttccggaactcaatggaaaactaacaggaatggccttccgtgtcccaacaccaaatgtctctgttgtggatttaacttgtcgacttgagaaggatgcatcgtatgaagacgtcaaggcagccataaagtttgcatcagaaggaccacttaggggcattcttggatatacagaagaagatgtcgtctctaatgattttcttggagattcaaggtcaagtatctttgatgctaatgctgggattggattaagcaagtccttcatgaaacttgtctcctggtatgacaacgaatggggttacagcaaccgagtccttgacctgatagaacacatggcgttagttgcagccagccgctaaaaccatatcccgccaacgttcgttaggtagtttttgttacattgggggttcgattactgaaccttccggttttggctccaagttttatgtaaaaccatacgatatctaataatatggggaagattttttttgttgtacgaagaaatattgttagcagctagtcg

SEQ ID NO: 102767 - protein, 420 aa, Arabidopsis thaliana
  peptide (1)..(420): Ceres Seq. ID no. 13611202
MALSSLLRSAATSAAAPRVELYPSSSYNHSQVTSSLGFSHSLTSSRFSGAAVSTGKYNAKRVQPIKATATEAPPAVHRSRSSGKTKVGINGFGRIGRLVLRIATFRDDIEVVAVNDPFIDAKYMAYMFKYDSTHGNYKGTINVIDDSTLEINGKQVKVVSKRDPAEIPWADLGAEYVVESSGVFTTVGQASSHLKGGAKKVIISAPSADAPMFVVGVNEKTYLPNMDIVSNASCTTNCLAPLAKVVHEEFGILEGLMTTVHATTATQKTVDGPSMKDWRGGRGASQNIIPSSTGAAKAVGKVLPELNGKLTGMAFRVPTPNVSVVDLTCRLEKDASYEDVKAAIKFASEGPLRGILGYTEEDVVSNDFLGDSRSSIFDANAGIGLSKSFMKLVSWYDNEWGYSNRVLDLIEHMALVAASR

SEQ ID NO: 102768 - protein, 297 aa, Arabidopsis thaliana; identical to SEQ ID NO: 38140
  peptide (1)..(297): Ceres Seq. ID no. 13611203

SEQ ID NO: 102769 - protein, 294 aa, Arabidopsis thaliana; identical to SEQ ID NO: 38141
  peptide (1)..(294): Ceres Seq. ID no. 13611204

SEQ ID NO: 102770 - DNA, 1122 bp, Arabidopsis thaliana
  misc_feature (1)..(1122): Ceres Seq. ID no. 13611209
  misc_feature (1)..(1122): Ortholog of  Ceres SEQ ID NO 14314252 as cited in SEQ ID NO 57492
  misc_feature (1)..(1122): Ortholog of  Ceres SEQ ID NO 12608276 as cited in SEQ ID NO 57871
  misc_feature (1)..(1122): Ortholog of  Ceres SEQ ID NO 13598492 as cited in SEQ ID NO 63882
  misc_feature (1)..(1122): Ortholog of  Ceres SEQ ID NO 13657914 as cited in SEQ ID NO 66230
  misc_feature (1)..(1122): Ortholog of  Ceres SEQ ID NO 13595877 as cited in SEQ ID NO 67702
  misc_feature (1)..(1122): Ortholog of  Ceres SEQ ID NO 13622667 as cited in SEQ ID NO 0
ccaaacatatacatcaaagcttgactctctttttctctcccatggaatcaacaaagaagcaagtctcgttggagctacttccatggttagttgtccacaccgatggaacggtagagagactagcgggaaccgaggtttgtcctcccggtttggatccaataaccggggttttctctaaagatatcattatcgaaccgaaaaccggtttatctgcccgaatctatcgacccttctcgattcaacccggtcagaagattcctctcatgctctattttcatggcggtgcatttctcatctcctccacttccttcccctcttaccacaccagtcttaacaaaattgtcaatcaggctaacgtcatagccgtctctgtcaattacagactagcaccagaacatccacttcctacagcgtacgaagactcatggactgcgctaaagaatatccaagccataaacgagccgtggatcaacgactacgccgacttggacagtttattcctagtgggagatagcgcgggagctaatatctcgcaccacctcgcatttcgagccaaacaatctgaccaaaccttgaaaatcaaaggcattggaatgatccacccatatttttgggggacacaacctatcggagcagagatcaaagacgaagcgaggaaacaaatggtggacggatggtgggaattcgtgtgcccatccgagaaaggatccgatgacccgtggattaatccgtttgcggacgggtcaccggatcttggagggttagggtgtgagagagtgatgattactgtggcggagaaagatatattgaatgagagagggaagatgtattacgaaagattggtgaagagtgagtggaaaggaaaggttgagattatggagacgaaagagaaagatcatgtttttcatattttcgagccagattgtgatgaagctatggagatggtacgatgcttggctctctttataaaccaagttgaagcttgatattatttgttttgccaaaatttgatggcttttttaatgtttgtataatttttacatgtttgttaatgttgttgttattgtcttttcttttaaatttgtgtattacatttatatgtggttaaatttgtgttttttc

SEQ ID NO: 102771 - protein, 327 aa, Arabidopsis thaliana
  peptide (1)..(327): Ceres Seq. ID no. 13611210
KHIHQSLTLFFSPMESTKKQVSLELLPWLVVHTDGTVERLAGTEVCPPGLDPITGVFSKDIIIEPKTGLSARIYRPFSIQPGQKIPLMLYFHGGAFLISSTSFPSYHTSLNKIVNQANVIAVSVNYRLAPEHPLPTAYEDSWTALKNIQAINEPWINDYADLDSLFLVGDSAGANISHHLAFRAKQSDQTLKIKGIGMIHPYFWGTQPIGAEIKDEARKQMVDGWWEFVCPSEKGSDDPWINPFADGSPDLGGLGCERVMITVAEKDILNERGKMYYERLVKSEWKGKVEIMETKEKDHVFHIFEPDCDEAMEMVRCLALFINQVEA

SEQ ID NO: 102772 - protein, 314 aa, Arabidopsis thaliana
  peptide (1)..(314): Ceres Seq. ID no. 13611211
MESTKKQVSLELLPWLVVHTDGTVERLAGTEVCPPGLDPITGVFSKDIIIEPKTGLSARIYRPFSIQPGQKIPLMLYFHGGAFLISSTSFPSYHTSLNKIVNQANVIAVSVNYRLAPEHPLPTAYEDSWTALKNIQAINEPWINDYADLDSLFLVGDSAGANISHHLAFRAKQSDQTLKIKGIGMIHPYFWGTQPIGAEIKDEARKQMVDGWWEFVCPSEKGSDDPWINPFADGSPDLGGLGCERVMITVAEKDILNERGKMYYERLVKSEWKGKVEIMETKEKDHVFHIFEPDCDEAMEMVRCLALFINQVEA

SEQ ID NO: 102773 - protein, 240 aa, Arabidopsis thaliana
  peptide (1)..(240): Ceres Seq. ID no. 13611212
MLYFHGGAFLISSTSFPSYHTSLNKIVNQANVIAVSVNYRLAPEHPLPTAYEDSWTALKNIQAINEPWINDYADLDSLFLVGDSAGANISHHLAFRAKQSDQTLKIKGIGMIHPYFWGTQPIGAEIKDEARKQMVDGWWEFVCPSEKGSDDPWINPFADGSPDLGGLGCERVMITVAEKDILNERGKMYYERLVKSEWKGKVEIMETKEKDHVFHIFEPDCDEAMEMVRCLALFINQVEA

SEQ ID NO: 102774 - DNA, 1000 bp, Arabidopsis thaliana
  misc_feature (1)..(1000): Ceres Seq. ID no. 13611217
  misc_feature (1)..(1000): Ortholog of  Ceres SEQ ID NO 13583434 as cited in SEQ ID NO 62329
tcttcttcttcaatttcacagcttcacgtcgtcgtctttgagtcgccggagctgtagctactgatttggtaccagaaagagagtgcgacggtggacgatgacgctttttcacttcttcaactgtgcgattctcacattcggtcctcacgcggtctactactccgccactcccttatctgaatatgatacacttggaacctccgtgaaagctgctgttgtttaccttgctactgcattggttaagcttgtttgtttggcgacttttctgcaagtgtctgagactgaagtgtttgacccataccaggaagcattgaaagcgatgattggattcatagatgtcgctggtctgtattatgctctggcccagctgactcacaggaacatctcccaaaaccataagtttcaggctgttggtctcgggtgggcattcgcggattctgttttgcacaggttggcacctctctgggttggtgctcgaggactggagttcacttgggattatgttttgcaagggcttgaagccaatgcaaatctggtgttcacgatatctctagctgcactaggttcattaatgtggctacgcaagaacaagccgaagagtctgatccccatcatatacacatgtgcagtcatcattgcgacaatgccttcgatcacaagctatctaaagagagtcaatggatggcatttcccgaaaattgttgggtttgagctggcgacttctctggtaatggcttttatcagttgtcaactcttcatcctctgtcagagaccgtctttgtgagtgattccacttcccagcagagctttttgttaatgggaaactcttgcgacgcacttgccttgttttctgcaggactcggttccatggaaactttgatctttcccatctttatttgtagaagaatattgaaccatcctttcataacttattgatttgggaagtgtcattcgttaaagcatagacttagaatcataataactaagagatgtttatctt

SEQ ID NO: 102775 - protein, 228 aa, Arabidopsis thaliana; identical to SEQ ID NO: 20891
  peptide (1)..(228): Ceres Seq. ID no. 13611218

SEQ ID NO: 102776 - protein, 154 aa, Arabidopsis thaliana; identical to SEQ ID NO: 20892
  peptide (1)..(154): Ceres Seq. ID no. 13611219

SEQ ID NO: 102777 - DNA, 1346 bp, Arabidopsis thaliana
  misc_feature (1)..(1346): Ceres Seq. ID no. 13611228
  misc_feature (1)..(1346): Ortholog of  Ceres SEQ ID NO 13582388 as cited in SEQ ID NO 56812
  misc_feature (1)..(1346): Ortholog of  Ceres SEQ ID NO 14305353 as cited in SEQ ID NO 57710
aaaaaaaataaaaaagaagagacaaaggggagagagagaaaagaagagcgaacaaattccttctttttcccctctttctctctctctcccactctctcatcttcttcttcttatgattttcaacttattacaacaacaacaacaacaaaataatcttgcaaagtttcagtctcaggtggttcacagttaatgctacttgcaatgatgaatccatcccaatttcgataacctctactgaggcatccaaatgttgaacggaaaagaagagcctaagcagaagaaaggttggtcagagtcgctgctagaatttcggtcagggtttggggaaaagatgaaagttgtgtcgaagaaacgttggaaatctcttggtcctcttcatctgaaaagcaaatcagttgcacggttttgcttcttttcgaagttgaagtcaaacaaccatggtccaggccgtgcaccagtgtatctcaatgtttatgacttgactcctattaacggatatatctattgggcaggccttggtatatttcactctggtgtagaagttcatggagtagagtatgcttttggtgcccatgattatgcaacgagtggtgtttttgaggttgaaccaaggcaatgcccgggcttcaagttcaagaaatcgatattcattggaaccacgaatttaaacccaacacaagtgagagagtttatggaagacatggcttgcagttactacgggaatatgtatcacttgattgttaagaactgcaaccatttctgccaggacgtttgctacaagcttaccgggaaaaagatcccaaaatgggtgaatcggcttgcacaaataggttctgtgtgcagctgcatacttcccgagtccctcaagataacagcggtctgccacgatccagacgggcaaatcccggaggaagaaaacgaaaagagaagtcttagaagctcattcagctgtttatcatccatctccatgagacaaaaacagctttcaacatcatcattgttcctacaatcacctctcagaggctgcttacctccttggcaactcaaacgctcaaaatctaacagcagctccttgaaagaaaggtagacattccaacaaaaaccattgcggtctctcattcgtttcgttagcaacacaaaccacgatttatccttcttctatctttgtaatggagttcgaaaacagatttcccgcgccatcgcttttcatttgattttaacaggctttcataagccattcttcatcttctttctgtttgtattgcttccaaatttgaatcttttctcattttcaaaatcatgtattgcatcaacgctgtttatatctaaactagctctcttagttc

SEQ ID NO: 102778 - protein, 279 aa, Arabidopsis thaliana; identical to SEQ ID NO: 25551
  peptide (1)..(279): Ceres Seq. ID no. 13611229

SEQ ID NO: 102779 - protein, 251 aa, Arabidopsis thaliana; identical to SEQ ID NO: 25552
  peptide (1)..(251): Ceres Seq. ID no. 13611230

SEQ ID NO: 102780 - DNA, 1127 bp, Arabidopsis thaliana
  misc_feature (1)..(1127): Ceres Seq. ID no. 13611238
  misc_feature (1)..(1127): Ortholog of  Ceres SEQ ID NO 13594377 as cited in SEQ ID NO 58177
  misc_feature (1)..(1127): Ortholog of  Ceres SEQ ID NO 15224613 as cited in SEQ ID NO 58938
  misc_feature (1)..(1127): Ortholog of  Ceres SEQ ID NO 13664309 as cited in SEQ ID NO 60596
agatcataaagaaccaaaaataaaagccaaaacgtttttagacatggcactcacaaaagagagaagaagcttgttggtttcaatggtgttggtgttcttcttcttcaactttcaccatcttcaagtcacgagttgtccagatcaggcgacgacaaactgtacggaccaggacaggaaattattggagtttccattgaatttggagtaccttgaagctgagtttttcttgttcggagcgttagggcttggtcttgataaagtcgcaccaaatctaacaatgggagggccaagtcctattggagctcagaaagccaatctcgatcctttgacaagagatattattttgcagtttgcttggcaagaggttggccacttgagggcaatcaagaaaacggtgaaaggatttgcaaggccacaacttgatttgagtaagaaagcatttgctaaagtgatggataaagcatttggagtaaaatttgtgccgccgttcaatccttatgccaattcttacaattacctcattgcatcgtatttggtcccttatgttggtctcaccggatacgttggcgctaaccctaaactgcaatgtccagcctcaagaaagttagtagcaggacttttgggagtagaatcgggtcaagacgcggtgattagaggtatgttatatgctcgagcggcacacatagtctatccttatggtgtcacggttgcggctttcacggataagatttcggatctaaggaacaaattgggaaaagcgggtgtgaaagatgagggattgatcgtacctaaattcatgggtgcagaaggacaagtgattgggaatgtattggtcggtaatgagctctcgctttcgtttgatagaacacctgaggagattctacggattgtgtatggaagtggaaatgaaagtgttcccggtggattttaccctaaaggagcggatggagaaatcgctaagtcttatttggttactgtcgggagtgagtgaggtttagttttgctttggagtttaatttcctttgtagttcttaggtttttggttatataggagactaatgaaaataattgtcgtattattgtaataaatgttgtgagagtgacatttccataatcgataaaaagtt

SEQ ID NO: 102781 - protein, 329 aa, Arabidopsis thaliana
  peptide (1)..(329): Ceres Seq. ID no. 13611239
DHKEPKIKAKTFLDMALTKERRSLLVSMVLVFFFFNFHHLQVTSCPDQATTNCTDQDRKLLEFPLNLEYLEAEFFLFGALGLGLDKVAPNLTMGGPSPIGAQKANLDPLTRDIILQFAWQEVGHLRAIKKTVKGFARPQLDLSKKAFAKVMDKAFGVKFVPPFNPYANSYNYLIASYLVPYVGLTGYVGANPKLQCPASRKLVAGLLGVESGQDAVIRGMLYARAAHIVYPYGVTVAAFTDKISDLRNKLGKAGVKDEGLIVPKFMGAEGQVIGNVLVGNELSLSFDRTPEEILRIVYGSGNESVPGGFYPKGADGEIAKSYLVTVGSE

SEQ ID NO: 102782 - protein, 315 aa, Arabidopsis thaliana
  peptide (1)..(315): Ceres Seq. ID no. 13611240
MALTKERRSLLVSMVLVFFFFNFHHLQVTSCPDQATTNCTDQDRKLLEFPLNLEYLEAEFFLFGALGLGLDKVAPNLTMGGPSPIGAQKANLDPLTRDIILQFAWQEVGHLRAIKKTVKGFARPQLDLSKKAFAKVMDKAFGVKFVPPFNPYANSYNYLIASYLVPYVGLTGYVGANPKLQCPASRKLVAGLLGVESGQDAVIRGMLYARAAHIVYPYGVTVAAFTDKISDLRNKLGKAGVKDEGLIVPKFMGAEGQVIGNVLVGNELSLSFDRTPEEILRIVYGSGNESVPGGFYPKGADGEIAKSYLVTVGSE

SEQ ID NO: 102783 - protein, 302 aa, Arabidopsis thaliana
  peptide (1)..(302): Ceres Seq. ID no. 13611241
MVLVFFFFNFHHLQVTSCPDQATTNCTDQDRKLLEFPLNLEYLEAEFFLFGALGLGLDKVAPNLTMGGPSPIGAQKANLDPLTRDIILQFAWQEVGHLRAIKKTVKGFARPQLDLSKKAFAKVMDKAFGVKFVPPFNPYANSYNYLIASYLVPYVGLTGYVGANPKLQCPASRKLVAGLLGVESGQDAVIRGMLYARAAHIVYPYGVTVAAFTDKISDLRNKLGKAGVKDEGLIVPKFMGAEGQVIGNVLVGNELSLSFDRTPEEILRIVYGSGNESVPGGFYPKGADGEIAKSYLVTVGSE

SEQ ID NO: 102784 - DNA, 1250 bp, Arabidopsis thaliana
  misc_feature (1)..(1250): Ceres Seq. ID no. 13611266
  misc_feature (1)..(1250): Ortholog of  Ceres SEQ ID NO 15177718 as cited in SEQ ID NO 0
aagcaaaagttgtgtttctcataaagatctcaaagatattcctactacacatgggttctcttgacttgccttacgcttcatcgttcaagggaggaagtgaaacctttctccagaatgtatttgaaagtatactgaaaacgtatttgaggaagaacccgatggcgaagacgatatgggaactagttaagtcggtggacaacgaaaagatctcttacgaccacttctttttcaggacatttaaggtcgatggttatggaattgattccctggcgagttttttcatggattatggatataaagttggaggcagacttgattttccaaagaagaaagtacaagttctctggctttctcctccggatgttcacttccccgataatggttacggtattggcaatggccctttgccaagacttgttatagctgagcttcttgtggaggaactaagccctgagtcacaggagataataaggaagtatttgaaaccggaaggtggtaagcaagctgttctttcaagtactttggggtctttaatttgggagaagccaacatccaccgatttcaatcaacttgccaaagaaagcgaatttgccgcatggacgcttgtctacggctacacaatgaaccatcttgctttcgcggttcatcgtcttaaacaccgtttcagcgacatcaaatgcgtcaaagagtattttgaagaaaacggtttcgaactcaacaaggatggaggagtcctcaaagtgagtgaagacagtctactgttacaagtgtcggctatgtcggagaaacttgtggttgaatttgcagacggagtaactcaaatcgtcccggcttcatacattgagttcgttgaacgtctagttcttccacagttcaaagatatgccgtgtgatgagatcaaagagtttcatagacgcgagggcttggagcaagctagcgcctaccacataatggaaagcacccgtttcacagcgtaaatatagaaccagcttgttttgttccgctcaatatgtcaagtatgtgtacgtactattaaaatgttttgtatcttatttggacaatttgtgtgtgagatatttctgttcttgtgttgtgaagtgacggtataacttaatattacccgttaccgacgaataatggaaaacaaagtgtcatggtggggtgtggtatttgtggtgtttttgcatgtaatatcttttgatagtaacgtgacacttgattttggtgactcgtaacacctcttggggttg

SEQ ID NO: 102785 - protein, 324 aa, Arabidopsis thaliana
  peptide (1)..(324): Ceres Seq. ID no. 13611267
AKVVFLIKISKIFLLHMGSLDLPYASSFKGGSETFLQNVFESILKTYLRKNPMAKTIWELVKSVDNEKISYDHFFFRTFKVDGYGIDSLASFFMDYGYKVGGRLDFPKKKVQVLWLSPPDVHFPDNGYGIGNGPLPRLVIAELLVEELSPESQEIIRKYLKPEGGKQAVLSSTLGSLIWEKPTSTDFNQLAKESEFAAWTLVYGYTMNHLAFAVHRLKHRFSDIKCVKEYFEENGFELNKDGGVLKVSEDSLLLQVSAMSEKLVVEFADGVTQIVPASYIEFVERLVLPQFKDMPCDEIKEFHRREGLEQASAYHIMESTRFTA

SEQ ID NO: 102786 - protein, 308 aa, Arabidopsis thaliana
  peptide (1)..(308): Ceres Seq. ID no. 13611268
MGSLDLPYASSFKGGSETFLQNVFESILKTYLRKNPMAKTIWELVKSVDNEKISYDHFFFRTFKVDGYGIDSLASFFMDYGYKVGGRLDFPKKKVQVLWLSPPDVHFPDNGYGIGNGPLPRLVIAELLVEELSPESQEIIRKYLKPEGGKQAVLSSTLGSLIWEKPTSTDFNQLAKESEFAAWTLVYGYTMNHLAFAVHRLKHRFSDIKCVKEYFEENGFELNKDGGVLKVSEDSLLLQVSAMSEKLVVEFADGVTQIVPASYIEFVERLVLPQFKDMPCDEIKEFHRREGLEQASAYHIMESTRFTA

SEQ ID NO: 102787 - protein, 272 aa, Arabidopsis thaliana
  peptide (1)..(272): Ceres Seq. ID no. 13611269
MAKTIWELVKSVDNEKISYDHFFFRTFKVDGYGIDSLASFFMDYGYKVGGRLDFPKKKVQVLWLSPPDVHFPDNGYGIGNGPLPRLVIAELLVEELSPESQEIIRKYLKPEGGKQAVLSSTLGSLIWEKPTSTDFNQLAKESEFAAWTLVYGYTMNHLAFAVHRLKHRFSDIKCVKEYFEENGFELNKDGGVLKVSEDSLLLQVSAMSEKLVVEFADGVTQIVPASYIEFVERLVLPQFKDMPCDEIKEFHRREGLEQASAYHIMESTRFTA

SEQ ID NO: 102788 - DNA, 635 bp, Arabidopsis thaliana
  misc_feature (1)..(635): Ceres Seq. ID no. 13611278
  misc_feature (1)..(635): Ortholog of  Ceres SEQ ID NO 12610597 as cited in SEQ ID NO 56210
  misc_feature (1)..(635): Ortholog of  Ceres SEQ ID NO 12597985 as cited in SEQ ID NO 61061
aatcaatcagacgagaagaagattatccatcgccatgggacaagtctttaacaagctccgaggtaaagagtggagacataagcaggtacaagcgatatgtgatcgtgttttcgatcggttcaagatgcaaaccggaagagccaatcttacgtttgaagagttatacatcgctgttcttctcgtttacaatgacataaacaagagattgcctggtcctcatttcgatccaccttctaaggatctagtcaatagcattatgacggactgtgatatcaacttggatggagaacttgatagggaagagtttgtgaagtttattgagcagattacggctgagacgtttaacgtggttagtcagggtttgatcatagctttgattgttgctcccactgtggctattgcgacgaagaaggccacggaaggtgtccctggagttggcaaagttgtgcagaagctgcctacttcaatctatgcttctcttgtgactcttgcagttatgtgggtgaattctgattcaagttaagcttctcatattgtcaccataataaatgtgtttataactcaactgctacgaaaatatagaaacaacgcacggattggttgaacggttggataatactatttttttctgattt

SEQ ID NO: 102789 - protein, 173 aa, Arabidopsis thaliana
  peptide (1)..(173): Ceres Seq. ID no. 13611279
INQTRRRLSIAMGQVFNKLRGKEWRHKQVQAICDRVFDRFKMQTGRANLTFEELYIAVLLVYNDINKRLPGPHFDPPSKDLVNSIMTDCDINLDGELDREEFVKFIEQITAETFNVVSQGLIIALIVAPTVAIATKKATEGVPGVGKVVQKLPTSIYASLVTLAVMWVNSDSS

SEQ ID NO: 102790 - protein, 162 aa, Arabidopsis thaliana; identical to SEQ ID NO: 21636
  peptide (1)..(162): Ceres Seq. ID no. 13611280

SEQ ID NO: 102791 - protein, 132 aa, Arabidopsis thaliana; identical to SEQ ID NO: 21637
  peptide (1)..(132): Ceres Seq. ID no. 13611281

SEQ ID NO: 102792 - DNA, 1336 bp, Arabidopsis thaliana
  misc_feature (1)..(1336): Ceres Seq. ID no. 13611286
  misc_feature (1)..(1336): Ortholog of  Ceres SEQ ID NO 13597888 as cited in SEQ ID NO 64299
acactgtaacaataatcaaataatccctgacttcgtcacgtttctttgtatctccaacgtccaataaatgaaagcaactctagcagcaccctcttctctcacaagcctcccttatcgaaccaactcttctttcggctcaaagtcatcgcttctctttcggtctccatcctcctcctcctcagtctctatgacgacaacgcgtggaaacgtggctgtggcggctgctgctacatccactgaggcgctaagaaaaggaatagcggagttctacaatgaaacttcgggtttgtgggaagagatttggggagatcatatgcatcatggcttttatgaccctgattcttctgttcaactttctgattctggtcacaaggaagctcagatccgtatgattgaagagtctctccgttttgccggtgttactgatgaagaggaggagaaaaagataaagaaagtagtggatgttgggtgtgggattggaggaagctcaagatatcttgcctctaaatttggagctgaatgcattggcattactctcagccctgttcaggccaagagagccaatgatctcgcggctgctcaatcactcgctcataaggcttccttccaagttgcggatgcgttggatcagccattcgaagatggaaaattcgatctagtgtggtcgatggagagtggtgagcatatgcctgacaaggccaagtttgtaaaagagttggtacgtgtggcggctccaggaggtaggataataatagtgacatggtgccatagaaatctatctgcgggggaggaagctttgcagccgtgggagcaaaacatcttggacaaaatctgtaagacgttctatctcccggcttggtgctccaccgatgattatgtcaacttgcttcaatcccattctctccaggatattaagtgtgcggattggtcagagaacgtagctcctttctggcctgcggttatacggactgcattaacatggaagggccttgtgtctctgcttcgtagtggtatgaaaagtattaaaggagcattgacaatgccattgatgattgaaggttacaagaaaggtgtcattaagtttggtatcatcacttgccagaagccactctaagtctaaagctatactaggagattgaataagactataagagtagtgtctcatgtgaaagcatgaaattccttaaaaacgtcaatgttaagcctatgcttcgttatttgttttagataaatatcatttcactcttgtctaaggtagtttctataaacaataaataccatgaattagctcatgttatctggtaaactctcggaagtgattgtcatggattaactc

SEQ ID NO: 102793 - protein, 348 aa, Arabidopsis thaliana; identical to SEQ ID NO: 21918
  peptide (1)..(348): Ceres Seq. ID no. 13611287

SEQ ID NO: 102794 - protein, 308 aa, Arabidopsis thaliana; identical to SEQ ID NO: 21919
  peptide (1)..(308): Ceres Seq. ID no. 13611288

SEQ ID NO: 102795 - protein, 266 aa, Arabidopsis thaliana; identical to SEQ ID NO: 21920
  peptide (1)..(266): Ceres Seq. ID no. 13611289

SEQ ID NO: 102796 - DNA, 736 bp, Arabidopsis thaliana
  misc_feature (1)..(736): Ceres Seq. ID no. 13611297
  misc_feature (1)..(736): Ortholog of  Ceres SEQ ID NO 13599287 as cited in SEQ ID NO 338
aaataattttaattagtttcttctgtgcgatagagatcgatcgagagatgggtgcttcatcatcatcatctgtgtcggagaaatcaatccatcaattcaccgtcaaggatagctccggcaaggaggttgacctaagcgtgtatcaagggaaagtgctgctcgtcgtcaacgtcgcttctaaatgcggattcacggagtccaattacacccagctgacggaactttaccggaaatataaagatcaaggttttgtggtattggcgtttccttgcaaccagtttctgtcccaagagcctggcaccagcgaagaggctcatcaatttgcttgtactcgctttaaggctgaataccctgttttccaaaaggtgcgtgtaaatggacaaaacgctgcaccagtctacaaattcctcaaatctaagaaaccctcttttcttggaagtcgtatcaaatggaacttcaccaagttcttggtcggcaaagatggtcaagtcattgatcgttatggcacaactgtttcacctctatccatccagaaagacatcgagaaagcccttgcacaagaattgtgaacacgcacagagatatttgactcctttggaagaaacttctctcatactctcggtcatgcagtcaagtttctacatttcccattgcaccttccatatgggccttgtattcatcttatgtgtaactctactagccatttcttttgtgaaatttgatcaaaggtgattcc

SEQ ID NO: 102797 - protein, 188 aa, Arabidopsis thaliana
  peptide (1)..(188): Ceres Seq. ID no. 13611298
IILISFFCAIEIDREMGASSSSSVSEKSIHQFTVKDSSGKEVDLSVYQGKVLLVVNVASKCGFTESNYTQLTELYRKYKDQGFVVLAFPCNQFLSQEPGTSEEAHQFACTRFKAEYPVFQKVRVNGQNAAPVYKFLKSKKPSFLGSRIKWNFTKFLVGKDGQVIDRYGTTVSPLSIQKDIEKALAQEL

SEQ ID NO: 102798 - protein, 173 aa, Arabidopsis thaliana; identical to SEQ ID NO: 29112
  peptide (1)..(173): Ceres Seq. ID no. 13611299

SEQ ID NO: 102799 - protein, 118 aa, Arabidopsis thaliana; identical to SEQ ID NO: 29113
  peptide (1)..(118): Ceres Seq. ID no. 13611300

SEQ ID NO: 102800 - DNA, 970 bp, Arabidopsis thaliana
  misc_feature (1)..(970): Ceres Seq. ID no. 13611305
  misc_feature (1)..(970): Ortholog of  Ceres SEQ ID NO 15171175 as cited in SEQ ID NO 57476
  misc_feature (1)..(970): Ortholog of  Ceres SEQ ID NO 15178436 as cited in SEQ ID NO 57919
  misc_feature (1)..(970): Ortholog of  Ceres SEQ ID NO 13655808 as cited in SEQ ID NO 64901
cacaattcttcgcggcttcttttagcttctaagcttcagagcagcaaaaaaaaaacaatggagaagcgccggagatagatctgctttcttccattctccggaccttctctagttcacgaaccaacttcttccactttattctcattcgttggagaaatggactctctcgcaaccgatccagctttcattgattcggatgtatacctcaggttaggacttattattgagggcaaacgattgaaaaagccaccgactgttctctcacgcctctcttcttctctggagagatctctgttactcaatcatgatgacaagattctgcttggatcgccagactctgttaccgtgtttgacgggagatctccccctgagatcagtattgcacactacttggatcgcattttcaagtactcttgctgcagtccctcctgcttcgtcattgcgcatatctacattgatcactttctccataagacccgagcccttctcaaaccccttaatgtccaccgccttatcattacaactgtcatgttagctgctaaagtcttcgatgataggtatttcaacaatgcatactacgcaagagtgggaggtgtgactacgagagagttaaacagattggagatggagttgttgtttacccttgacttcaagcttcaggtagatcctcagacgtttcacacacactgttgtcagttagaaaagcagaacagagacggcttccagatcgagtggcccataaaagaagcatgccgagccaacaaagagacttggcagaagaggacacccgactcactctgctctcaaaccacagcacgctgatcggcaagggtaagataggattattttgtgttttagtagtgatgattcttttgcatgattgattgtttgtgacaattgtgtgtagtagaaaatctgaaaatttctaccaactcattctttaagaagttgctataatatagtttccttg

SEQ ID NO: 102801 - protein, 221 aa, Arabidopsis thaliana
  peptide (1)..(221): Ceres Seq. ID no. 13611306
MDSLATDPAFIDSDVYLRLGLIIEGKRLKKPPTVLSRLSSSLERSLLLNHDDKILLGSPDSVTVFDGRSPPEISIAHYLDRIFKYSCCSPSCFVIAHIYIDHFLHKTRALLKPLNVHRLIITTVMLAAKVFDDRYFNNAYYARVGGVTTRELNRLEMELLFTLDFKLQVDPQTFHTHCCQLEKQNRDGFQIEWPIKEACRANKETWQKRTPDSLCSQTTAR

SEQ ID NO: 102802 - DNA, 1578 bp, Arabidopsis thaliana
  misc_feature (1)..(1578): Ceres Seq. ID no. 13611316
  misc_feature (1)..(1578): Ortholog of  Ceres SEQ ID NO 15176057 as cited in SEQ ID NO 56363
  misc_feature (1)..(1578): Ortholog of  Ceres SEQ ID NO 14316269 as cited in SEQ ID NO 60082
gaatcactcataaaccctttcttcttccttgttcaaatccactcactcttggagagagacgactcaaacgcatagtctctcctctgtatttactcgttatcgtcactgtgagagagagagagagagcgcgcgcattcccccaattaaagcctctctgctccaaaccgtgatatactctttacgttgtttgtttttgcctttatccttccctagttgtgtataattttgttcttttcttatggagatggatctcagcaaggttactcttgacattttcacaaagcttgaacagaaatggctctctcactgcgactcctcccggaagactcgtatccttagcatcgacggtggcggtaccactggcattgtcgccgctgcttctattctccacctcgagcaccagatccgccttcaaaccggcgaccctcacgctcacatctctgatttcttcgacattgtcgccggaactggcatcggaggcattctcgccgccctccttgtcgccgacgacggctccggcaggccgatgttcactgccagagacgcggttaagtttgtcgcggagaagaactcggagctcttcgagatcaggtacaccggagttttcaggaggaacaagagatactcggggaagagcatggagagggttttggagacggcgtttaggagagaggacggtaaggtgttgacgatgaaggacacgtgtaagcctctccttgttccttgctacgacctcaaaacctctgctcctttcgttttctcacgcgccggcgcgtctgagtctccgagcttcgacttcgagctgtggaaagtctgccgtgccacgtcagcaacaccaagcctcttcaagccgttcagtgtagtgtcggtggacgggaaaacctcatgctcagccgtagacggcggtttggtgatgaacaatccaacagcagctgccgtcacgcacgtgctacacaacaaacgagatttcccgtcagtaaacggcgtagatgacttgcttgtactgtcgttgggaaacggtccgtcgaccatgtcatcatcaccagggaggaaactccgtcgtaacggagactattcaacgtcaagtgtggtggacatagtggttgacggcgtttccgataccgtcgatcagatgctggggaacgctttctgctggaaccgtactgattacgttagaatccaggcgaacggtttgacgagcggcggagcggaggagttgctgaaagagagaggtgtggaaacggcgccgtttggggtaaaacggatactaacggagagtaacggagaaagaatagagggtttcgtgcaacgtcttgttgcgtcaggaaagtcaagtctacctccaagtccttgcaaggaatctgccgttaaccctctcgctgacggccgttaagtttcctttattattataaccctccccgtccgtgatgtaagaagtttgtaaccaaacccctgggttaattttttaaccccagccagcatcttcgagttaattaattagcctttctttttttctaatgactttagttgaggaattaataatggttaatgaatgatagtctttacttatttatcact

SEQ ID NO: 102803 - protein, 384 aa, Arabidopsis thaliana
  peptide (1)..(384): Ceres Seq. ID no. 13611317
MEMDLSKVTLDIFTKLEQKWLSHCDSSRKTRILSIDGGGTTGIVAAASILHLEHQIRLQTGDPHAHISDFFDIVAGTGIGGILAALLVADDGSGRPMFTARDAVKFVAEKNSELFEIRYTGVFRRNKRYSGKSMERVLETAFRREDGKVLTMKDTCKPLLVPCYDLKTSAPFVFSRAGASESPSFDFELWKVCRATSATPSLFKPFSVVSVDGKTSCSAVDGGLVMNNPTAAAVTHVLHNKRDFPSVNGVDDLLVLSLGNGPSTMSSSPGRKLRRNGDYSTSSVVDIVVDGVSDTVDQMLGNAFCWNRTDYVRIQANGLTSGGAEELLKERGVETAPFGVKRILTESNGERIEGFVQRLVASGKSSLPPSPCKESAVNPLADGR

SEQ ID NO: 102804 - protein, 382 aa, Arabidopsis thaliana
  peptide (1)..(382): Ceres Seq. ID no. 13611318
MDLSKVTLDIFTKLEQKWLSHCDSSRKTRILSIDGGGTTGIVAAASILHLEHQIRLQTGDPHAHISDFFDIVAGTGIGGILAALLVADDGSGRPMFTARDAVKFVAEKNSELFEIRYTGVFRRNKRYSGKSMERVLETAFRREDGKVLTMKDTCKPLLVPCYDLKTSAPFVFSRAGASESPSFDFELWKVCRATSATPSLFKPFSVVSVDGKTSCSAVDGGLVMNNPTAAAVTHVLHNKRDFPSVNGVDDLLVLSLGNGPSTMSSSPGRKLRRNGDYSTSSVVDIVVDGVSDTVDQMLGNAFCWNRTDYVRIQANGLTSGGAEELLKERGVETAPFGVKRILTESNGERIEGFVQRLVASGKSSLPPSPCKESAVNPLADGR

SEQ ID NO: 102805 - protein, 288 aa, Arabidopsis thaliana
  peptide (1)..(288): Ceres Seq. ID no. 13611319
MFTARDAVKFVAEKNSELFEIRYTGVFRRNKRYSGKSMERVLETAFRREDGKVLTMKDTCKPLLVPCYDLKTSAPFVFSRAGASESPSFDFELWKVCRATSATPSLFKPFSVVSVDGKTSCSAVDGGLVMNNPTAAAVTHVLHNKRDFPSVNGVDDLLVLSLGNGPSTMSSSPGRKLRRNGDYSTSSVVDIVVDGVSDTVDQMLGNAFCWNRTDYVRIQANGLTSGGAEELLKERGVETAPFGVKRILTESNGERIEGFVQRLVASGKSSLPPSPCKESAVNPLADGR

SEQ ID NO: 102806 - DNA, 1266 bp, Arabidopsis thaliana
  misc_feature (1)..(1266): Ceres Seq. ID no. 13611324
  misc_feature (1)..(1266): Ortholog of  Ceres SEQ ID NO 15171257 as cited in SEQ ID NO 52268
aacttgtttctcccgagagatatctatcatcacaatctccttccttcgtgttcatcaatctcccgccgcgcttcagacaagaaacaatgtctgggctgctggatggaatccccgaagcagtggctctgagatgcctggctcatgtgcctttacaccttcatcccaatttagaactcgtctctcgctcctggcgagctgctatccgcagtcatgagctcttcagagtccgtaaagagctccgatcttctgagcatctcctctgcgtctgtgctttcgatcctgagaacatctggcaagtctacagtcccaactgtgatcgctggctcaccctccctctccttccttctcgtatccgccaccttgcccatttcggtgctgtcactactgccggcatgctctttgtcttaggcggtggcagcgacgctgtcagccctgttaccggggatcacgacggtacctttgctactgaccaggtctggtcttacgactttgtacagagacagtggactcctcgcgcttcaatgctcgtgcctcgtgctatgttcgcctgctgcgttcttcaagggaagattgttgttgctggcggattcaccacttgcaggaaatccatatctggagcggagatgtatgatcctgagaatgacgtctggacatccatcccagatctccaccagactcataactctgcctgctcgggtctagtggtaaacgggaaagtccacgtcttgcacaaaggcttgtccacggtgcaggttcttgagagcgttaaactcgggtgggatgtcaaagactatggctggccgcaaggtccaatggtggtcgttgaggacgtgctttacgtgatgagccatgggctggtgttcaagcaagaaggtgacacgtggaagatggttgcatcggcctcagagtttaagcggaggatcggaatggcgatgacgagtttgagtgatgaggttttgatcgtaggaggagtgatcggacctgataggctcaattgggacatcaagcccttgtcagatgtcgacgctttgacagttgggaatgatcgtccggcctggaggagtgtggcgccgatgacaaggtgtcgtgggacgatccttggctgcacgcagttgacaatctgatggatgggaatgtggcttcattatgacgtctttcagttcttttttgttttgtattttcttcctgtttgttaactgttgtgagcattattgtttttaaatcttctttgagaaatgaaaataaacgaatagcagctatgtcttg

SEQ ID NO: 102807 - protein, 373 aa, Arabidopsis thaliana
  peptide (1)..(373): Ceres Seq. ID no. 13611325
LVSPERYLSSQSPSFVFINLPPRFRQETMSGLLDGIPEAVALRCLAHVPLHLHPNLELVSRSWRAAIRSHELFRVRKELRSSEHLLCVCAFDPENIWQVYSPNCDRWLTLPLLPSRIRHLAHFGAVTTAGMLFVLGGGSDAVSPVTGDHDGTFATDQVWSYDFVQRQWTPRASMLVPRAMFACCVLQGKIVVAGGFTTCRKSISGAEMYDPENDVWTSIPDLHQTHNSACSGLVVNGKVHVLHKGLSTVQVLESVKLGWDVKDYGWPQGPMVVVEDVLYVMSHGLVFKQEGDTWKMVASASEFKRRIGMAMTSLSDEVLIVGGVIGPDRLNWDIKPLSDVDALTVGNDRPAWRSVAPMTRCRGTILGCTQLTI

SEQ ID NO: 102808 - protein, 345 aa, Arabidopsis thaliana; identical to SEQ ID NO: 24271
  peptide (1)..(345): Ceres Seq. ID no. 13611326

SEQ ID NO: 102809 - protein, 243 aa, Arabidopsis thaliana; identical to SEQ ID NO: 24272
  peptide (1)..(243): Ceres Seq. ID no. 13611327

SEQ ID NO: 102810 - DNA, 1266 bp, Arabidopsis thaliana
  misc_feature (1)..(1266): Ceres Seq. ID no. 13611328
  misc_feature (1)..(1266): Ortholog of  Ceres SEQ ID NO 15170595 as cited in SEQ ID NO 57510
  misc_feature (1)..(1266): Ortholog of  Ceres SEQ ID NO 13655218 as cited in SEQ ID NO 68872
gtttctctctacagttttttgtgtttatcgtatgtttcacacagtacacgcttcagtgggagttgttgggtgatcggtccgaggcgacatacaagatgaccggaaactcttttaactcgatgaaagatttcctgaagcagacaggcggctatgcggtaatagacggagggcttgcaacggagttcgagagacatggagcagatctcaacgatcctctctggagcgccaaatgccttgtcacctctcctcacctcattcacaccgtgcatctcgattaccttgaagctggtgctgatatcatctccagcgcttcttatcaggccacgattcaggggtttgaagcaaagggattttctagagaagagagcgaatctttgcttaaaaagagcgtagaaatagcgactgaagctcggaactcgtattatgacaaatgcggaactagctcttccatggatgataagattctcaaaaagcgccctatattagttgcagcatcagttggtagctacggtgcatacttggctgatgggtctgaatacagtggaatctatggtgattcgatcacgctggaaaagctgaaggattttcaccgcagacgactccaagttctggcggaatctggtgctgatttaatagcatttgagaccattccaaacaagatagaggctcaggcatttgctgatctattagaagagggagatgtgaagattcctgggtggttttcattcaactcaaaggatggcgtaaacgtggttagcggggattccatcaaggagtgtatctccatagctgaaaattgtgagaaagtagtggcggttggaatcaactgtacccctccaagattcatagaggggctagttttggagatagaaaaggtgacaagcaagcccatactagtgtacccaaacagcggagaaagctatgatgctgatcggaaggagtgggtggaaaacaccggagttggggatgaagactttgtatcatacgtagagaaatggatggatgcaggagtgtctctcctgggaggttgctgccgcacaacaccaaccaccatcagagccatccacaagagactcgtcaaccgcagatctctttagcattcaacttcactctcttctatgaatctctagaaccttggcaatagatttctaccaaaaacatgaatgtttgtcttccctttgccaattacaaatctaatttcaaggataggcgtgactgcatttaagcttggatgttaatttgaaagttttcatcttgcatgagaag

SEQ ID NO: 102811 - protein, 364 aa, Arabidopsis thaliana; identical to SEQ ID NO: 27840
  peptide (1)..(364): Ceres Seq. ID no. 13611329

SEQ ID NO: 102812 - protein, 333 aa, Arabidopsis thaliana; identical to SEQ ID NO: 27841
  peptide (1)..(333): Ceres Seq. ID no. 13611330

SEQ ID NO: 102813 - protein, 325 aa, Arabidopsis thaliana; identical to SEQ ID NO: 27842
  peptide (1)..(325): Ceres Seq. ID no. 13611331

SEQ ID NO: 102814 - DNA, 1645 bp, Arabidopsis thaliana
  misc_feature (1)..(1645): Ceres Seq. ID no. 13611332
  misc_feature (1)..(1645): Ortholog of  Ceres SEQ ID NO 13593889 as cited in SEQ ID NO 53305
  misc_feature (1)..(1645): Ortholog of  Ceres SEQ ID NO 13581959 as cited in SEQ ID NO 56156
ccaccaccaccttcgatcgatttctactaacttgttcttcttcttctttctcaactctcttgtcttttgtctctccaccaattttttcttgttctttctctctccaccacataaaaaaaaaaaacctagctttgtcccctcaactcactgattgaactgcttgattttcgattgatcatctgggtggttttgaatcgaagagtattgttgtattagtggctggtggctctccaaaagagtaaggccggagagagaaatcaatggcctctggcggcggagaggcggataaatcacttgaaatcgggtccgggaccgcggatcccaaaataggcggtactgggagcaggagcgccggagaagaacgatacttcagggcagatacactggatttcagtaaatgggatttgcatatgggtcaaacctctactagcagcgtcctcaccaattccgcttccacgagcgctcccgcaccggcgatgcaggaatgggagattgacctctccaaactcgatatgaagcacgtcctcgctcacggtacttacggcactgtctaccgcggtgtctacgccggccaagaagtcgcagtgaaagtgttagattggggagaagatggttacgccacaccagctgaaactacagctctccgtgcttccttcgagcaagaggtcgccgtctggcagaagctcgatcatcccaacgttaccaagtttataggagcatccatgggaacctctgatctgcggatccctcctgctggtgatactggcggacgtggtaacggtgcacatcctgcgagggcctgttgtgttgtggttgaatatgttgccggaggcacgcttaagaagttcctcatcaagaaatatagggccaaactacccatcaaggatgtcattcagctcgctttggatctcgctagagggcttagttacctccactccaaggcgattgtacatagggacgtgaagtcagagaacatgctgttacagcctaacaagacgctgaagatcgctgatttcggggtagctagagttgaagctcagaaccctcaagacatgacgggtgaaactggaacacttggatacatggcaccagaggttcttgaaggaaagccttacaacaggaaatgcgatgtctatagctttggggtatgcctctgggaaatatactgctgtgacatgccctatgctgactgtagttttgctgagatctctcacgccgttgttcataggaatctgagaccagagattccgaaatgctgcccgcatgcggtggcaaacatcatgaagagatgctgggacccgaatccagacaggcgtccggagatggaggaggtggtgaagctgcttgaagccatagacacaagcaaaggtggtggaatgatagctccggaccagtttcaggggtgcctctgtttcttcaaacctcgaggcccctgaatctctctccctctctttcctttttgctccgtgtctgatatattcttgagagctgcgtgattctttggattttgtatttactttgagctatgggagttggattggtgtgggttttgtcataagaatctttctgcgctctatgtatttatatacttaacacagtcgtgtataattcgattaagctttattttattttttgatgttgattc

SEQ ID NO: 102815 - protein, 391 aa, Arabidopsis thaliana; identical to SEQ ID NO: 36667
  peptide (1)..(391): Ceres Seq. ID no. 13611333

SEQ ID NO: 102816 - protein, 341 aa, Arabidopsis thaliana; identical to SEQ ID NO: 36668
  peptide (1)..(341): Ceres Seq. ID no. 13611334

SEQ ID NO: 102817 - protein, 319 aa, Arabidopsis thaliana; identical to SEQ ID NO: 36669
  peptide (1)..(319): Ceres Seq. ID no. 13611335

SEQ ID NO: 102818 - DNA, 1169 bp, Arabidopsis thaliana
  misc_feature (1)..(1169): Ceres Seq. ID no. 13611336
  misc_feature (1)..(1169): Ortholog of  Ceres SEQ ID NO 13599496 as cited in SEQ ID NO 0
tcgtttgtgtttttgattggcggagaattggtgatagataagcttcttcttccctcttctcaacttggtggatctgtcatcgatggcctctttgatgctcaacggggccattaccttccccaaaggtttaggttcccctggttccaatttgcatgccagatcgattcctcggccgaccttactctcagttacccgaacctccacacctagactctcggtggctactagatgcagcagcagcagcgtgtcgtcttcccggccatcggcgcaacctaggttcattcagcacaagaaggaggcttactggttctacaggttcttatccatcgtatacgaccatgtcatcaatcctgggcattggaccgaggatatgagagacgacgctcttgagccagcggatctcagccatccggacatgcgagtggtcgatgtcggcggcggaactggtttcactactctgggcatagtcaagacagtgaaggccaagaatgtgaccattctggaccagtcgccacatcagctggccaaagcaaagcaaaaggagccgttgaaagaatgcaagatcgtcgagggagatgctgaggatcttccttttccaaccgattatgctgacagatacgtttctgctggaagcattgagtactggccggacccgcagaggggaataagggaagcgtacagggttctcaagatcggtggcaaagcgtgtctcatcggccctgtctacccaaccttctggctctctcgcttcttttctgatgtctggatgctcttccccaaggaggaagagtacattgagtggttcaagaatgccggtttcaaggacgttcagctcaagaggattggccccaagtggtaccgtggtgttcgcaggcacggccttatcatgggatgttctgtcactggtgttaaacctgcctccggtgactctcctctccagcttggtccaaaggaagaggacgtagagaagcctgtcaacaaccccttctccttcttgggacgcttcctcctgggaactctagcagctgcctggtttgtgttaatccctatctacatgtggatcaaggatcagatcgttcccaaagaccaacccatctgatccttctcttctaggacatgatcattgtatcattgtaaacccctcttgtggtaaagaaagattcgagtcc

SEQ ID NO: 102819 - protein, 338 aa, Arabidopsis thaliana
  peptide (1)..(338): Ceres Seq. ID no. 13611337
MASLMLNGAITFPKGLGSPGSNLHARSIPRPTLLSVTRTSTPRLSVATRCSSSSVSSSRPSAQPRFIQHKKEAYWFYRFLSIVYDHVINPGHWTEDMRDDALEPADLSHPDMRVVDVGGGTGFTTLGIVKTVKAKNVTILDQSPHQLAKAKQKEPLKECKIVEGDAEDLPFPTDYADRYVSAGSIEYWPDPQRGIREAYRVLKIGGKACLIGPVYPTFWLSRFFSDVWMLFPKEEEYIEWFKNAGFKDVQLKRIGPKWYRGVRRHGLIMGCSVTGVKPASGDSPLQLGPKEEDVEKPVNNPFSFLGRFLLGTLAAAWFVLIPIYMWIKDQIVPKDQPI

SEQ ID NO: 102820 - protein, 334 aa, Arabidopsis thaliana
  peptide (1)..(334): Ceres Seq. ID no. 13611338
MLNGAITFPKGLGSPGSNLHARSIPRPTLLSVTRTSTPRLSVATRCSSSSVSSSRPSAQPRFIQHKKEAYWFYRFLSIVYDHVINPGHWTEDMRDDALEPADLSHPDMRVVDVGGGTGFTTLGIVKTVKAKNVTILDQSPHQLAKAKQKEPLKECKIVEGDAEDLPFPTDYADRYVSAGSIEYWPDPQRGIREAYRVLKIGGKACLIGPVYPTFWLSRFFSDVWMLFPKEEEYIEWFKNAGFKDVQLKRIGPKWYRGVRRHGLIMGCSVTGVKPASGDSPLQLGPKEEDVEKPVNNPFSFLGRFLLGTLAAAWFVLIPIYMWIKDQIVPKDQPI

SEQ ID NO: 102821 - protein, 242 aa, Arabidopsis thaliana
  peptide (1)..(242): Ceres Seq. ID no. 13611339
MRDDALEPADLSHPDMRVVDVGGGTGFTTLGIVKTVKAKNVTILDQSPHQLAKAKQKEPLKECKIVEGDAEDLPFPTDYADRYVSAGSIEYWPDPQRGIREAYRVLKIGGKACLIGPVYPTFWLSRFFSDVWMLFPKEEEYIEWFKNAGFKDVQLKRIGPKWYRGVRRHGLIMGCSVTGVKPASGDSPLQLGPKEEDVEKPVNNPFSFLGRFLLGTLAAAWFVLIPIYMWIKDQIVPKDQPI

SEQ ID NO: 102822 - DNA, 1680 bp, Arabidopsis thaliana
  misc_feature (1)..(1680): Ceres Seq. ID no. 13611343
  misc_feature (1)..(1680): Ortholog of  Ceres SEQ ID NO 13600310 as cited in SEQ ID NO 5086
agatttcgagtttcttctttcccgcccgtaagagaaaccctactctgactctccactccatttgagagactgagctcgttccgataaggagaggagatgtctaacgtaaccgtctgtgcgcgattcaggccgcgaagctctaaagagatgcgcgatcccagcagagatggtgtctgtgctcgacccatcgacgctgaaaccttcgttttccaagatgacaaggaagatgaatttacatttagcctcgatagagttttttatgaggactctacccaagctgcggtttatgagtttctggctctccccatcatgagagacgctgtaaatggtataaacggaacaatcatcacttatggacagacaggggctgggaagacttattccatggagggaccaggcatccaggactgtgatgagcacaataaaggacttcttccaagagtggtccatgggatgtttgagcaaatcagctcttccaatgatattgcaagatacactgttaaattgtctatggttgagatctacatggagaaagtcagggacctgttggacttatcaaaagcaaacatacagatcaaggagaacaaaacacaaggaatactcttgtcaggcgttacagaggctagcttcattgtgcctgtatcagattcggtggaggcattacaacatctatgcaccggtttagctaaccgcgcagttggggaaacccaaatgaatatgtccagcagtagaagccactgcgcctacttgttcacaatccagcaggattcagttaaagataaaagggtaaaaacaggaaaactgattcttgtcgacctggctggctcagagaaagcagacaaaactggagcagaaggtagggttcttgaagaagcgaagacgatcaataaatcgctctcagccttggggaacgtgataaacgctctcactagtgggccatctagcaaagggaatcacataccatatcgtgactccaagcttactcgcatcttacaggatgccctgggtggaaattctcgaatggcgctgctttgctgttgctcaccaagcactttaaatgcatctgagacgctctcaactctcaggtttggcatgagggcaaaacacataaaagcatcaccacgtgctagtgaagtgaaatctgcgaaggcacaggaggaaccctcctcggttaccaaagatgaaaaatgtgggaggatcctagaaaagatgaaagagaggatgagcaacgaagacatcaaaatgctagaagatgtgtttatacaggaagggatcattttcagcctagattcgatggctgaagtggaaaccgtatacgaagatattgtatcaaaaactatacaatccttacagcaggctgttgatgaactccaacagaaagtcaaaaagttagaagcagaaaacataggtattcaggaacaagcattgcgcaatcacgaacctggttcggtcggaaagatgtcaaggttcatcagttcttggtatgcatcgttctttacgtcctaaagatgataaaatgaatatactatcttggtaatgtagaagatgtggacaagtagatggtaaagagataagtttctctttttaggtcgtgagagcaaaacagatattaacattcaaaggtatgtaatgaaatagtagataaaaaatggatgggaggatgaataaaagctaattaag

SEQ ID NO: 102823 - protein, 469 aa, Arabidopsis thaliana
  peptide (1)..(469): Ceres Seq. ID no. 13611344
MSNVTVCARFRPRSSKEMRDPSRDGVCARPIDAETFVFQDDKEDEFTFSLDRVFYEDSTQAAVYEFLALPIMRDAVNGINGTIITYGQTGAGKTYSMEGPGIQDCDEHNKGLLPRVVHGMFEQISSSNDIARYTVKLSMVEIYMEKVRDLLDLSKANIQIKENKTQGILLSGVTEASFIVPVSDSVEALQHLCTGLANRAVGETQMNMSSSRSHCAYLFTIQQDSVKDKRVKTGKLILVDLAGSEKADKTGAEGRVLEEAKTINKSLSALGNVINALTSGPSSKGNHIPYRDSKLTRILQDALGGNSRMALLCCCSPSTLNASETLSTLRFGMRAKHIKASPRASEVKSAKAQEEPSSVTKDEKCGRILEKMKERMSNEDIKMLEDVFIQEGIIFSLDSMAEVETVYEDIVSKTIQSLQQAVDELQQKVKKLEAENIGIQEQALRNHEPGSVGKMSRFISSWYASFFTS

SEQ ID NO: 102824 - protein, 452 aa, Arabidopsis thaliana
  peptide (1)..(452): Ceres Seq. ID no. 13611345
MRDPSRDGVCARPIDAETFVFQDDKEDEFTFSLDRVFYEDSTQAAVYEFLALPIMRDAVNGINGTIITYGQTGAGKTYSMEGPGIQDCDEHNKGLLPRVVHGMFEQISSSNDIARYTVKLSMVEIYMEKVRDLLDLSKANIQIKENKTQGILLSGVTEASFIVPVSDSVEALQHLCTGLANRAVGETQMNMSSSRSHCAYLFTIQQDSVKDKRVKTGKLILVDLAGSEKADKTGAEGRVLEEAKTINKSLSALGNVINALTSGPSSKGNHIPYRDSKLTRILQDALGGNSRMALLCCCSPSTLNASETLSTLRFGMRAKHIKASPRASEVKSAKAQEEPSSVTKDEKCGRILEKMKERMSNEDIKMLEDVFIQEGIIFSLDSMAEVETVYEDIVSKTIQSLQQAVDELQQKVKKLEAENIGIQEQALRNHEPGSVGKMSRFISSWYASFFTS

SEQ ID NO: 102825 - protein, 398 aa, Arabidopsis thaliana
  peptide (1)..(398): Ceres Seq. ID no. 13611346
MRDAVNGINGTIITYGQTGAGKTYSMEGPGIQDCDEHNKGLLPRVVHGMFEQISSSNDIARYTVKLSMVEIYMEKVRDLLDLSKANIQIKENKTQGILLSGVTEASFIVPVSDSVEALQHLCTGLANRAVGETQMNMSSSRSHCAYLFTIQQDSVKDKRVKTGKLILVDLAGSEKADKTGAEGRVLEEAKTINKSLSALGNVINALTSGPSSKGNHIPYRDSKLTRILQDALGGNSRMALLCCCSPSTLNASETLSTLRFGMRAKHIKASPRASEVKSAKAQEEPSSVTKDEKCGRILEKMKERMSNEDIKMLEDVFIQEGIIFSLDSMAEVETVYEDIVSKTIQSLQQAVDELQQKVKKLEAENIGIQEQALRNHEPGSVGKMSRFISSWYASFFTS

SEQ ID NO: 102826 - DNA, 1697 bp, Arabidopsis thaliana
  misc_feature (1)..(1697): Ceres Seq. ID no. 13611351
  misc_feature (1)..(1697): Ortholog of  Ceres SEQ ID NO 14304276 as cited in SEQ ID NO 53407
aagctaagctctagaaacaccgcctttaacgtctcgctgcaccatttttcatcgttgatcagtcgtcgatcctcttgagtgatttgattttagactttctagttatcaaactcgaaagatggattctgtccttgtagtgggcattgcatcggttattctcggtgcgttgatcgctgtactcttcttcggtagctacttccggaagcggacatcggaggtgcaatccatggccaaagcggagcctcaggatccgatccggaatccaaagtcgaatcatcctgctccgaagaagaatcatcccaaatctcaagcgtccgataagaatcagaacaaacggcatcatcctttagatttaaacacgttgaaaggccacggtgatgctgttactggactctgtttctcgtccgatggaaagagcttggccacagcttgcgctgatggagtaatcagggtgttcaagctagatgatgcatcaagcaaaagcttcaaatttttaaggataaatcttcctgctggaggacatccaaccgccgtggcatttgctgacgatgcctcatctattgttgtggcttgtcatcatatgtctggttcatctttgtacatgtacggtgaagataagcaaaaggatcagcaagggaagcttcctcttcctagtatcaaatgggaccaccatcatattcatgagaagagatcagtgcttaccatctctggagctactgcaacttacggtactgctgatggaagtgttgtcattgcctcttgttctgaagggactgatatcgtcctttggcatgggaaaactgggaggaatttgggacatgttgatacaaaccagttgaagaaccacatggcagctgtatcaccaaatggacgttttttggcagctgcagcatttactgcagatgtgaaagtgtgggaaattgtgtatcagaaagatggttctgtgaaagaggtttcaagagttatgcaacttaaaggccacaagagtgcagtgacttggttatgcttttctccaaactcagagcaaatcatcaccgcttcaaaagatggttcaataagagtctggaacatcaatgtccgttatcatcttgatgaggatccaaagactttgaaggtgttcccgattccactttgcgactcaggaggcaatccgttgcactatgatcgtctcagcttatgcccagagggaaagatattggcagcaagccatggttccacattgcagtggttatgtgctgaaactggaaatgtcttggacacagctgagaaagcccacgaaggggatatcacatgcatatcttgggcacccaaggctattacagttggggaaagacatgccatggttttggggacatcaggcgatgacaagaaagtgaagctgtgggaagctccaaagtcgcaatctttgtaggctctcgcatacacgtagtcccttgatgacatgaggcgtatttaaacggtacaacttgcgaggaaaaaaactctaataggttttgtttcgagtcccaagttgggatcaaatgaagggtggtttaaagtccttcttgttaccaagtgtcttttaacttctgaagttttgaattttgctcataggactagtacaacactcacagtcttctatgttttccaaattaaggaaatttaaaaagcacacaacaacactaagaaatatgaatcgattaaaattattatacgca

SEQ ID NO: 102827 - protein, 430 aa, Arabidopsis thaliana; identical to SEQ ID NO: 31004
  peptide (1)..(430): Ceres Seq. ID no. 13611352

SEQ ID NO: 102828 - protein, 394 aa, Arabidopsis thaliana; identical to SEQ ID NO: 31005
  peptide (1)..(394): Ceres Seq. ID no. 13611353

SEQ ID NO: 102829 - protein, 276 aa, Arabidopsis thaliana; identical to SEQ ID NO: 31006
  peptide (1)..(276): Ceres Seq. ID no. 13611354

SEQ ID NO: 102830 - DNA, 719 bp, Arabidopsis thaliana
  misc_feature (1)..(719): Ceres Seq. ID no. 13611355
  misc_feature (1)..(719): Ortholog of  Ceres SEQ ID NO 13580204 as cited in SEQ ID NO 0
agccagaattagggtttctctttgtcttcagcagtcagtgcgcatccgtaggagaaaagtgtgagaatctgccaccatgggtcgtatgcacagtcgaggaaagggtatttcagcctctgcgttgccttacaagagatcgtctccgagctggctcaagaccacctctcaggatgttgatgaatcaatctgcaaatttgccaaaaagggattgaccccttcccagattggtgtgattctccgtgactctcacggtatccctcaggtcaagagtgttactggaagcaagatcttgaggatactcaaagctcatggccttgctcctgagatccctgaggatctgtaccatctaattaagaaggctgttgccatccgtaaacatctcgagaggaacaggaaggacaaggattccaagttcaggctcatcttggttgagagcaggattcaccgcctcgctcgctattacaagaagaccaagaagctccctcccgtctggaagtacgaatccactaccgcgagcacccttgtggcttaagctggagtctggaggaggattctactagtctgttgcttcccttttgttttgatgaattctcaactttagtcttaatgtgtcagcaggatttttgtgtttgcctctcttttttttccggaatcttatgctcccttgtttaagagaatcgtatgatcttgaatttactattgaatatgcttttgcatcc

SEQ ID NO: 102831 - protein, 151 aa, Arabidopsis thaliana [sequence omitted]

SEQ ID NO: 102832 - protein, 148 aa, Arabidopsis thaliana; identical to SEQ ID NO: 26854
  peptide (1)..(148): Ceres Seq. ID no. 13611357

SEQ ID NO: 102833 - DNA, 1480 bp, Arabidopsis thaliana
  misc_feature (1)..(1480): Ceres Seq. ID no. 13611362
  misc_feature (1)..(1480): Ortholog of  Ceres SEQ ID NO 14303105 as cited in SEQ ID NO 66589
aaattcgacgactgcaaaaatttgtgctaatctttccacgacaatggcgatcctctacacaagaatcgtattccttctcttcgtcttccttgtatcttcttctgcatttgcctctttctctcctgtcgacgagtacctcgtcaactgcggctccgacgttgactccaccgtcgataaccgccgcttcgtcggcgacgcatcgtcatcaaacgtccaattcttctcctctgaaggatcaatcgctctcaaaggagaaaatctacctcagaacgttccccaaatctacagaaccgctaggatattcgcacaacaagcgaaatacaagttcaatgtcaacgagaaagggactcatatggtacgtctccatttcaatcgtctctattcctctagaatcgatctcaatgacgctctatttcacgttaccgttaacggtcacgtcgtcctaaggaattttagcggcgactcgtcatctgattttgaatctagggttagagaattcttgatttgggttgatgttggagaggttgttattaggtttgttcctagtaaagattcgaactttgcattcgttaatgctattgaagttatctctgcgcctaaggatttgattggtgacgttgcaacctctgtatctcatgatgggactgagaaattcaatggtttagctaaacaagcaatggaggttgtgtatagagtcaatgttggtggtagaaaagttactccttttaatgacacattgtggaggacttgggttactgatgaaggattcttgaaaaccggtgatgggtcgtctgagaaaagttacttcaccgggaggattaagtataggcgtggaggggcgagtcgtgaagttggtcctgataatgtttacaacactgctcgtgttggtaaaagaagcaatggattggttgatatgagttggggtttcaaggtgaatgtgggttacaagtatctcatccggatgcatttctgtgacatagctagcaaatctctcggcaggctttatttcaatgtctacattaacgggaacttggcgtatgaagatttcgatatctcatacgctgcggataatgtccttgcttctccgtattacattgatttcgtggtggatgctactgctgatgacaacaacccttcaggatcgtcgataaccgttagtgttggaccatcaaacaagactagtgttgatggaaatggagtggatgcgatattgaacggtgttgagatcatgaagatgaataactcgatgggtagtcttgatgggtatgtttcaacagagatgattctgagtacttgcccaaataggagaaacctgagcatatttatcgcaatgttggcgtttatgtgtatatttatgagcttctacattgtgactcaaagaaagagagttaaggatcagtatggctggacaaagctgtccatggacgtgcttgaagataattccaagtcagggaatcaatttacagcaagaaaggcttga

SEQ ID NO: 102834 - protein, 492 aa, Arabidopsis thaliana
  peptide (1)..(492): Ceres Seq. ID no. 13611363
NSTTAKICANLSTTMAILYTRIVFLLFVFLVSSSAFASFSPVDEYLVNCGSDVDSTVDNRRFVGDASSSNVQFFSSEGSIALKGENLPQNVPQIYRTARIFAQQAKYKFNVNEKGTHMVRLHFNRLYSSRIDLNDALFHVTVNGHVVLRNFSGDSSSDFESRVREFLIWVDVGEVVIRFVPSKDSNFAFVNAIEVISAPKDLIGDVATSVSHDGTEKFNGLAKQAMEVVYRVNVGGRKVTPFNDTLWRTWVTDEGFLKTGDGSSEKSYFTGRIKYRRGGASREVGPDNVYNTARVGKRSNGLVDMSWGFKVNVGYKYLIRMHFCDIASKSLGRLYFNVYINGNLAYEDFDISYAADNVLASPYYIDFVVDATADDNNPSGSSITVSVGPSNKTSVDGNGVDAILNGVEIMKMNNSMGSLDGYVSTEMILSTCPNRRNLSIFIAMLAFMCIFMSFYIVTQRKRVKDQYGWTKLSMDVLEDNSKSGNQFTARKA

SEQ ID NO: 102835 - protein, 478 aa, Arabidopsis thaliana
  peptide (1)..(478): Ceres Seq. ID no. 13611364
MAILYTRIVFLLFVFLVSSSAFASFSPVDEYLVNCGSDVDSTVDNRRFVGDASSSNVQFFSSEGSIALKGENLPQNVPQIYRTARIFAQQAKYKFNVNEKGTHMVRLHFNRLYSSRIDLNDALFHVTVNGHVVLRNFSGDSSSDFESRVREFLIWVDVGEVVIRFVPSKDSNFAFVNAIEVISAPKDLIGDVATSVSHDGTEKFNGLAKQAMEVVYRVNVGGRKVTPFNDTLWRTWVTDEGFLKTGDGSSEKSYFTGRIKYRRGGASREVGPDNVYNTARVGKRSNGLVDMSWGFKVNVGYKYLIRMHFCDIASKSLGRLYFNVYINGNLAYEDFDISYAADNVLASPYYIDFVVDATADDNNPSGSSITVSVGPSNKTSVDGNGVDAILNGVEIMKMNNSMGSLDGYVSTEMILSTCPNRRNLSIFIAMLAFMCIFMSFYIVTQRKRVKDQYGWTKLSMDVLEDNSKSGNQFTARKA

SEQ ID NO: 102836 - protein, 375 aa, Arabidopsis thaliana
  peptide (1)..(375): Ceres Seq. ID no. 13611365
MVRLHFNRLYSSRIDLNDALFHVTVNGHVVLRNFSGDSSSDFESRVREFLIWVDVGEVVIRFVPSKDSNFAFVNAIEVISAPKDLIGDVATSVSHDGTEKFNGLAKQAMEVVYRVNVGGRKVTPFNDTLWRTWVTDEGFLKTGDGSSEKSYFTGRIKYRRGGASREVGPDNVYNTARVGKRSNGLVDMSWGFKVNVGYKYLIRMHFCDIASKSLGRLYFNVYINGNLAYEDFDISYAADNVLASPYYIDFVVDATADDNNPSGSSITVSVGPSNKTSVDGNGVDAILNGVEIMKMNNSMGSLDGYVSTEMILSTCPNRRNLSIFIAMLAFMCIFMSFYIVTQRKRVKDQYGWTKLSMDVLEDNSKSGNQFTARKA

SEQ ID NO: 102837 - DNA, 2199 bp, Arabidopsis thaliana
  misc_feature (1)..(2199): Ceres Seq. ID no. 13611377
  misc_feature (1)..(2199): Ortholog of  Ceres SEQ ID NO 13654290 as cited in SEQ ID NO 62197
  misc_feature (1)..(2199): Ortholog of  Ceres SEQ ID NO 14301924 as cited in SEQ ID NO 67731
gagaagaggaggagaacacaaatccaattcacactggaaactgttgggtcggatcctgagtgatatttcgagaccgatgatgtggaagaacattgctgggttgtcgaaggcagcggcagcggcaagaacacacggatctcggcggtgcttttccacagcgattcctggtccttgcatcgtccacaagcgtggtgctgatattcttcacgatccatggttcaataaggacacaggttttcctttgactgagagagatagattagggatacgaggcttgcttcctcctcgtgttatgacctgtgtacagcaatgtgatcgtttcattgagtcgtttcgttcgctagagaacaacacaaaaggagagcctgaaaacgttgttgcattagctaaatggaggatgttgaatagattgcatgaccgtaatgagactttgtactaccgagttcttattgataacatcaaagattttgcccccattatatacactcctacggttggacttgtttgtcagaactattctggtttgtatagaagaccaagaggaatgtacttcagcgccaaagacaaaggagagatgatgtctatgatttataactggcctgctccgcaggtagatatgattgtcatcactgatggtagccgtattttgggcttaggagaccttggagtacagggaattgggattcctattggaaagctcgacatgtatgtcgctgctgcaggaatcaatccacagagagttttgccaattatgttggatgtaggcacaaataatgaaaagctcctacagaatgatctctatttaggagtcagacaacctaggttggaaggagaggagtaccttgagattattgatgaatttatggaagctgcatttacacgttggccaaaggccgtcgtacagttcgaagatttccaagcgaaatgggctttcggaacattggaaagatatcggaagaaattttgcatgttcaatgatgatgtccagggaactgctggtgttgcactggctggactattgggaactgtaagagctcaaggtcggccgatatccgactttgtgaaccaaaagattgttgtggtgggagctggaagtgctgggcttggtgtaactaagatggcagtacaggcagttgccagaatggcaggtatcagcgagagtgaagcaacaaaaaacttttacctgatagataaagatggtcttgtcaccacggagaggacaaaacttgacccaggagctgtactttttgccaaaaatccagctgagatacgcgagggagcaagtatcgttgaagtggtgaagaaagtgaggccacatgttcttcttggtttatctggagttggtggtatctttaatgaagaagttctcaaggcgatgcgagaatctgactcatgcaagcctgccatttttgccatgtcgaatcccactttgaatgccgagtgcactgctgctgatgctttcaaacacgccggaggaaacattgtctttgcaagtggaagtccatttgagaacgttgaacttgagaatggtaaagtaggacatgtgaatcaggctaacaacatgtatttattcccggggatcgggctagggactcttctctctggtgcacgtatcgtaactgatggaatgctacaagcagcttctgaatgccttgcgtcctacatgaccgatgaagaagtccaaaaaggcatcctttacccttcaatcaacaacatccgacacataacagctgaagtcggggcagctgttctacgagctgcggtgactgatgacattgcagaaggacatggtgatgttggtcccaaagatctcagccacatgtctaaggaggatacagtgaattacattacacgcaacatgtggttccctgtttacagccctctcgttcacgagaaatagacaacaactctatataactcttctcaggtttcatagaaagccaaaagacaaaaaatcttcgcttcatcttttatttgtgatcaacattctttttttcttcaaaatgtgatatgttttaagaaaaacaatgccaaaaagagggcttaagaacaagaacagggttagttctaggtcaacctgtacttttcctttttttttttggacatttttccaacttcttacgattatttctgatgataatgattacaactttatatactgttttggcaataataagccaataatgatatctttcttct

SEQ ID NO: 102838 - protein, 632 aa, Arabidopsis thaliana
  peptide (1)..(632): Ceres Seq. ID no. 13611378
RRGGEHKSNSHWKLLGRILSDISRPMMWKNIAGLSKAAAAARTHGSRRCFSTAIPGPCIVHKRGADILHDPWFNKDTGFPLTERDRLGIRGLLPPRVMTCVQQCDRFIESFRSLENNTKGEPENVVALAKWRMLNRLHDRNETLYYRVLIDNIKDFAPIIYTPTVGLVCQNYSGLYRRPRGMYFSAKDKGEMMSMIYNWPAPQVDMIVITDGSRILGLGDLGVQGIGIPIGKLDMYVAAAGINPQRVLPIMLDVGTNNEKLLQNDLYLGVRQPRLEGEEYLEIIDEFMEAAFTRWPKAVVQFEDFQAKWAFGTLERYRKKFCMFNDDVQGTAGVALAGLLGTVRAQGRPISDFVNQKIVVVGAGSAGLGVTKMAVQAVARMAGISESEATKNFYLIDKDGLVTTERTKLDPGAVLFAKNPAEIREGASIVEVVKKVRPHVLLGLSGVGGIFNEEVLKAMRESDSCKPAIFAMSNPTLNAECTAADAFKHAGGNIVFASGSPFENVELENGKVGHVNQANNMYLFPGIGLGTLLSGARIVTDGMLQAASECLASYMTDEEVQKGILYPSINNIRHITAEVGAAVLRAAVTDDIAEGHGDVGPKDLSHMSKEDTVNYITRNMWFPVYSPLVHEK

SEQ ID NO: 102839 - protein, 607 aa, Arabidopsis thaliana
  peptide (1)..(607): Ceres Seq. ID no. 13611379
MMWKNIAGLSKAAAAARTHGSRRCFSTAIPGPCIVHKRGADILHDPWFNKDTGFPLTERDRLGIRGLLPPRVMTCVQQCDRFIESFRSLENNTKGEPENVVALAKWRMLNRLHDRNETLYYRVLIDNIKDFAPIIYTPTVGLVCQNYSGLYRRPRGMYFSAKDKGEMMSMIYNWPAPQVDMIVITDGSRILGLGDLGVQGIGIPIGKLDMYVAAAGINPQRVLPIMLDVGTNNEKLLQNDLYLGVRQPRLEGEEYLEIIDEFMEAAFTRWPKAVVQFEDFQAKWAFGTLERYRKKFCMFNDDVQGTAGVALAGLLGTVRAQGRPISDFVNQKIVVVGAGSAGLGVTKMAVQAVARMAGISESEATKNFYLIDKDGLVTTERTKLDPGAVLFAKNPAEIREGASIVEVVKKVRPHVLLGLSGVGGIFNEEVLKAMRESDSCKPAIFAMSNPTLNAECTAADAFKHAGGNIVFASGSPFENVELENGKVGHVNQANNMYLFPGIGLGTLLSGARIVTDGMLQAASECLASYMTDEEVQKGILYPSINNIRHITAEVGAAVLRAAVTDDIAEGHGDVGPKDLSHMSKEDTVNYITRNMWFPVYSPLVHEK

SEQ ID NO: 102840 - protein, 606 aa, Arabidopsis thaliana
  peptide (1)..(606): Ceres Seq. ID no. 13611380
MWKNIAGLSKAAAAARTHGSRRCFSTAIPGPCIVHKRGADILHDPWFNKDTGFPLTERDRLGIRGLLPPRVMTCVQQCDRFIESFRSLENNTKGEPENVVALAKWRMLNRLHDRNETLYYRVLIDNIKDFAPIIYTPTVGLVCQNYSGLYRRPRGMYFSAKDKGEMMSMIYNWPAPQVDMIVITDGSRILGLGDLGVQGIGIPIGKLDMYVAAAGINPQRVLPIMLDVGTNNEKLLQNDLYLGVRQPRLEGEEYLEIIDEFMEAAFTRWPKAVVQFEDFQAKWAFGTLERYRKKFCMFNDDVQGTAGVALAGLLGTVRAQGRPISDFVNQKIVVVGAGSAGLGVTKMAVQAVARMAGISESEATKNFYLIDKDGLVTTERTKLDPGAVLFAKNPAEIREGASIVEVVKKVRPHVLLGLSGVGGIFNEEVLKAMRESDSCKPAIFAMSNPTLNAECTAADAFKHAGGNIVFASGSPFENVELENGKVGHVNQANNMYLFPGIGLGTLLSGARIVTDGMLQAASECLASYMTDEEVQKGILYPSINNIRHITAEVGAAVLRAAVTDDIAEGHGDVGPKDLSHMSKEDTVNYITRNMWFPVYSPLVHEK

SEQ ID NO: 102841 - DNA, 1042 bp, Arabidopsis thaliana
  misc_feature (1)..(1042): Ceres Seq. ID no. 13611381
  misc_feature (1)..(1042): Ortholog of  Ceres SEQ ID NO 14311477 as cited in SEQ ID NO 51390
  misc_feature (1)..(1042): Ortholog of  Ceres SEQ ID NO 14302840 as cited in SEQ ID NO 62295
  misc_feature (1)..(1042): Ortholog of  Ceres SEQ ID NO 13596892 as cited in SEQ ID NO 62900
aaatagccttcgcttgtaaaataaaagtttgaatatttaaaccagaaagctaagtagagaggttgtgatgggtctgcaaacatggatatgcttcacactattctcaattttcttcttcctcctcttactatcagttttctcgtcctattttacccattttatctttttaccaaacttatgagttgtcttaagcaccttcactttgaaaacgttactgggaaagtagttctaatcaccggagcttcctccggcatcggagagcatgtggcatacgagtacgcaaagaaaggagcaaaattagctcttgttgctcgaagaaaggatcgtctagagattgtagcagaaacatcacgtcaattaggatctggcgatgtcatcatcatacctggtgatgtttctaatgttgaggactgcaagaagttcatcgacgaaacgattcatcatttcggaaaactggaccacctgatcaacaatgctggagtacctcaaactgttatattcgaagatttcacacaaattcaagacgctaattctataatggatatcaacttttggggctcaacgtacatcacttattttgctattcctcatcttcgaaaaagcaaaggaaaaattgttgtgatttcttctgctacggcaattatacctttgcaagcggcaagcgtctattcagcaagcaaagcagctttagtaaaattctttgaaacattaagagttgagatcagtcccgatatcaaaataacaatcgctcttcccggatttatatctacggatatgaccactcctcagtttaaagaaatgtatggttcagatttcatactttcggaatcagtgagtcgatgcgcaaaagcgatcttcagaggtattggtagaggagaggcatacgtcatagagccatcttggataaaatggatctttttgataaaaaatgtttgtcctgagatcgttgactacttactcgactatatatttgttagttatctaaaaccttatttcaagcgtgattgatcatatcgatctatccaagttctctctggttttc

SEQ ID NO: 102842 - protein, 308 aa, Arabidopsis thaliana
  peptide (1)..(308): Ceres Seq. ID no. 13611382
MDMLHTILNFLLPPLTISFLVLFYPFYLFTKLMSCLKHLHFENVTGKVVLITGASSGIGEHVAYEYAKKGAKLALVARRKDRLEIVAETSRQLGSGDVIIIPGDVSNVEDCKKFIDETIHHFGKLDHLINNAGVPQTVIFEDFTQIQDANSIMDINFWGSTYITYFAIPHLRKSKGKIVVISSATAIIPLQAASVYSASKAALVKFFETLRVEISPDIKITIALPGFISTDMTTPQFKEMYGSDFILSESVSRCAKAIFRGIGRGEAYVIEPSWIKWIFLIKNVCPEIVDYLLDYIFVSYLKPYFKRD

SEQ ID NO: 102843 - protein, 306 aa, Arabidopsis thaliana
  peptide (1)..(306): Ceres Seq. ID no. 13611383
MLHTILNFLLPPLTISFLVLFYPFYLFTKLMSCLKHLHFENVTGKVVLITGASSGIGEHVAYEYAKKGAKLALVARRKDRLEIVAETSRQLGSGDVIIIPGDVSNVEDCKKFIDETIHHFGKLDHLINNAGVPQTVIFEDFTQIQDANSIMDINFWGSTYITYFAIPHLRKSKGKIVVISSATAIIPLQAASVYSASKAALVKFFETLRVEISPDIKITIALPGFISTDMTTPQFKEMYGSDFILSESVSRCAKAIFRGIGRGEAYVIEPSWIKWIFLIKNVCPEIVDYLLDYIFVSYLKPYFKRD

SEQ ID NO: 102844 - protein, 276 aa, Arabidopsis thaliana
  peptide (1)..(276): Ceres Seq. ID no. 13611384
MSCLKHLHFENVTGKVVLITGASSGIGEHVAYEYAKKGAKLALVARRKDRLEIVAETSRQLGSGDVIIIPGDVSNVEDCKKFIDETIHHFGKLDHLINNAGVPQTVIFEDFTQIQDANSIMDINFWGSTYITYFAIPHLRKSKGKIVVISSATAIIPLQAASVYSASKAALVKFFETLRVEISPDIKITIALPGFISTDMTTPQFKEMYGSDFILSESVSRCAKAIFRGIGRGEAYVIEPSWIKWIFLIKNVCPEIVDYLLDYIFVSYLKPYFKRD

SEQ ID NO: 102845 - DNA, 874 bp, Arabidopsis thaliana
  misc_feature (1)..(874): Ceres Seq. ID no. 13611385
  misc_feature (1)..(874): Ortholog of  Ceres SEQ ID NO 14306246 as cited in SEQ ID NO 0
aaaacccgattgtttcgagcacaaacgtcacttgtggtttacatcgtcttcatcatctccataacttcatatctcctctccttccgctgccaccgttagcgatgtctttggacactgtggacaaactggtggtgttcttggccaagagagacggaatagacaagcttgtgaagacattccaatacgtggccaagctcgcgtgctggcatgttgaagccacacgacccgaagccgccgataggttcaagaagtgggaggtcgcctccggtctcagccgcaaagccttcaggaccgggagatctctcacggggttcaatgcgctgagacgaaaccccggggcaaccccgatgatccgtttcttggcggtcctagccaattcaggggaaatggtttacttcttctttgatcattttctttggttatcaagaattggttcaatagacgccaagctcgccaagaaaatgagtttcatatccgcttttggcgaatctttcggctacactttcttcatcatcattgattgcatcttcataaagcaaagactcaaatccttaaaaaagctccagcattcgaccgatgaaccgaaagaagaaatcggcgccaaaattagcgagattcggggagatatagtaatgaggttgatgggaatttcagccaacgttgcggatttacttatagcattggcagaaattcacccaaaccccttttgtaaccacaccattacactcggtataagcggtttagtttcagcttgggccggttggtataggaactggccatcgtgagatgtaataaaatcaaatgtttgttgttttgaatgaacgtatcaaacgtgtaatgtaactcacttgaatatatgaaacatttctatttt

SEQ ID NO: 102846 - protein, 260 aa, Arabidopsis thaliana; identical to SEQ ID NO: 21051
  peptide (1)..(260): Ceres Seq. ID no. 13611386

SEQ ID NO: 102847 - protein, 227 aa, Arabidopsis thaliana; identical to SEQ ID NO: 21052
  peptide (1)..(227): Ceres Seq. ID no. 13611387

SEQ ID NO: 102848 - protein, 145 aa, Arabidopsis thaliana; identical to SEQ ID NO: 21053
  peptide (1)..(145): Ceres Seq. ID no. 13611388

SEQ ID NO: 102849 - DNA, 2879 bp, Arabidopsis thaliana
  misc_feature (1)..(2879): Ceres Seq. ID no. 13611392
  misc_feature (1)..(2879): Ortholog of  Ceres SEQ ID NO 13623325 as cited in SEQ ID NO 357
  misc_feature (1)..(2879): Ortholog of  Ceres SEQ ID NO 13635680 as cited in SEQ ID NO 578
  misc_feature (1)..(2879): Ortholog of  Ceres SEQ ID NO 13624195 as cited in SEQ ID NO 1018
atggatcgagaaaagtgttcgaggaagcacaagggtaagtgcatccaaacatacccaaaggtcgcccatggatgcaatcttaccggtaaagggagaaagcaccaagaatgggtaaggaacgtgattcaccacataggatcaatatcgcggctaccttcatgtatcgatctcctctgccatggtaaaaccgatcggagatcggtaagaccaaagggtgactcgacggataaccaacgtgaaagtctacgccgaaagatttacagaccaccatggaccggacggagattggttcatcaattcacgatcggatacgagtcgttgaacgaatggagtaaggcgacaaatgggctaaggaatcaaatccgcatattggccaagcctcgtaaaggcaattctatgttgaatcgcgaaaaattaagagattcggccatgaagaggcgcaaacgtgagtccaaggttcccggacaccgagacgtccgggacggggtctcacaagttggtattagagcatgcttgatcctaggatggataagtgctcgggaaaacgtcatatgggtagatatattcggagatggaccgatatcaatggaatttggatctagtcagaacttgactaagatcgggtacagacttagtcgggttttgactatttctagagttttgatcttattggagattgaccaagatcaaggaaaaaacaacaaggtcgaaaacagacctatatcgggaatattgaccgagtccggtggggaccaaggaccgtctggatggtgcaaccgtttgttggtacccgctcgttggtacccgcacgacccaacgtttaaactcgttaaactaaagaggagaaaatggggtcgggagcgagcggaagctgtgaaagccgaggtagagaaactgttaaggatcaattccatcaccgaggcaaactaccccaattggcgcgcaaatccagtcgtggtaatgaagaaaaatggcaaatggagagtctgcgtagacttcactgacctcaacaaagcctgcccaaaggacagtttcccattaccgcatatcgatcgcctcgaggaatcaacctctggaaacaaattgctatcattcatggacgttttcgctggctacaaccaaatcatgatgaaccccgaagaccaagagaaaaccactttttacacagaacaaggaatgttttgctaccgagtgatgccgttcgggcttaagaacgtcggggcaacttatcaacgcttcgtcaataaaatctttgcactacatatcgggaggacaatggaagtatacatcgacgatatgctggttaaatccatggaagaggaagaacacatatcccatttgcgcgaatgtttccagcagctcaacctcaacaacgtcaaacttaacccagccaagtgccgcttcgggcaaattgaggcattattaggaatgatatcgcctcaagacaagcgagaagtacagcgcctaactggaagagttgcagcccttaaccgattcatctcccgatccaccgacaaatgcttggctttttacgatgtgctccgggaaaacatgaaattcgaatggacaacccgatgcgaagaggcttttcaggaactcaagaggtatctggcgaccccaccaatcctcgcaaaacctgtagtcgcggaaccactctactttccaagccaatcgggatgcttggctaaatgggcaatcgagctcaacgaacatgacatcgagtataggaacaaaacatgtgcaaaatcacaggtcctagccgattttatcgtcgaactacccacaaaggagacccgggagaacccgctcgatacaacttggctaatgcatgtagacggctcgtcatcaaagcaaggctcgggcgtgggcatccatctcacttcgccaacgggagaagttctcgaaaaatcattcagattgaactttgaggctaccaacaacgtgggcgagtacgaagcgctcgtgatcggacttaatctaactcgagggctaaaaatcgcgaaaatccgagctttttgtgactctcagctcatcgcaaatcaattcaatggagaatacccagctcggataacggctcacagttcatatcaagccgcttccaaggcttctgcgataagtggggaattcgacttagcaaatcaacaccacgatatccccaaggaaacggccaagctgaggccgcaaacaaaacaatcctcgaaggtttgaagaaacggctcgatgctaacaatggctcgtggtccgacgaactcgaaggcgtgcttttgtcacatccgacaactcctcgccgagccacaggagaaacccctttcgccttagtctacgggacagtgcataattccggccgagatgatagttccaagcctacgacgaagcctatccccggagaacactcctgataactctcaaaggctcctcgacgaacttgatctgattgacgaacgaagagattcgtccctggttcgaatacaaaattatcagaatgaaacggctcgtcattacaattcaaatgttcggcaacgaagattccacgaaggaaatcgggtcctccgaaaagtttaccagaacactgccgaaccgaacgctggaaaactcgggacgaactggaaggaccatacttaatttcaaaagtcatccgacccggagtgtatgagctcgctgacttaaacggtaaagccgttccaagatcatggaacgcaatgcacccaaggaaatactacaactaaatccgaggtgactaaacttgaactacgaggtggcttgatccctgaaaagggtacgtaggcagctcgtcttcggacgagttcagtacgtgggtccgtatattcatactcccatttttactatcaaaaattaaaaattcaactttttactcgtct

SEQ ID NO: 102850 - protein, 735 aa, Arabidopsis thaliana
  peptide (1)..(735): Ceres Seq. ID no. 15220751
MDREKCSRKHKGKCIQTYPKVAHGCNLTGKGRKHQEWVRNVIHHIGSISRLPSCIDLLCHGKTDRRSVRPKGDSTDNQRESLRRKIYRPPWTGRRLVHQFTIGYESLNEWSKATNGLRNQIRILAKPRKGNSMLNREKLRDSAMKRRKRESKVPGHRDVRDGVSQVGIRACLILGWISARENVIWVDIFGDGPISMEFGSSQNLTKIGYRLSRVLTISRVLILLEIDQDQGKNNKVENRPISGILTESGGDQGPSGWCNRLLVPARWYPHDPTFKLVKLKRRKWGRERAEAVKAEVEKLLRINSITEANYPNWRANPVVVMKKNGKWRVCVDFTDLNKACPKDSFPLPHIDRLEESTSGNKLLSFMDVFAGYNQIMMNPEDQEKTTFYTEQGMFCYRVMPFGLKNVGATYQRFVNKIFALHIGRTMEVYIDDMLVKSMEEEEHISHLRECFQQLNLNNVKLNPAKCRFGQIEALLGMISPQDKREVQRLTGRVAALNRFISRSTDKCLAFYDVLRENMKFEWTTRCEEAFQELKRYLATPPILAKPVVAEPLYFPSQSGCLAKWAIELNEHDIEYRNKTCAKSQVLADFIVELPTKETRENPLDTTWLMHVDGSSSKQGSGVGIHLTSPTGEVLEKSFRLNFEATNNVGEYEALVIGLNLTRGLKIAKIRAFCDSQLIANQFNGEYPARITAHSSYQAASKASAISGEFDLANQHHDIPKETAKLRPQTKQSSKV

SEQ ID NO: 102851 - protein, 603 aa, Arabidopsis thaliana
  peptide (1)..(603): Ceres Seq. ID no. 15220752
MLNREKLRDSAMKRRKRESKVPGHRDVRDGVSQVGIRACLILGWISARENVIWVDIFGDGPISMEFGSSQNLTKIGYRLSRVLTISRVLILLEIDQDQGKNNKVENRPISGILTESGGDQGPSGWCNRLLVPARWYPHDPTFKLVKLKRRKWGRERAEAVKAEVEKLLRINSITEANYPNWRANPVVVMKKNGKWRVCVDFTDLNKACPKDSFPLPHIDRLEESTSGNKLLSFMDVFAGYNQIMMNPEDQEKTTFYTEQGMFCYRVMPFGLKNVGATYQRFVNKIFALHIGRTMEVYIDDMLVKSMEEEEHISHLRECFQQLNLNNVKLNPAKCRFGQIEALLGMISPQDKREVQRLTGRVAALNRFISRSTDKCLAFYDVLRENMKFEWTTRCEEAFQELKRYLATPPILAKPVVAEPLYFPSQSGCLAKWAIELNEHDIEYRNKTCAKSQVLADFIVELPTKETRENPLDTTWLMHVDGSSSKQGSGVGIHLTSPTGEVLEKSFRLNFEATNNVGEYEALVIGLNLTRGLKIAKIRAFCDSQLIANQFNGEYPARITAHSSYQAASKASAISGEFDLANQHHDIPKETAKLRPQTKQSSKV

SEQ ID NO: 102852 - protein, 592 aa, Arabidopsis thaliana
  peptide (1)..(592): Ceres Seq. ID no. 15220753
MKRRKRESKVPGHRDVRDGVSQVGIRACLILGWISARENVIWVDIFGDGPISMEFGSSQNLTKIGYRLSRVLTISRVLILLEIDQDQGKNNKVENRPISGILTESGGDQGPSGWCNRLLVPARWYPHDPTFKLVKLKRRKWGRERAEAVKAEVEKLLRINSITEANYPNWRANPVVVMKKNGKWRVCVDFTDLNKACPKDSFPLPHIDRLEESTSGNKLLSFMDVFAGYNQIMMNPEDQEKTTFYTEQGMFCYRVMPFGLKNVGATYQRFVNKIFALHIGRTMEVYIDDMLVKSMEEEEHISHLRECFQQLNLNNVKLNPAKCRFGQIEALLGMISPQDKREVQRLTGRVAALNRFISRSTDKCLAFYDVLRENMKFEWTTRCEEAFQELKRYLATPPILAKPVVAEPLYFPSQSGCLAKWAIELNEHDIEYRNKTCAKSQVLADFIVELPTKETRENPLDTTWLMHVDGSSSKQGSGVGIHLTSPTGEVLEKSFRLNFEATNNVGEYEALVIGLNLTRGLKIAKIRAFCDSQLIANQFNGEYPARITAHSSYQAASKASAISGEFDLANQHHDIPKETAKLRPQTKQSSKV

SEQ ID NO: 102853 - DNA, 1472 bp, Arabidopsis thaliana
  misc_feature (1)..(1472): Ceres Seq. ID no. 13611393
  misc_feature (1)..(1472): Ortholog of  Ceres SEQ ID NO 12784228 as cited in SEQ ID NO 66111
atctattaatcatctaggtggcagaagcagcatcgttgagaacgaagaagcttgaaaaagttgcgagctcagagaatctggaagtagcaaaatttggcggctttaactcagcaatttgttctgtacatggtattttgagaagagagcattcagctcacagttacgctctgcctatccagcttctaaatctactcactttggtcgagtcatggcttcttctggatctgaggcaaaagctaattacgcacccatatctaccaatgaacctgttgtgtctgttgattggctccactctaatcttggagatgctgatataaaggttttggatgcctcatggtacatggcacatgagcaaagaaatccaatccaagagtatcaagttgctcatattccaggtgctctcttctttgatttgaatggaatagcagatcgaaaaacaaatagattcccattaatagctttggcaagccttctggctgtgagcttctatgtgtctgtatgcgcaacaaccaaaaagtattgtatattatttgaattacatgtgcagttacgacacatgctaccatctgaggaagcttttgctgctggttgttctgctcttggaatcgagaacaacgatggagtggttgtgtatgatggaatggggctctttagtgcagctcgtgtatggtggatgtttagagtctttggacatgacaaagtatgggtacttgatggaggcttgccgaaatggcgtgcttcaggctatgacgttgaatccagtgtttcaaatgatgccattttgaaagccagtgcagcaactgaggctatagagaagatctatcaaggacaaacaattagcccaataacttttcagacgaagttccggccacatcttgtattggcacttgatcaggtgaaggaaaacatcgaggataagacttatcagcacatcgatgcgcgttcaaaggctagatttgacggtattgctccagaaccttggaagggtttaccgagtggtcatatacccggtagcaagtgtgtcccttttcccctaatgtttgattcctctcaaacactgttaccagcagaggagctgaagaagcagtttgaacaggaagacatatctctggacagtccgattgcggcctcatgtggaaccggtgtaacagcttgtattttggcattgggactttatcgtctgggaaaaactaatgtggcaatctatgatgggtcttggactgaatgggcaactgcaccaaacttgcccatagtgggttcttcttcataagaaagtccaagaaaaagctacaagatcacaagccagtggatatatatttataagcttagcttggttcaatccatttctgtgttaaactttaacaaattgctgggagggttgtattagtattatacatcagtattcaggattcttgagtttggtctcatctttgtggagattgattaaaagtcttaatgttcttgttgtttgt

SEQ ID NO: 102854 - protein, 353 aa, Arabidopsis thaliana
  peptide (1)..(353): Ceres Seq. ID no. 13611394
MASSGSEAKANYAPISTNEPVVSVDWLHSNLGDADIKVLDASWYMAHEQRNPIQEYQVAHIPGALFFDLNGIADRKTNRFPLIALASLLAVSFYVSVCATTKKYCILFELHVQLRHMLPSEEAFAAGCSALGIENNDGVVVYDGMGLFSAARVWWMFRVFGHDKVWVLDGGLPKWRASGYDVESSVSNDAILKASAATEAIEKIYQGQTISPITFQTKFRPHLVLALDQVKENIEDKTYQHIDARSKARFDGIAPEPWKGLPSGHIPGSKCVPFPLMFDSSQTLLPAEELKKQFEQEDISLDSPIAASCGTGVTACILALGLYRLGKTNVAIYDGSWTEWATAPNLPIVGSSS

SEQ ID NO: 102855 - protein, 309 aa, Arabidopsis thaliana
  peptide (1)..(309): Ceres Seq. ID no. 13611395
MAHEQRNPIQEYQVAHIPGALFFDLNGIADRKTNRFPLIALASLLAVSFYVSVCATTKKYCILFELHVQLRHMLPSEEAFAAGCSALGIENNDGVVVYDGMGLFSAARVWWMFRVFGHDKVWVLDGGLPKWRASGYDVESSVSNDAILKASAATEAIEKIYQGQTISPITFQTKFRPHLVLALDQVKENIEDKTYQHIDARSKARFDGIAPEPWKGLPSGHIPGSKCVPFPLMFDSSQTLLPAEELKKQFEQEDISLDSPIAASCGTGVTACILALGLYRLGKTNVAIYDGSWTEWATAPNLPIVGSSS

SEQ ID NO: 102856 - protein, 237 aa, Arabidopsis thaliana; identical to SEQ ID NO: 24976
  peptide (1)..(237): Ceres Seq. ID no. 13611396

SEQ ID NO: 102857 - DNA, 1178 bp, Arabidopsis thaliana
  misc_feature (1)..(1178): Ceres Seq. ID no. 13611397
  misc_feature (1)..(1178): Ortholog of  Ceres SEQ ID NO 12611159 as cited in SEQ ID NO 59821
  misc_feature (1)..(1178): Ortholog of  Ceres SEQ ID NO 13584238 as cited in SEQ ID NO 64216
gtgacatttgtcaatgtctgtggtttataacatgtttctcaatgtcaggatcacacacaccacttctcatgtataaatacacataaaagcaattggatttggtaagagggaatctcaaaagtgtgtgtctgtgagagaggagagagagaatatgggcaaaggaagagcaccatgttgtgacaaaaccaaagtgaagagaggaccatggagccatgatgaagacttgaaactcatctctttcattcacaagaatggtcatgagaattggagatctctcccaaagcaagctggattgttgaggtgtggcaagagttgtcgtctgcgatggattaattacctcagacctgatgtgaaacgtggcaatttcagtgcagaggaagaagacaccatcatcaaacttcaccagagctttggtaacaagtggtcgaagattgcttctaagctgcctggaagaacagacaatgagatcaagaatgtgtggcatacacatctcaagaaaagattgagctcggaaactaaccttaatgccgatgaagcgggttcaaaaggttctttgaatgaagaagagaactctcaagagtcatctccaaatgcttcaatgtcttttgctggttccaacatttcaagcaaagacgatgatgcacagataagtcaaatgtttgagcacattctaacttatagcgagtttacggggatgttacaagaggtagacaaaccagagctgctggagatgccttttgatttagatcctgacatttggagtttcatagatggttcagactcattccaacaaccagagaacagagctcttcaagagtctgaagaagatgaagttgataaatggtttaagcacctggaaagcgaactcgggttagaagaaaacgataaccaacaacaacaacaacagcataaacagggaacagaagatgaacattcatcatcactcttggagagttacgagctcctcatacattaatgaagccataaagcaagtcattttcaccttgaaaatggaattattagctaacttattggcattattagtatataagcaagatcagataggcgcatgtagtagcaacaacgaagaaacgtcgaattgtagacaaaatgtagatattacagagttgaaagattgtattttgcaaatgattgctttgtagtgaaatcaagttatc

SEQ ID NO: 102858 - protein, 274 aa, Arabidopsis thaliana
  peptide (1)..(274): Ceres Seq. ID no. 13611398
MGKGRAPCCDKTKVKRGPWSHDEDLKLISFIHKNGHENWRSLPKQAGLLRCGKSCRLRWINYLRPDVKRGNFSAEEEDTIIKLHQSFGNKWSKIASKLPGRTDNEIKNVWHTHLKKRLSSETNLNADEAGSKGSLNEEENSQESSPNASMSFAGSNISSKDDDAQISQMFEHILTYSEFTGMLQEVDKPELLEMPFDLDPDIWSFIDGSDSFQQPENRALQESEEDEVDKWFKHLESELGLEENDNQQQQQQHKQGTEDEHSSSLLESYELLIH

SEQ ID NO: 102859 - DNA, 1587 bp, Arabidopsis thaliana
  misc_feature (1)..(1587): Ceres Seq. ID no. 13611399
  misc_feature (1)..(1587): Ortholog of  Ceres SEQ ID NO 14315919 as cited in SEQ ID NO 60074
gtctgtctgtctctctcctctaatcttttttatccgctagggttttgaagcaaggtttctcgcgattttctcgatatctctcgcccatggcgaaaccaagtcgtggccgtcgttccccctccgtgtctggctcgtcatctcgttccagttccagatctcgttcgggttcgagcccctccaggtctatttcccgctcacgctcccgttctagatcgctctcttcatcttcatctccttcgcgaagcgtcagttctgggagtcgcagtcctccacgtcgtggaaaaagtcctgctggacctgctaggcgaggtcgctctcctcctcctccaccatctaaaggagcatcttcaccttccaagaaagctgttcaagaatctcttgttctccatgttgattctcttagcaggaatgtgaatgaagcccatctcaaagaaatctttggcaactttggtgaagttatacatgtcgaaattgcgatggatcgagctgttaatcttccaagaggacatggttatgttgagttcaaggcaagagctgatgctgagaaagctcagctctacatggatggtgcccaaattgatggaaaggttgttaaagcaacgttcacactaccacctcgtcagaaagtatcttcaccccctaaacctgtctcagctgcaccaaaaagagatgctccaaaatctgataatgctgctgctgacgctgagaaagatggtggtcccaggcgcccaagagagacatctcctcaacggaaaacagggctttctccgagaaggcgatcacctctacctaggagaggcttatcacctagaaggcgatcacctgattctccccatcgccggaggccgggctctcctatccgccgtcgcggtgatacacctcctagacgtaggccagcatcaccatctagaggccgttctccatcttctccccctccaagacgatatagatctcctccaaggggctcccctagaagaattcgtggcagtcctgttcgaagaaggtctcctcttcctctaagacgaaggtctccacctccaaggagactacgcagtcctcccagaagatctccaatccgtaggcgtagccgatccccaattcgtaggcctggtcgctctcgttcaagttccatctcaccccgcaagggacgaggtccagctgggagacgtgggaggtcatcttcttactctagttcaccaagtcccagaaggattcctaggaagatttcaaggagccgcagtcctaagaggccactgagaggaaaaagaagcagcagtaacagcagcagcagcagttcaccgccaccaccacctccacctcgtaaaacttaaaggtgataaaaattaaaaaaaaaaaaaaaaaaacttgagtcttgatgtagctctctttctccatctttatcgttatcatctgtctcagcctcttttcttagaacagataaaatgtttaccagtgaccaaatgagagttgtggtttttgtagtgtttggatgtttaatcttcttttgtggatctcctcattagatgcaacgataatgacttggttcttttagctggttgtaattccctaatatattcagtcttgttg

SEQ ID NO: 102860 - protein, 414 aa, Arabidopsis thaliana; identical to SEQ ID NO: 27767
  peptide (1)..(414): Ceres Seq. ID no. 13611400

SEQ ID NO: 102861 - protein, 284 aa, Arabidopsis thaliana; identical to SEQ ID NO: 27768
  peptide (1)..(284): Ceres Seq. ID no. 13611401

SEQ ID NO: 102862 - protein, 256 aa, Arabidopsis thaliana; identical to SEQ ID NO: 27769
  peptide (1)..(256): Ceres Seq. ID no. 13611402

SEQ ID NO: 102863 - DNA, 894 bp, Arabidopsis thaliana
  misc_feature (1)..(894): Ceres Seq. ID no. 13611406
  misc_feature (1)..(894): Ortholog of  Ceres SEQ ID NO 12558659 as cited in SEQ ID NO 20727
  misc_feature (1)..(894): Ortholog of  Ceres SEQ ID NO 14308640 as cited in SEQ ID NO 60489
  misc_feature (1)..(894): Ortholog of  Ceres SEQ ID NO 12619999 as cited in SEQ ID NO 66123
  misc_feature (1)..(894): Ortholog of  Ceres SEQ ID NO 13656436 as cited in SEQ ID NO 69154
aaatctcagtttacaccttcacactgctgcgtctctctctctctctctctttctttctcagattaatcgctgagaagaagcaaccacctggagacggcggagatggcagggtacagagtggaagatgactacgattacctcttcaaagttgttcttataggcgattctggagttggcaaatccaatctcctttccagattcactaaaaacgagttcaatctagagtctaaatccaccattggcgtcgaattcgccactcgtaccttaaaagtcgatggcaaagtcgttaaagctcagatttgggacactgctggtcaggagaggtaccgtgccatcactagtgcatattaccgtggagccgtgggtgcactcctagtatatgatgtaactcgccgtgcaacatttgagaacgtagatcggtggttaaaggagctcaagaaccacacagatccaaacattgtagtgatgctggttggtaacaaatctgatctccgccacttgctagctgttcctacagaagacgggaagtcctatgcggaacaagaatcgctctgcttcatggaaacatctgcccttgaagctaccaatgtggaggacgcatttgcagaggtgttgacacaaatttatcgcatcacaagcaagaagcaagtggaagctggtgaagatgggaacgcctctgtcccgaaaggtgagaaaatcgaagttaaaaacgatgtctctgcgctgaagaaactcgggtgctgctcaaattgaagcctttttttgttttcactgttgagagagaattataacccccatggtccattgtttgattatgtccttgttttgtaacactatcgacatttgtatgagttttagaccatacactacataatgtttatttaactttatttc

SEQ ID NO: 102864 - protein, 216 aa, Arabidopsis thaliana; identical to SEQ ID NO: 26500
  peptide (1)..(216): Ceres Seq. ID no. 13611407

SEQ ID NO: 102865 - DNA, 950 bp, Arabidopsis thaliana
  misc_feature (1)..(950): Ceres Seq. ID no. 13611423
  misc_feature (1)..(950): Ortholog of  Ceres SEQ ID NO 15170395 as cited in SEQ ID NO 58055
acaaattcactttccacaattaatctctctcccaaatctcaattttggactcgtctgcttttgtttatataaacacttctcttcttcttcaatctccacacacaccacacaaaaccacctaccttcttcgatttctccagaaatcctccttcaagttcatactcatggaagaagctaaagtggaagcaaaagatggtaccatctccgtagcttctgcattttccggtcaccaacaagctgttcacgatagcgaccataaattcctaacgcaagctgttgaagaagcttacaagggagtggactgtggtgatggtggcccatttggtgcggtgattgtgcataataacgaggttgtcgctagctgccacaatatggttttgaaatatactgacccaactgcacatgctgaagtcactgccattagagaggcatgtaagaaacttaacaaaatcgagttatcagaatgcgagatttacgcatcttgtgagccatgtccgatgtgcttcggagccatccatctctcgagactcaagaggttggtttatggagccaaagccgaagcagctatagccatcgggtttgatgacttcatagctgatgctttgagaggcacgggggtttaccagaaatctagtctggagatcaagaaagcagacgggaatggcgctgcgattgcggagcaagttttccagaacacaaaggagaagttccgtttatactaaagcacttctccattaccacattcttcttcttcttctccttcatgatggtaattagaagtagtagaagaagaactgcacttgctttaacttaaataaatctctgtttcaaattgttcattttaaaaacagaaggaaacgaaaaaaaaaatcaatttcggttcttgttgacacgatttgtaatttcttttcttcatttgaattgaactggtaaatactttcttctctgtc

SEQ ID NO: 102866 - protein, 185 aa, Arabidopsis thaliana; identical to SEQ ID NO: 23876
  peptide (1)..(185): Ceres Seq. ID no. 13611424

SEQ ID NO: 102867 - protein, 116 aa, Arabidopsis thaliana; identical to SEQ ID NO: 23877
  peptide (1)..(116): Ceres Seq. ID no. 13611425

SEQ ID NO: 102868 - DNA, 738 bp, Arabidopsis thaliana
  misc_feature (1)..(738): Ceres Seq. ID no. 13611426
  misc_feature (1)..(738): Ortholog of  Ceres SEQ ID NO 15225657 as cited in SEQ ID NO 329
attcgtataatttttcagtaaattatctaaccctctcgatcctctctcgcctgttgaaaaagcacgacgcaagagctaaggatcaaaaaggaagacgaagaaagagatggatccagacgctgttgcaaaggctttcgttgagcactactactccaccttcgatgcaaatcgtccagggttggtttctctataccaagaaggatccatgttgaccttcgaaggccagaagatccagggctctcagaacatcgtcgctaagctcaccggcctccctttccagcagtgtaagcacaacatcaccaccgtcgattgtcagccttctggtcccgccggtggtatgctcgtctttgtctccggcaatcttcagctcgctggtgaacaacacgctctcaagttcagccagatgttccatttgatatcgaatcagggaaactactacgtgttcaatgacatattcaggttgaactatgcctgaggaatttgatgccagaggtacatggaaccattattggaagctgaaaagagagtggtggaaagtttgggactattcaaaaactgtttgagttggttttagatttggaacattaagctttgtttcaggtggtttgctgtctgtttttattttaatcaatggagctatttgttactttgtttgagatgactccttttgttttcgggcactgaaccatgattcagtaagggtaaaacaaaagattttttgaaatacggttctctttt

SEQ ID NO: 102869 - protein, 122 aa, Arabidopsis thaliana [sequence omitted]

SEQ ID NO: 102870 - protein, 89 aa, Arabidopsis thaliana; identical to SEQ ID NO: 36259
  peptide (1)..(89): Ceres Seq. ID no. 13611428

SEQ ID NO: 102871 - protein, 69 aa, Arabidopsis thaliana
  peptide (1)..(69): Ceres Seq. ID no. 13611429
SYNFSVNYLTLSILSRLLKKHDARAKDQKGRRRKRWIQTLLQRLSLSTTTPPSMQIVQGWFLYTKKDPC

SEQ ID NO: 102872 - DNA, 1394 bp, Arabidopsis thaliana
  misc_feature (1)..(1394): Ceres Seq. ID no. 13611450
  misc_feature (1)..(1394): Ortholog of  Ceres SEQ ID NO 13648488 as cited in SEQ ID NO 20419
agcaaaccgaagtgggaacgaaaccccatgctccaagtccaattaaataacatatgtccacagaaatgttttcaaaattcgaataagccacagcaacgtgtcttgttcatatatccactataacccaaagctgcttcaatggtcggatatggacacgtgtcagttaatcagaccatctccaagaaaaaatatcccaaatctttcttccctattcagtcccccaatcaacaatcctcttcacatttctattttctcctccgaggtcgtctctcgaccaaaccacaaaaaccagaacaaaaataactaaaaaacaatcagatctgagatcgaacaaaacaacatgaacacgttaatcccatcggagaaaagatggatcatcaccggcgttttactagccggtttagttggcggtgctttgcttttcacaagcttcatacgagccgctgacgaaacgctcttcctctgttccacagcaagcgccaaaagcagagcggtggctgcggcagctgattacgaagcgactccgattcagcttcaagcgatcgtccactacgcgacatctaacgttgtcccacaacagaatcttgctgagatctcgatctctttcaacatcttgaaaaagctagctccggctaactttctcgtgttcggtctcggtcgtgactcgctcatgtgggcttctttaaatccacgtggcaaaaccttgttcttggaagaagatcttgaatggtttcagaaagtgaccaaagactctcctttcttacgtgcgcatcacgtgcgttacaggacgcagcttcaacaagccgattcgcttctacgttcgtacaaaacggagcctaagtgttttccggcgaaatcttatctccggggaaacgagaagtgtaagctagctctcacgggactgcccgatgagttctacgatacagagtgggatctgctgatggtcgatgctcctaaaggttacttcgcagaagctccgggaagaatggcggcgattttctcggcggctgttatggctaggaaccggaagaaaccgggagttacgcacgtgttcttgcacgatgttaatcggagggtggagaagacttttgccgaggagtttttatgccggaagtatagagtcaacgccgccgggaggttatggcattttgctattcctccggcggctgcgaacgctacgattgactctggtgattataggttttgctaagattgcgacacgatttatcttcttatttcctcttttgcccttttattttacttttttgaggaattttattacagcattgggttcacttattatctgatttagtgccgacagttttggatctgcatctcgtgtttcgttatttttagttacaggctttccaaaatttcatggggcattatatttc

SEQ ID NO: 102873 - protein, 289 aa, Arabidopsis thaliana; identical to SEQ ID NO: 21458
  peptide (1)..(289): Ceres Seq. ID no. 13611451

SEQ ID NO: 102874 - protein, 179 aa, Arabidopsis thaliana; identical to SEQ ID NO: 21459
  peptide (1)..(179): Ceres Seq. ID no. 13611452

SEQ ID NO: 102875 - DNA, 619 bp, Arabidopsis thaliana
  misc_feature (1)..(619): Ceres Seq. ID no. 13611457
  misc_feature (1)..(619): Ortholog of  Ceres SEQ ID NO 15225657 as cited in SEQ ID NO 329
aatcctctcaatcctctgctgctcaatctctcatcatcggcatcgctctctctaaaaatgtctcagatggatcccgacgctgtatctaaggccttcgtcgaacattactattccaccttcgacaccaaccgtgtcggtctcgctggtctctatcaggaagcttctatgctcaccttcgaaggtcaaaagatccaaggagtccagagcatcgtcgctaagctcacctctcttcctttccagcagtgcaagcatcacatctccaccgttgattgtcagccttctggtcctgcttccggtatgctcgttttcgtctccggtaatctccagctcgccggagaagaacacgctctcaagttcagccagatgtttcatttgatgccgacgccacaaggaagcttttacgtgttcaacgatatattcagttggagattgcttcaagttttcaataatttatttacttgataagcattgcaagtgtcaagcacaaaagttgcagattcccacaaaccaaataagaaagatcaattttgatgtagaattttgcttctttttcagaagaaaagtctcagcttcactgattcgaccgttgattcaatttctatggcagttcataattttc

SEQ ID NO: 102876 - protein, 153 aa, Arabidopsis thaliana
  peptide (1)..(153): Ceres Seq. ID no. 13611458
NPLNPLLLNLSSSASLSLKMSQMDPDAVSKAFVEHYYSTFDTNRVGLAGLYQEASMLTFEGQKIQGVQSIVAKLTSLPFQQCKHHISTVDCQPSGPASGMLVFVSGNLQLAGEEHALKFSQMFHLMPTPQGSFYVFNDIFSWRLLQVFNNLFT

SEQ ID NO: 102877 - protein, 134 aa, Arabidopsis thaliana
  peptide (1)..(134): Ceres Seq. ID no. 13611459
MSQMDPDAVSKAFVEHYYSTFDTNRVGLAGLYQEASMLTFEGQKIQGVQSIVAKLTSLPFQQCKHHISTVDCQPSGPASGMLVFVSGNLQLAGEEHALKFSQMFHLMPTPQGSFYVFNDIFSWRLLQVFNNLFT

SEQ ID NO: 102878 - protein, 131 aa, Arabidopsis thaliana
  peptide (1)..(131): Ceres Seq. ID no. 13611460
MDPDAVSKAFVEHYYSTFDTNRVGLAGLYQEASMLTFEGQKIQGVQSIVAKLTSLPFQQCKHHISTVDCQPSGPASGMLVFVSGNLQLAGEEHALKFSQMFHLMPTPQGSFYVFNDIFSWRLLQVFNNLFT

SEQ ID NO: 102879 - DNA, 1180 bp, Arabidopsis thaliana
  misc_feature (1)..(1180): Ceres Seq. ID no. 13611461
  misc_feature (1)..(1180): Ortholog of  Ceres SEQ ID NO 13594503 as cited in SEQ ID NO 51336
  misc_feature (1)..(1180): Ortholog of  Ceres SEQ ID NO 15171370 as cited in SEQ ID NO 51492
acattcttatccatttgaatcatcatgtcaggcgtgtctcttgcggttggtccaagaaccgacgtggacaaaacggcgtcatccagtgagaagggacggtggtcggggatgacggcgataggaggtggcagtggaggtttgatggggtcgttaagggttatagagctacagctagtcgcgttcatactagttttctcagcaagcggtctcgtaccaatacttgacatgctttttccagcgtttgcgtctatctatataatcgccctctcgcgtttagctttcccttctcacggcgtttccaccgcttcccccgaagtcttccgcggcagcaaactcttcaggttccaaatccatcacaagaaaacaaaagaatgtctcttttaactctcgcttccacaatatttttaccactttagataaccaatcatactcttttactactagtatgatttttttgaattttatgttggttctgtatttttgagatcaaatgtaacattacagattctgactagtacattttttttctgttgcaatatttgggataatgaaaggttgtacgtgatttcggggacaacgattggtctgttcttgcctctagcttacgtattaggtggttttgcaagaggagatgatcatgcggtaagatcagcaacaccacacttgtttctactgtcgtgtcaaatcctgacagagaatgtaataagtggcctttctctgttctcgccaccggtaagagctctcgtcccattgctctacacagtctggagaatctttgtcatcattggttggtctaaagatgtttggttcaacaagtctttaccaatcaatgctacacccaatgtggttacatggttctggtttggaaggtatttagcactagcaaacttaggctacttcggagtgaatctactctgtttcttgatccctaggttcctgcctcgtgctttcgagcaatacttcagagagagagacgagatcttggcgaaaagccaagaagacaagccagttcaagttcctagatcaaaaccttctaaccacaaatctgattgatcatcttttttgttctgaaggtgtaatgtaacgaactaagagttgtttattatgaagattgtaatgaaattttattagtagggcaaacgaaacaatgtggttgtgaatatacaaagttttgcttctc

SEQ ID NO: 102880 - protein, 119 aa, Arabidopsis thaliana
  peptide (1)..(119): Ceres Seq. ID no. 13611462
MSGVSLAVGPRTDVDKTASSSEKGRWSGMTAIGGGSGGLMGSLRVIELQLVAFILVFSASGLVPILDMLFPAFASIYIIALSRLAFPSHGVSTASPEVFRGSKLFRFQIHHKKTKECLF

SEQ ID NO: 102881 - protein, 91 aa, Arabidopsis thaliana
  peptide (1)..(91): Ceres Seq. ID no. 13611463
MTAIGGGSGGLMGSLRVIELQLVAFILVFSASGLVPILDMLFPAFASIYIIALSRLAFPSHGVSTASPEVFRGSKLFRFQIHHKKTKECLF

SEQ ID NO: 102882 - protein, 80 aa, Arabidopsis thaliana
  peptide (1)..(80): Ceres Seq. ID no. 13611464
MGSLRVIELQLVAFILVFSASGLVPILDMLFPAFASIYIIALSRLAFPSHGVSTASPEVFRGSKLFRFQIHHKKTKECLF

SEQ ID NO: 102883 - DNA, 1095 bp, Arabidopsis thaliana
  misc_feature (1)..(1095): Ceres Seq. ID no. 13611475
  misc_feature (1)..(1095): Ortholog of  Ceres SEQ ID NO 14311509 as cited in SEQ ID NO 51398
  misc_feature (1)..(1095): Ortholog of  Ceres SEQ ID NO 14307702 as cited in SEQ ID NO 54703
  misc_feature (1)..(1095): Ortholog of  Ceres SEQ ID NO 15176361 as cited in SEQ ID NO 55438
gttttatcttttgatagttctgattgtaattagattttggtaggtcacttgtatagagagatcagtaaaataagaaggatgagttggtgtgatggttcagatgataactacgatcttaatcttgaaagagtatcgaacactgatcatccatcggttcaactcaaagaccaatctcaatcatgtgtaacgagccgtccagattccaagattagcgctgaaactcccatcacgacttgtccttcttgcggacacaagctccatcatcaccaagacgaccaggttggtagcatcaaagatttaccaagcttaccggcaggagtcaaattcgatccgtcggataaagagatccttatgcatttggaggcgaaggtatcatccgataagcgaaaacttcatccgttgattgatgaatttatacctacgcttgaaggagagaatggaatttgttatacgcatcctgagaaacttcctggagtaagcaaggacgggcaagtacggcacttcttccaccggccatcaaaggcttatacgaccggaacacgaaaacgaagaaaagtgagcacagatgaggaaggccatgaaacaaggtggcacaaaacaggcaagactcgacctgttttgtctcaatcaggagaaaccggtttcaagaagatcctagtgctctacaccaactatggtcgccagaagaagcctgagaagacgaattgggtgatgcatcagtatcatttaggtagcagcgaggacgaaaaagacggtgaaccagtcctctctaaagtcttctaccaaacacagcctaggcaatgcggttcgatggaacctaaaccgaaaaatctcgtaaacctaaaccggtttagttatgaaaatattcaggccggtttcgggtatgagcatggtggtaaaagtgaagagacgacgcaggtgattcgagagttggtagttcgtgaaggcgatgggtcatgttcgtttcttagttttacttgtgatgcaagtaagggtaaagaaagcttcatgaagaatcaatagaacataacatatataatatatataaatggaggtgctttgttggagtaaagatgaggaaaagaatgagagagc

SEQ ID NO: 102884 - protein, 314 aa, Arabidopsis thaliana
  peptide (1)..(314): Ceres Seq. ID no. 13611476
MSWCDGSDDNYDLNLERVSNTDHPSVQLKDQSQSCVTSRPDSKISAETPITTCPSCGHKLHHHQDDQVGSIKDLPSLPAGVKFDPSDKEILMHLEAKVSSDKRKLHPLIDEFIPTLEGENGICYTHPEKLPGVSKDGQVRHFFHRPSKAYTTGTRKRRKVSTDEEGHETRWHKTGKTRPVLSQSGETGFKKILVLYTNYGRQKKPEKTNWVMHQYHLGSSEDEKDGEPVLSKVFYQTQPRQCGSMEPKPKNLVNLNRFSYENIQAGFGYEHGGKSEETTQVIRELVVREGDGSCSFLSFTCDASKGKESFMKNQ

SEQ ID NO: 102885 - protein, 223 aa, Arabidopsis thaliana; identical to SEQ ID NO: 35867
  peptide (1)..(223): Ceres Seq. ID no. 13611477

SEQ ID NO: 102886 - DNA, 959 bp, Arabidopsis thaliana
  misc_feature (1)..(959): Ceres Seq. ID no. 13611480
  misc_feature (1)..(959): Ortholog of  Ceres SEQ ID NO 13596601 as cited in SEQ ID NO 62486
atatgattgatctacacagaatccatttccgcaaatcggattcatgtttttgctttatcgtaggcttccttcatttgcacgaacaacaacaacaacccttctctgcaaatctatggagcctgcgataacagcgacttcttcttcttctttcggtggtggctcttctcgtctcgccgctttagcccagcaacttcgccaatacaagcccccaccttcttcatcgttcgatgactccgaggagatgcagacagatcaggagaccgctgggaaagtcgtttctcaggttgggtttcaggaatctattgctcctctttcgaaagaccctgataggtttaaacccaagagagccgctgtgttgatctgtctctttgaaggagatgatggtgatttgcgtgttattcttactaagagatcttccaaattgtctactcactctggagaagtttcattgccaggtggtaaagcggaggaggatgataaagatgatgggatgactgctaccagagaggctgaggaagagattggattggacccttctcttgttgatgttgttacttctcttgaaccatttctgtctaagcatcttcttagagtaattcctgtgataggcatcttgagggacaaaaataaattcaatccgataccaaatcctggggaagtggaagctgtgtttgatgcacccttggaaatgttccttaaggatgagaatcgaagatctgaagagagagagtggatgggtgaaaagtatttgatccattactttgactacagaacaggagataaggattatatgatatggggtttaactgctgggattttgatcagagctgcatctgtgacttatgaaagaccacctgcttttatcgagcagtgcccgaagtttaagtaccctaaaatggtagaaaaacatacttgtatgccttaatgaacataatttttcgaatgatgctttcctagac

SEQ ID NO: 102887 - protein, 293 aa, Arabidopsis thaliana
  peptide (1)..(293): Ceres Seq. ID no. 13611481
MFLLYRRLPSFARTTTTTLLCKSMEPAITATSSSSFGGGSSRLAALAQQLRQYKPPPSSSFDDSEEMQTDQETAGKVVSQVGFQESIAPLSKDPDRFKPKRAAVLICLFEGDDGDLRVILTKRSSKLSTHSGEVSLPGGKAEEDDKDDGMTATREAEEEIGLDPSLVDVVTSLEPFLSKHLLRVIPVIGILRDKNKFNPIPNPGEVEAVFDAPLEMFLKDENRRSEEREWMGEKYLIHYFDYRTGDKDYMIWGLTAGILIRAASVTYERPPAFIEQCPKFKYPKMVEKHTCMP

SEQ ID NO: 102888 - protein, 270 aa, Arabidopsis thaliana
  peptide (1)..(270): Ceres Seq. ID no. 13611482
MEPAITATSSSSFGGGSSRLAALAQQLRQYKPPPSSSFDDSEEMQTDQETAGKVVSQVGFQESIAPLSKDPDRFKPKRAAVLICLFEGDDGDLRVILTKRSSKLSTHSGEVSLPGGKAEEDDKDDGMTATREAEEEIGLDPSLVDVVTSLEPFLSKHLLRVIPVIGILRDKNKFNPIPNPGEVEAVFDAPLEMFLKDENRRSEEREWMGEKYLIHYFDYRTGDKDYMIWGLTAGILIRAASVTYERPPAFIEQCPKFKYPKMVEKHTCMP

SEQ ID NO: 102889 - protein, 227 aa, Arabidopsis thaliana
  peptide (1)..(227): Ceres Seq. ID no. 13611483
MQTDQETAGKVVSQVGFQESIAPLSKDPDRFKPKRAAVLICLFEGDDGDLRVILTKRSSKLSTHSGEVSLPGGKAEEDDKDDGMTATREAEEEIGLDPSLVDVVTSLEPFLSKHLLRVIPVIGILRDKNKFNPIPNPGEVEAVFDAPLEMFLKDENRRSEEREWMGEKYLIHYFDYRTGDKDYMIWGLTAGILIRAASVTYERPPAFIEQCPKFKYPKMVEKHTCMP

SEQ ID NO: 102890 - DNA, 1330 bp, Arabidopsis thaliana
  misc_feature (1)..(1330): Ceres Seq. ID no. 13611484
  misc_feature (1)..(1330): Ortholog of  Ceres SEQ ID NO 15171556 as cited in SEQ ID NO 59687
  misc_feature (1)..(1330): Ortholog of  Ceres SEQ ID NO 15177935 as cited in SEQ ID NO 60258
  misc_feature (1)..(1330): Ortholog of  Ceres SEQ ID NO 13659033 as cited in SEQ ID NO 66372
  misc_feature (1)..(1330): Ortholog of  Ceres SEQ ID NO 12625899 as cited in SEQ ID NO 69079
  misc_feature (1)..(1330): Ortholog of  Ceres SEQ ID NO 15180051 as cited in SEQ ID NO 0
atcacaaaaacccaaaacctttgatatttgtctaattttacaaagatgggtttcaaactcatctctctcctccttctttttcttccacttctaacagtcacaatcttgtcgggagtcgagcaggcctttgcttccgacaaggcactcctcgtgaccggccgcaacatcacggctgacggtggaaggtcgtcactgagagggaagaagcagaggagagcatcaggatgtaacttgttccaaggccgatgggtgttcgatgcttcttaccctttctatgactcgtccaagtgtcctttcatcgacggcgagtttgactgtctcaagttcggccgaccagacaaacagttcctcaagtactcttggcaacctgaatcttgcaccatcccaaggttcgacggtggggcatttctgaggaaatacagaggaaaacgagtcatgttcgtcggagactcactgagtttaaacatgtgggaatcgttggcctgtatgatccatgcgtcggtaccaaacgccaagaccacttttctcaagcgtaccccactctctactctcactttccaggaatatggagtaacgttatatctatatagaacaccatacatagtagatatatccaaagagagagttgggcgtgtgcttaaccttggagctattgaaggaggtgctgatgcttggaaaaacatggacgttcttgtcttcaactcttggcattggtggactcacaaaggccaatctcaagggtgggattatattagagatgggtcgtctttggtgagagacatgaaccgtcttgacgctttctacaaaggactcagtacttgggctcgatgggttgatcaaaacgtcgatacggccaaaactcgagttttcttccaaggcatttctcccactcattacgagggaagggaatggaacgagccgaggaagacttgtagtgggcaaatgcagccgttgggtggatcaagttacccaagtggtcagcctccatcctcaggagtagtgtcgaaagtgttgagttcgatgaaaaagccagtgaccttgctcgatatcacaactttgtctcagttgagaaaagatgctcatccttcttcttatggtggcgatggaggaacagattgcagccattggtgcctcccagggttgcctgatacatggaaccaacttctctacgcagctcttacgatgtgaagtgttaagatactaaaaagaaagtgcataacacctttattctgtaaatgacattcgtaaatcttctagtgttgtgtgatgctatagaaaacagatttataacaaaagagacattctcagtataaaataacacattggtttg

SEQ ID NO: 102891 - protein, 380 aa, Arabidopsis thaliana; identical to SEQ ID NO: 21494
  peptide (1)..(380): Ceres Seq. ID no. 13611485

SEQ ID NO: 102892 - protein, 250 aa, Arabidopsis thaliana; identical to SEQ ID NO: 21495
  peptide (1)..(250): Ceres Seq. ID no. 13611486

SEQ ID NO: 102893 - protein, 240 aa, Arabidopsis thaliana; identical to SEQ ID NO: 21496
  peptide (1)..(240): Ceres Seq. ID no. 13611487

SEQ ID NO: 102894 - DNA, 1309 bp, Arabidopsis thaliana
  misc_feature (1)..(1309): Ceres Seq. ID no. 13611499
  misc_feature (1)..(1309): Ortholog of  Ceres SEQ ID NO 14308103 as cited in SEQ ID NO 59002
gattcagaatcaaaccatttttgaagaaccctaaaagttctcttcttcccccaaatttgaatttgttcttgcaatcggattcgaaatccgaaagtcttagtctcgaatttgagctcaacagtttcttatggctccgaagaagtctgaaggaatcgctttgctttccgtttacagtgatgaagatgacgaagagatggaagacgccgaggaagaggaagaagaggatgagaagcagagaaatcaggaagagagtgaaaaaataattgaagaagatcaggtagaagaagcgaattatatggatgaagaagagaaaggaagaggaggagaagattctagaacgccgaggctattagatggtgttggagcttcttctagtgctcatgggactcctcgttcacttgataacgatgaatcatcgagacctgattggagtaatcgaatgattggtgagtctggagttgcggatggtgagagaggtgatgatgcttcaggggaaagtagtgatacgttattggatcagtttcttccgccaagaccgagagagaggtgctctgaggagctgcaaaggaaaatagataagtttctgagcttgaaaaagatggggaagagtttcaattcagaagtgaggaataggaaggaatacaggaatcctgacttcctattgcatgctgtatcttaccaagacattgaccagattggttcgtgtttcagtaaagatgtatttgatcccagtggatatgacccaagtgacttctgtgatgcaatagaaatcgacatgaagaatgagagggaaaggaaggaacaagaaagcaagaagaaccagaagcttgactttgtttctgctggtactcaacctggggcggttttcgctgctcaaaagcctaacatccccattccaggtattccagctttagctactagtggattgccttccataccaaccgaaattgctgctcgtgatggtagaccgaacaagaaatccaaatgggataaggttgatggggacgtaaagaatcctcctctagcagctggaactcaggattctatatcctcaatccggtctaatgcagctcttgtatctgctacaagtgctggttctggatactcagcttttgcgcaacaacggagacgagaggtggaaggaagaagatcttccgagaggaaattggagagaagaagttgagagacataaccagaacgaagcttttctatgttgtgattcatgtagcaagagtttctaaagaggttctagttcaatgtttcataacgagtacaaacttaaaatcaatgatatacagtaccttcattc

SEQ ID NO: 102895 - protein, 351 aa, Arabidopsis thaliana
  peptide (1)..(351): Ceres Seq. ID no. 13611500
MAPKKSEGIALLSVYSDEDDEEMEDAEEEEEEDEKQRNQEESEKIIEEDQVEEANYMDEEEKGRGGEDSRTPRLLDGVGASSSAHGTPRSLDNDESSRPDWSNRMIGESGVADGERGDDASGESSDTLLDQFLPPRPRERCSEELQRKIDKFLSLKKMGKSFNSEVRNRKEYRNPDFLLHAVSYQDIDQIGSCFSKDVFDPSGYDPSDFCDAIEIDMKNERERKEQESKKNQKLDFVSAGTQPGAVFAAQKPNIPIPGIPALATSGLPSIPTEIAARDGRPNKKSKWDKVDGDVKNPPLAAGTQDSISSIRSNAALVSATSAGSGYSAFAQQRRREVEGRRSSERKLERRS

SEQ ID NO: 102896 - protein, 329 aa, Arabidopsis thaliana
  peptide (1)..(329): Ceres Seq. ID no. 13611501
MEDAEEEEEEDEKQRNQEESEKIIEEDQVEEANYMDEEEKGRGGEDSRTPRLLDGVGASSSAHGTPRSLDNDESSRPDWSNRMIGESGVADGERGDDASGESSDTLLDQFLPPRPRERCSEELQRKIDKFLSLKKMGKSFNSEVRNRKEYRNPDFLLHAVSYQDIDQIGSCFSKDVFDPSGYDPSDFCDAIEIDMKNERERKEQESKKNQKLDFVSAGTQPGAVFAAQKPNIPIPGIPALATSGLPSIPTEIAARDGRPNKKSKWDKVDGDVKNPPLAAGTQDSISSIRSNAALVSATSAGSGYSAFAQQRRREVEGRRSSERKLERRS

SEQ ID NO: 102897 - protein, 295 aa, Arabidopsis thaliana; identical to SEQ ID NO: 34885
  peptide (1)..(295): Ceres Seq. ID no. 13611502

SEQ ID NO: 102898 - DNA, 1514 bp, Arabidopsis thaliana
  misc_feature (1)..(1514): Ceres Seq. ID no. 13611503
  misc_feature (1)..(1514): Ortholog of  Ceres SEQ ID NO 14314276 as cited in SEQ ID NO 57382
aagttcagcttcgtacctgagccaaagagtgtttcaggatggagctaaggtcgagaatgctcaaagactgtctcttggaagattccaactcatgttcctcaaacgggttcaaatcgattcccagacggcatcctctcaaccctttcccaatgataccaaagaggaaacaatccaatgcattgcaggctgtgattaacgccatcaagaacctccattccaacaccatcaaatccgctccatcggggatcttaccaaggagcctttctcggcggttagcaaccaagaacaaagcagaaaaccaagcaagcatcaccgttattcgagtcaaagacatcgtgcgatggcactcgtctaaggacctgcatgaggacatatcacattttgaacctcatcagtacacaaccaagaacacgacaacaaccacaggatcctccaccaccagcggcacatcctgcagcagttggtctgacttggattttacatcggagtttttaccatcatcatggggaagtaacgttgaggagtgcggtgaaaaacagagtgttaaaaacaacttacactgcgtcggcgaagattcttgcacagcagtaatactagccgacactgaagtgggacctgaggagaacttacagtgtgaaaaggagcacaacagccctgtctcagtgtttgagattcaacatgaggaatatgacgaaacatcagactcttctttcagtcaatgccttgacaatgtggaaagaaccaaacaaaagctcatgcaaacgattcagcggtttgagtctttggccaacattagtcctttcaatttggatgaatggggctcaatggatgaagcatcttgcatggaaggaggacaagagacagataccaagtatgatgatgatgagaattgtgatactgttgatagagagagtgaagatgaatacaatgatgaggttgaagagaaggcagcacagctatggaaccgagtcaaagaaagacacgccatttggatccacgaagaacatctgataatggactatttcagagatgaattgatgcaaaggacaaactcattccacgaaactcaacactttgagaaccaattggtatgcgaggcaaaaggatggttgcagggaaagagagaatcagagcttgaacgcggaacaagtgagcagaggagacaagcatgtgctagagaaatcgaaagacgagactggaatgagaaacagatagaggaggagcacgaagtggtggttacacagattgaggaagaactcttcagcctgttaatggacgaaactttaacaacgctctctaccaaaactgattccagtccacctgaacatcacaaaacagtaacatcaatgcttaagctttagaaattagaaagcaaaaacatttttgaataaggctttgacttaaaagctcaggtttttttagctctacttttgtaagaatgaagcaaacgaataatacaatgtatattgacctctaaaaccatatatatatatatgcctaattcatatttctgc

SEQ ID NO: 102899 - protein, 440 aa, Arabidopsis thaliana
  peptide (1)..(440): Ceres Seq. ID no. 13611504
MELRSRMLKDCLLEDSNSCSSNGFKSIPRRHPLNPFPMIPKRKQSNALQAVINAIKNLHSNTIKSAPSGILPRSLSRRLATKNKAENQASITVIRVKDIVRWHSSKDLHEDISHFEPHQYTTKNTTTTTGSSTTSGTSCSSWSDLDFTSEFLPSSWGSNVEECGEKQSVKNNLHCVGEDSCTAVILADTEVGPEENLQCEKEHNSPVSVFEIQHEEYDETSDSSFSQCLDNVERTKQKLMQTIQRFESLANISPFNLDEWGSMDEASCMEGGQETDTKYDDDENCDTVDRESEDEYNDEVEEKAAQLWNRVKERHAIWIHEEHLIMDYFRDELMQRTNSFHETQHFENQLVCEAKGWLQGKRESELERGTSEQRRQACAREIERRDWNEKQIEEEHEVVVTQIEEELFSLLMDETLTTLSTKTDSSPPEHHKTVTSMLKL

SEQ ID NO: 102900 - protein, 434 aa, Arabidopsis thaliana
  peptide (1)..(434): Ceres Seq. ID no. 13611505
MLKDCLLEDSNSCSSNGFKSIPRRHPLNPFPMIPKRKQSNALQAVINAIKNLHSNTIKSAPSGILPRSLSRRLATKNKAENQASITVIRVKDIVRWHSSKDLHEDISHFEPHQYTTKNTTTTTGSSTTSGTSCSSWSDLDFTSEFLPSSWGSNVEECGEKQSVKNNLHCVGEDSCTAVILADTEVGPEENLQCEKEHNSPVSVFEIQHEEYDETSDSSFSQCLDNVERTKQKLMQTIQRFESLANISPFNLDEWGSMDEASCMEGGQETDTKYDDDENCDTVDRESEDEYNDEVEEKAAQLWNRVKERHAIWIHEEHLIMDYFRDELMQRTNSFHETQHFENQLVCEAKGWLQGKRESELERGTSEQRRQACAREIERRDWNEKQIEEEHEVVVTQIEEELFSLLMDETLTTLSTKTDSSPPEHHKTVTSMLKL

SEQ ID NO: 102901 - protein, 403 aa, Arabidopsis thaliana
  peptide (1)..(403): Ceres Seq. ID no. 13611506
MIPKRKQSNALQAVINAIKNLHSNTIKSAPSGILPRSLSRRLATKNKAENQASITVIRVKDIVRWHSSKDLHEDISHFEPHQYTTKNTTTTTGSSTTSGTSCSSWSDLDFTSEFLPSSWGSNVEECGEKQSVKNNLHCVGEDSCTAVILADTEVGPEENLQCEKEHNSPVSVFEIQHEEYDETSDSSFSQCLDNVERTKQKLMQTIQRFESLANISPFNLDEWGSMDEASCMEGGQETDTKYDDDENCDTVDRESEDEYNDEVEEKAAQLWNRVKERHAIWIHEEHLIMDYFRDELMQRTNSFHETQHFENQLVCEAKGWLQGKRESELERGTSEQRRQACAREIERRDWNEKQIEEEHEVVVTQIEEELFSLLMDETLTTLSTKTDSSPPEHHKTVTSMLKL

SEQ ID NO: 102902 - DNA, 1483 bp, Arabidopsis thaliana
  misc_feature (1)..(1483): Ceres Seq. ID no. 13611519
  misc_feature (1)..(1483): Ortholog of  Ceres SEQ ID NO 13659033 as cited in SEQ ID NO 66372
  misc_feature (1)..(1483): Ortholog of  Ceres SEQ ID NO 13655724 as cited in SEQ ID NO 68973
  misc_feature (1)..(1483): Ortholog of  Ceres SEQ ID NO 12625899 as cited in SEQ ID NO 69079
cactgtgctctcttcttcaatggaacaacaattaaccttagtattgcttgatagcccaaaaggcgccaaatatgtagaaacctttgaagaagccgcttcttcttcttcttcttcttcttcttcttctgttccctcctgcactgatcaccgccatcgaaccttcgtcaaattcttcctttacttctctctcgtcgctcttgcttactatttcatcatctccagtctcgccgtctctccaattcccccaacattgccgcaatcttctcccggaaacgtttcatcagcaaagtgtgatcttttcaccggagattggataccagatccaacaggtcctctgtacacaaatgtcacttgtcgtcacattcaagattttcagaactgcctattgaatggacgaccagatgtgaattatctcttctggagatggaagcctcgtgattgtgatcttcctaggtttagtccatcgcagtttcttgcttcagtgaagaacaaatggtgggcttttatcggtgattccattgctcgtaatcatgtccagtctctcatctgcattctctctcaggtggaagaagtggaggaaatctatcacgataaggagttcagatccaagatatggagattcccttctcacaacttcacactatcagtcatttggtctcctttccttctcaaatccgaaacatctagcaactcggatattcagctttacctcgaccagcttgaccacaaatggactgtccaatacccgaaattcgactacgttgttatctctggaggcaaatggtttcttaaaacaacaattttccatgaaaacaacgtagtcacgggctgtcattactgccaaggaagaaacaacctaactgatctcggctatgattactcctaccgcaaaaccctaaaccttctccgtgacttcgtcctaaactcaacccacaaaccgctggttctgtttcgaacaacaacgcctgaccatttcgaaaacggagagtggaacactggtgggtattgcaacagaacgatgccgtttaaagaaggccaagcaaatatgaaaactgtagatgatgtgatgcgtgatgttgagcttgaggtgtttcagaaatttgggaaaggttttggcttaggttccaacatcaggctattagacacgactggaatgtctcttctccgtccagacgggcatccgggaccataccggcatccaaatccttttgctggagttaagaataagagcaatgttcagaatgattgtctgcattggtgcttacctggtccaattgattcatggaatgatgtgatggtggaaaccacgcttaaccgggaacgggaactatacgatttaaccggttaatgtaccacgatatcgcttgtagctagttacagtcaatagccattccacttgtcaatgtctcgtatatgatagttctatattttaattttgtaatggttctaaacaagaataaacgatgcaaaattttgcagtgtg

SEQ ID NO: 102903 - protein, 448 aa, Arabidopsis thaliana
  peptide (1)..(448): Ceres Seq. ID no. 13611520
TVLSSSMEQQLTLVLLDSPKGAKYVETFEEAASSSSSSSSSSVPSCTDHRHRTFVKFFLYFSLVALAYYFIISSLAVSPIPPTLPQSSPGNVSSAKCDLFTGDWIPDPTGPLYTNVTCRHIQDFQNCLLNGRPDVNYLFWRWKPRDCDLPRFSPSQFLASVKNKWWAFIGDSIARNHVQSLICILSQVEEVEEIYHDKEFRSKIWRFPSHNFTLSVIWSPFLLKSETSSNSDIQLYLDQLDHKWTVQYPKFDYVVISGGKWFLKTTIFHENNVVTGCHYCQGRNNLTDLGYDYSYRKTLNLLRDFVLNSTHKPLVLFRTTTPDHFENGEWNTGGYCNRTMPFKEGQANMKTVDDVMRDVELEVFQKFGKGFGLGSNIRLLDTTGMSLLRPDGHPGPYRHPNPFAGVKNKSNVQNDCLHWCLPGPIDSWNDVMVETTLNRERELYDLTG

SEQ ID NO: 102904 - protein, 442 aa, Arabidopsis thaliana
  peptide (1)..(442): Ceres Seq. ID no. 13611521
MEQQLTLVLLDSPKGAKYVETFEEAASSSSSSSSSSVPSCTDHRHRTFVKFFLYFSLVALAYYFIISSLAVSPIPPTLPQSSPGNVSSAKCDLFTGDWIPDPTGPLYTNVTCRHIQDFQNCLLNGRPDVNYLFWRWKPRDCDLPRFSPSQFLASVKNKWWAFIGDSIARNHVQSLICILSQVEEVEEIYHDKEFRSKIWRFPSHNFTLSVIWSPFLLKSETSSNSDIQLYLDQLDHKWTVQYPKFDYVVISGGKWFLKTTIFHENNVVTGCHYCQGRNNLTDLGYDYSYRKTLNLLRDFVLNSTHKPLVLFRTTTPDHFENGEWNTGGYCNRTMPFKEGQANMKTVDDVMRDVELEVFQKFGKGFGLGSNIRLLDTTGMSLLRPDGHPGPYRHPNPFAGVKNKSNVQNDCLHWCLPGPIDSWNDVMVETTLNRERELYDLTG

SEQ ID NO: 102905 - DNA, 760 bp, Arabidopsis thaliana
  misc_feature (1)..(760): Ceres Seq. ID no. 13611522
  misc_feature (1)..(760): Ortholog of  Ceres SEQ ID NO 12556910 as cited in SEQ ID NO 39
  misc_feature (1)..(760): Ortholog of  Ceres SEQ ID NO 13594970 as cited in SEQ ID NO 56328
  misc_feature (1)..(760): Ortholog of  Ceres SEQ ID NO 12585079 as cited in SEQ ID NO 63137
gaggagcgaccaataagagcgcgaggagcttccacgtgttactacacgaatcttgtttagtaaaaagcgcagctgcaaaaaaaatcgagtagagaagaagtaggcagacaaagaagaagaagaagaagttctcggcgtgcttcaatggcgatatcagtagcagcttcgtcctctatggccgtgatggttccacgtgttcccgccgtatccacccgttgctccgccgtcccttatcttcctcctcgctcctttggccgatcctctttcaccgttccgttgaagcttgtttcagggaatggattgcaaaaagttgaattgttgaagacaagagcttcttcagaagagacctcgtccattgataccaacgaactcatcacagatttgaaggaaaagtgggatggtcttgagaacaaatctactgtacttatatatggaggaggagccattgttgctgtttggttatcttccattgttgttggtgccatcaactctgttcctctgcttccgaaagttatggaacttgtcggtctcgggtacactggatggtttgtctacagataccttctcttcaagtcaagcagaaaggaattggctgaggatattgaatccttgaagaagaagatcgcaggaagcgaatagattcattttcaaataaaaccagctttctctctgtatgttttcctgtaatatcgtgttatattatacaatgtctctgtttcaacattgtatctgttgcatctgaaactattatcttggatcc

SEQ ID NO: 102906 - protein, 164 aa, Arabidopsis thaliana; identical to SEQ ID NO: 43971
  peptide (1)..(164): Ceres Seq. ID no. 13611523

SEQ ID NO: 102907 - protein, 154 aa, Arabidopsis thaliana; identical to SEQ ID NO: 43972
  peptide (1)..(154): Ceres Seq. ID no. 13611524

SEQ ID NO: 102908 - protein, 151 aa, Arabidopsis thaliana; identical to SEQ ID NO: 43973
  peptide (1)..(151): Ceres Seq. ID no. 13611525

SEQ ID NO: 102909 - DNA, 1008 bp, Arabidopsis thaliana
  misc_feature (1)..(1008): Ceres Seq. ID no. 13611534
  misc_feature (1)..(1008): Ortholog of  Ceres SEQ ID NO 14315553 as cited in SEQ ID NO 60445
  misc_feature (1)..(1008): Ortholog of  Ceres SEQ ID NO 13598045 as cited in SEQ ID NO 66822
atatacacatctctgattcaactccaccgaattcagaagatcgaagaagatgagtagaggaagcggcgctggttatgatcgtcacatcactatcttctcaccggaaggtcgtctctttcaagttgaatatgccttcaaggccgtgaaaacagctggtattacttcaatcggagttcgtgggaaagattcggtttgcgtcgttacccagaagaaagttcctgacaagcttttggatcagtctagtgttacacatctgttccctatcaccaagtacattggattggtagctactggcattacagctgatgcaaggtctttggttcaacaagcaaggaatcaagcagctgaatttcggttcacttatggatatgagatgcctgttgacattcttgctaaatggatagcggacaagtcacaggtctacactcaacatgcttacatgagaccccttggagttgtcgctatggtaatgggtgttgatgaagagaatggtcccttactttacaaatgtgacccagctggacatttttacggtcacaaggcaactagtgctggtatgaaggaacaagaagcagtcaatttcttggagaagaaaatgaaagaaaacccatctttcacatttgatgaaaccgtgcagactgccatatcggctttgcaatctgttcttcaagaagacttcaaggctactgagattgaggtaggtgtggtgagagcagagaacccggaattccgtgcattgacaacggaggagattgaggagcatttgacagccattagtgaacgagactgatcaacttagtgaaacaagtgtgagttacgttgcttcgcttctatcagacattcctctaaagtgaccactctccatcgatcttttgtttggtcttccttccataatttaatttacttagtcaacccagcaaacttgaaaaacaaaaatgcactgtaatgcttaaggctgtgagagtttccgagtcttttgactcttcagaaatgacaccaactttactc

SEQ ID NO: 102910 - protein, 246 aa, Arabidopsis thaliana
  peptide (1)..(246): Ceres Seq. ID no. 13611535
MSRGSGAGYDRHITIFSPEGRLFQVEYAFKAVKTAGITSIGVRGKDSVCVVTQKKVPDKLLDQSSVTHLFPITKYIGLVATGITADARSLVQQARNQAAEFRFTYGYEMPVDILAKWIADKSQVYTQHAYMRPLGVVAMVMGVDEENGPLLYKCDPAGHFYGHKATSAGMKEQEAVNFLEKKMKENPSFTFDETVQTAISALQSVLQEDFKATEIEVGVVRAENPEFRALTTEEIEEHLTAISERD

SEQ ID NO: 102911 - protein, 138 aa, Arabidopsis thaliana; identical to SEQ ID NO: 28382
  peptide (1)..(138): Ceres Seq. ID no. 13611536

SEQ ID NO: 102912 - DNA, 1500 bp, Arabidopsis thaliana
  misc_feature (1)..(1500): Ceres Seq. ID no. 13611537
  misc_feature (1)..(1500): Ortholog of  Ceres SEQ ID NO 14304925 as cited in SEQ ID NO 52996
atttctcaattcccaagttctttatccaaattgttctgaaacatagagagaaacaatgggtgttacaggaggattagtcagaagcattttcttcaggaacaaatcatttggagctcatgactacaacaatggaagaggcaatctaggagagaagaaacgatggagctcggttagatcatacctttgcggagatgaatttaactctgttcgcgctgtgaatgattcagaatcgataaaggattctgaggctcttcttacaatgtctcagcaactgagttcagagttcggtatgccttttggttcggttatcgcaatcgaagattcagcttctgtgagacatttggaggatgaggactctggttccgttaagagctctgaggcaacagtgactcaacctttactggaggagaaatcgaaaggactggattgttatctaaaagaagaagatgttgaagataaccaaagcgaagcaacagagacacacatacccaagaagcatcagactactccaatctccaagttgttcctcgaagaagacgctgcagtcataattcagtcagcattcaggagttacctggcaatacgccggagcaaagaagaagaggaaacatttgctaaggaggagagcttctcaggagaggaatctcaagacaatgcatccatggggacatcactagaagctcagacaggtaattccgtgaaagcaccatttttcaggagaaagcgagtatctgcgaatcgaagaacactacagaagaacaacactcaagttctgaggataaaggaagactgggatgatagtacagtgagcagcaccatatcaaaatcaaggattcaaagcagagtcgaagcaatgacaaaacgggagagagcacttgcgtatgcattttcacagcagctaagaatttgctcaaagaagaaacaaatagatcgtagcagtgaagatgattccaatatcggttggagttggttagaacgctggatggcaacccgtgtaccagacagcattccaattgaaccaagaacagatgttgcaacgaaaaatcaaagcttgataagaaagaatagagcttttggtacagctggcgagttggagagctgtgcttccaacgacctacctctccattttgaaagcatatcagagacacaaggagatgcaactacagttttgcagaccgaaaaaagtagttttaaaccaagtatatctaagcgtaaatctgttccaagctacaaaagccagagaaagcatcacaagcttcaggccaccaaaagtgatctgcaacaacaaacaaagaaagcaaagaaggccaaaaccacacccacaagctgcaaaacaggaaacgaatgcgaagaaacctcacataagctaaatagcagcacctaagataagcattacctgtaaatctttgcatttaaatcacaaaagtttgttctttcgaatcagataacaactttctgtaaattatttagggattcaaatcaaaccagtaatagtaaggg

SEQ ID NO: 102913 - protein, 442 aa, Arabidopsis thaliana
  peptide (1)..(442): Ceres Seq. ID no. 13611538
MGVTGGLVRSIFFRNKSFGAHDYNNGRGNLGEKKRWSSVRSYLCGDEFNSVRAVNDSESIKDSEALLTMSQQLSSEFGMPFGSVIAIEDSASVRHLEDEDSGSVKSSEATVTQPLLEEKSKGLDCYLKEEDVEDNQSEATETHIPKKHQTTPISKLFLEEDAAVIIQSAFRSYLAIRRSKEEEETFAKEESFSGEESQDNASMGTSLEAQTGNSVKAPFFRRKRVSANRRTLQKNNTQVLRIKEDWDDSTVSSTISKSRIQSRVEAMTKRERALAYAFSQQLRICSKKKQIDRSSEDDSNIGWSWLERWMATRVPDSIPIEPRTDVATKNQSLIRKNRAFGTAGELESCASNDLPLHFESISETQGDATTVLQTEKSSFKPSISKRKSVPSYKSQRKHHKLQATKSDLQQQTKKAKKAKTTPTSCKTGNECEETSHKLNSST

SEQ ID NO: 102914 - protein, 374 aa, Arabidopsis thaliana
  peptide (1)..(374): Ceres Seq. ID no. 13611539
MSQQLSSEFGMPFGSVIAIEDSASVRHLEDEDSGSVKSSEATVTQPLLEEKSKGLDCYLKEEDVEDNQSEATETHIPKKHQTTPISKLFLEEDAAVIIQSAFRSYLAIRRSKEEEETFAKEESFSGEESQDNASMGTSLEAQTGNSVKAPFFRRKRVSANRRTLQKNNTQVLRIKEDWDDSTVSSTISKSRIQSRVEAMTKRERALAYAFSQQLRICSKKKQIDRSSEDDSNIGWSWLERWMATRVPDSIPIEPRTDVATKNQSLIRKNRAFGTAGELESCASNDLPLHFESISETQGDATTVLQTEKSSFKPSISKRKSVPSYKSQRKHHKLQATKSDLQQQTKKAKKAKTTPTSCKTGNECEETSHKLNSST

SEQ ID NO: 102915 - protein, 364 aa, Arabidopsis thaliana
  peptide (1)..(364): Ceres Seq. ID no. 13611540
MPFGSVIAIEDSASVRHLEDEDSGSVKSSEATVTQPLLEEKSKGLDCYLKEEDVEDNQSEATETHIPKKHQTTPISKLFLEEDAAVIIQSAFRSYLAIRRSKEEEETFAKEESFSGEESQDNASMGTSLEAQTGNSVKAPFFRRKRVSANRRTLQKNNTQVLRIKEDWDDSTVSSTISKSRIQSRVEAMTKRERALAYAFSQQLRICSKKKQIDRSSEDDSNIGWSWLERWMATRVPDSIPIEPRTDVATKNQSLIRKNRAFGTAGELESCASNDLPLHFESISETQGDATTVLQTEKSSFKPSISKRKSVPSYKSQRKHHKLQATKSDLQQQTKKAKKAKTTPTSCKTGNECEETSHKLNSST

SEQ ID NO: 102916 - DNA, 1427 bp, Arabidopsis thaliana
  misc_feature (1)..(1427): Ceres Seq. ID no. 13611541
  misc_feature (1)..(1427): Ortholog of  Ceres SEQ ID NO 14316017 as cited in SEQ ID NO 67028
  misc_feature (1)..(1427): Ortholog of  Ceres SEQ ID NO 15177500 as cited in SEQ ID NO 0
aaatatcttcgaaaccccattactctcaaatccaaccaacctttcaaaacagaacacgaagacatggaccgaacacaatctccaaagacagctctgttcgccgtgttggcaacactccttgtcttaaccgtgaacggccagtcactttgtaacacacacaggttcaccaataacctcgccttcgcagattgctctgacctctcggccttaggctctttccttcactggacctacaatgaacaaaacggtaccgtctcaatcgcctatcgccaccctggaacctctgcttcttcttgggttgcttggggacttaacccaagtagtactcagatggttgggacgcaagctctcgtagccttcacaaacacaacaactaaccaattccaggcctatacctcttccgtgagttcctatggtacgcggcttgaacgtagtagcctaagtttcggtgtgagtggcctctccgcgactctggtcagtggcgaggttacgatctttgcaactcttgagttgtctccgaatctgatcacggccaaccagctttggcaggtgggacctgttgtcaacggtgttcctgcgagtcatcaaacctcaggagataatatgagatcgagtggtaggattgatttccggactggtcaggcatcagctggtggtggtggttccggtgacaggctgaggaagagaaacacgcatggagtactaaatgcggtcagctggggagtactaatgccaatgggagcaatgatggctcggtacatgaaagtcttcgccgatccaacatggttctatctccacattgcctttcaagtgtcgggttacgtcatcggggtagccggttgggccaccggaatcaagcttggtaacgactcaccaggcacatcttactcaacccatcgtaaccttggaatagcactcttcacatttgccacacttcaagtatttgctctgcttgtaaggccaaagccagaccacaaatatcgaacgtactggaacgtgtaccatcacaccgttggatacacaaccatcatcctctctattgtcaacattttcaaaggattcgacattttggacccggaggataaatggcgatgggcttacattgggatcctcatctttcttggtgcttgtgtccttattctcgagccactcacttggttcattgttcttcgccgtaagagccgtggaggtaacacagtcgctgcaccaacttcgagcaagtactctaacggcgtcaatggtaccaccaccactggaccacatcaccaggacgcctagtttcactttttgtttctacacttgttcttgtttgttctacttctactcgattttggattcttttttgatttgatattttgtaggctcatgtatgtattatgtatacaattttattcattgtgttatagatatatcgatttatggagtca

SEQ ID NO: 102917 - protein, 425 aa, Arabidopsis thaliana; identical to SEQ ID NO: 22043
  peptide (1)..(425): Ceres Seq. ID no. 13611542

SEQ ID NO: 102918 - protein, 404 aa, Arabidopsis thaliana; identical to SEQ ID NO: 22044
  peptide (1)..(404): Ceres Seq. ID no. 13611543

SEQ ID NO: 102919 - protein, 315 aa, Arabidopsis thaliana; identical to SEQ ID NO: 22045
  peptide (1)..(315): Ceres Seq. ID no. 13611544

SEQ ID NO: 102920 - DNA, 1438 bp, Arabidopsis thaliana
  misc_feature (1)..(1438): Ceres Seq. ID no. 13611545
  misc_feature (1)..(1438): Ortholog of  Ceres SEQ ID NO 13639645 as cited in SEQ ID NO 57488
taggaagagcacaagcctccacaagtggtgttgcccctctgttcctaactcctttctcttatataaaattgtgtatcctccatacatacaacaaagagagaaacttttgatatggggttaaagatgtcagaatcagccaagccttactttgcaatggtttgtcttcaattcggatacgccggcatgaacctcgtgacgaaggttgtgctagaccgcggcatgagccattacgtccttgtggcttaccgtaatgcctttgccacggctgctatcgcaccttttgctctactctccgagaggaaagtgaggccgaagatgacatttccaatattcatgcagatttttgttctagctcttctcgggcctttgatcgatcaaaatttatattacgccggtctcaaacttacttcaccaacttttgccggcgcagtcacaaatatcgttccagctttgacctttatcatttccataatttgcaggatggagaaggtggagatgagaaaagtaagattccaagcaaaagtggtggggacattagtgatagtggttggagccatgttgatgattttattcaaaattcctctaatcacctttctccgatctcacctcaccggccatgctttgtcgccggcaggtgaggactacctcaaagccaccgtcttcctcctcatcgcctcattttcttgggcttcctttttcgttcttcaggcggctacgttgaagagatactcatctcacctttcattatcgacgatggtgtgtttcatgggcacgttacagtccacagccttaacgtttgtgatggagccaaacctttctgcatggaacattggctttgacatgaaccttcttgcctctgcttatgcgggcataatgtcgtcgagcatagcgtactacgttcaaggaatgatgacgaagcaaaagagtgttatctttgttactgcttttaatcctcttgttgtcataatcggatccatcattggcttcctcatcctcaaccaaactttaaaccttggcggggttcttggaatggcaattttagtggtgggagtttgcacggttctttggggaaaggaaggagatatcgatgaagaagagaacattgaggagaagtttgtagaaattgtcaagtgttgcaaccgctgcgatatcaaggttctctcgatgatgccaagaatcgatgaggaagtagacgttgaaatgcaatccgcaggaacagctaaagtggcggtgggtttctcgtaacctctcgtgtgtggaaaaagatgttcacgaccttaattagatcttttcaagtcttttttttttaacaaaattttagatagaggagcaactttttctttgttctatatcattgctccaactttttattttctttgtaggttttgttttataatcttcattagaagggtaattattattattaaataaatgttcc

SEQ ID NO: 102921 - protein, 377 aa, Arabidopsis thaliana
  peptide (1)..(377): Ceres Seq. ID no. 13611546
MGLKMSESAKPYFAMVCLQFGYAGMNLVTKVVLDRGMSHYVLVAYRNAFATAAIAPFALLSERKVRPKMTFPIFMQIFVLALLGPLIDQNLYYAGLKLTSPTFAGAVTNIVPALTFIISIICRMEKVEMRKVRFQAKVVGTLVIVVGAMLMILFKIPLITFLRSHLTGHALSPAGEDYLKATVFLLIASFSWASFFVLQAATLKRYSSHLSLSTMVCFMGTLQSTALTFVMEPNLSAWNIGFDMNLLASAYAGIMSSSIAYYVQGMMTKQKSVIFVTAFNPLVVIIGSIIGFLILNQTLNLGGVLGMAILVVGVCTVLWGKEGDIDEEENIEEKFVEIVKCCNRCDIKVLSMMPRIDEEVDVEMQSAGTAKVAVGFS

SEQ ID NO: 102922 - protein, 373 aa, Arabidopsis thaliana
  peptide (1)..(373): Ceres Seq. ID no. 13611547
MSESAKPYFAMVCLQFGYAGMNLVTKVVLDRGMSHYVLVAYRNAFATAAIAPFALLSERKVRPKMTFPIFMQIFVLALLGPLIDQNLYYAGLKLTSPTFAGAVTNIVPALTFIISIICRMEKVEMRKVRFQAKVVGTLVIVVGAMLMILFKIPLITFLRSHLTGHALSPAGEDYLKATVFLLIASFSWASFFVLQAATLKRYSSHLSLSTMVCFMGTLQSTALTFVMEPNLSAWNIGFDMNLLASAYAGIMSSSIAYYVQGMMTKQKSVIFVTAFNPLVVIIGSIIGFLILNQTLNLGGVLGMAILVVGVCTVLWGKEGDIDEEENIEEKFVEIVKCCNRCDIKVLSMMPRIDEEVDVEMQSAGTAKVAVGFS

SEQ ID NO: 102923 - protein, 363 aa, Arabidopsis thaliana
  peptide (1)..(363): Ceres Seq. ID no. 13611548
MVCLQFGYAGMNLVTKVVLDRGMSHYVLVAYRNAFATAAIAPFALLSERKVRPKMTFPIFMQIFVLALLGPLIDQNLYYAGLKLTSPTFAGAVTNIVPALTFIISIICRMEKVEMRKVRFQAKVVGTLVIVVGAMLMILFKIPLITFLRSHLTGHALSPAGEDYLKATVFLLIASFSWASFFVLQAATLKRYSSHLSLSTMVCFMGTLQSTALTFVMEPNLSAWNIGFDMNLLASAYAGIMSSSIAYYVQGMMTKQKSVIFVTAFNPLVVIIGSIIGFLILNQTLNLGGVLGMAILVVGVCTVLWGKEGDIDEEENIEEKFVEIVKCCNRCDIKVLSMMPRIDEEVDVEMQSAGTAKVAVGFS

SEQ ID NO: 102924 - DNA, 2316 bp, Arabidopsis thaliana
  misc_feature (1)..(2316): Ceres Seq. ID no. 13611551
  misc_feature (1)..(2316): Ortholog of  Ceres SEQ ID NO 15225222 as cited in SEQ ID NO 53759
tttttggcttcaatttttgcgttttctctgcaactcgccgtcaagggtagaagaattaggggttcctgttcttaactgcttgaagatgacgtcttatggagatagactgaagtcgacctccattaatggagttaagttatacaatgtttcttctgctcccaatgttcctacttggcttaatcctaagaagcaacgagctctccgcaaaaaccctcattatatgcaaagagtggagctgattcaggagttgaagtttgagactgccactactagaatcaaagcgactccagacggagagtatctgattgcttcaggcatatatccaccacaggtaaaagtttatgagctaaatcagcttgctttgaagtttgagaggcatttggactcggaaatagttgatttcgagatattggatgatgacttctcaaagcttgccttcttatgtgctgatcgttctattaatttacacgccaaatacgggaaacaccacactttacgaattccaaggatggggagagatatgacatatgattcctggtcttgtgatcttctttgcgctgcttcctcacctgatctatatagaatcaatttggagcagggaagatttctttctcctctcagcactcaatccccagcgcttaatgtcgtttctcgaagcaacctccatggattagttgcttgtggtggtgaggatggtgctgtggaattttttgatatgagaatgaaatcatctgctgctagaattaacgcggtcacacatggtggtgatgctgctgcggaggttactgctatagagtttgatgacagtgaaggtcttcaagtagctgtcgggagtagcgcgggaaaggtattcatatacgacttgcgtacttcaactcccataagagtgaaggatcacatgtacgagagcccaattttgaatattaagtggcaacggactcttaatactcaacaacctaagttgattactaccaacaaacacattgttagaatatgggatccaaacacgggagaaggtatgaccagcattgaaccgactcaaggaggaataaacgacatttgtgtgttccgtggaagcggacttatgcttcttgctttagactctagcctaatcccatcttacttcatacctgaactcggtcctgcccccaaatggtgttctcctcttgaaaatctaacggaagagttggaggaaagtgcacagacaactatttatgataattacaaatttttggcaatggaagatctggagaagttgcagctaactcatttgattggaacagatcttttgaaagcatctatgcatggatattttattaattaccatttgtacaaaaaggctttagcagtgattgaaccttttgcatttgatgattacttagaacgtaggaagcaagagaagttagaagagcagcgtacgcagagaatcacaaaaaagagacggttgccaaaggttaaccgagaccttgcagcaaggcttcatggggacgaatcagaggaggaaaataaaactgccgaggatggggaggccaccaagaaagtgctgaaaaagaagaaacccatacttactgacgagcatttcgtagatggtcggtttggttcgatgttccaaaatccggacttccaaattgataaggactcatatgaatatggtgtcctacaccctgttgcttcttcgaagaagcaaccttctctgttagatgaacactttgaagctgtatcagatgatgacgagaacagtgattctgatgcatcacagccttcagatgacgaggccgacgatggagacgcaactaggccaagcaagaaagcgagaactccgaagttgtatgaagtgaaagatgagcggcatgccgcagcttatcacaaccgcacttcactggctaaagaagatagtcttcctatgggcgagcgtgtcaaggctatagagaaccggcgtggcaactttggaggctcgaaagatatcaaattcggtcctggaggatcacgggagttttctttcaaggcgagagggtcatcaaagtacaaagaagatagagacgatgagtatgaagatgggcaaagaaacaagaggagaggagttcagtctcttggactgaaatcaacaaatattagaggcggtttcagaggtagaggaggtggtggttttagagggagaggaggcggcggttcccggggaaaaggtggccgtggtggtgggcgtggaagaggccggcaatgataaatgtagcttttcaggggctttattagatttgaaaaatgtgtcacctactattgagaatcttgaaacttaattgatcacatatacaattttgg

SEQ ID NO: 102925 - protein, 739 aa, Arabidopsis thaliana
  peptide (1)..(739): Ceres Seq. ID no. 13611552
FWLQFLRFLCNSPSRVEELGVPVLNCLKMTSYGDRLKSTSINGVKLYNVSSAPNVPTWLNPKKQRALRKNPHYMQRVELIQELKFETATTRIKATPDGEYLIASGIYPPQVKVYELNQLALKFERHLDSEIVDFEILDDDFSKLAFLCADRSINLHAKYGKHHTLRIPRMGRDMTYDSWSCDLLCAASSPDLYRINLEQGRFLSPLSTQSPALNVVSRSNLHGLVACGGEDGAVEFFDMRMKSSAARINAVTHGGDAAAEVTAIEFDDSEGLQVAVGSSAGKVFIYDLRTSTPIRVKDHMYESPILNIKWQRTLNTQQPKLITTNKHIVRIWDPNTGEGMTSIEPTQGGINDICVFRGSGLMLLALDSSLIPSYFIPELGPAPKWCSPLENLTEELEESAQTTIYDNYKFLAMEDLEKLQLTHLIGTDLLKASMHGYFINYHLYKKALAVIEPFAFDDYLERRKQEKLEEQRTQRITKKRRLPKVNRDLAARLHGDESEEENKTAEDGEATKKVLKKKKPILTDEHFVDGRFGSMFQNPDFQIDKDSYEYGVLHPVASSKKQPSLLDEHFEAVSDDDENSDSDASQPSDDEADDGDATRPSKKARTPKLYEVKDERHAAAYHNRTSLAKEDSLPMGERVKAIENRRGNFGGSKDIKFGPGGSREFSFKARGSSKYKEDRDDEYEDGQRNKRRGVQSLGLKSTNIRGGFRGRGGGGFRGRGGGGSRGKGGRGGGRGRGRQ

SEQ ID NO: 102926 - protein, 711 aa, Arabidopsis thaliana
  peptide (1)..(711): Ceres Seq. ID no. 13611553
MTSYGDRLKSTSINGVKLYNVSSAPNVPTWLNPKKQRALRKNPHYMQRVELIQELKFETATTRIKATPDGEYLIASGIYPPQVKVYELNQLALKFERHLDSEIVDFEILDDDFSKLAFLCADRSINLHAKYGKHHTLRIPRMGRDMTYDSWSCDLLCAASSPDLYRINLEQGRFLSPLSTQSPALNVVSRSNLHGLVACGGEDGAVEFFDMRMKSSAARINAVTHGGDAAAEVTAIEFDDSEGLQVAVGSSAGKVFIYDLRTSTPIRVKDHMYESPILNIKWQRTLNTQQPKLITTNKHIVRIWDPNTGEGMTSIEPTQGGINDICVFRGSGLMLLALDSSLIPSYFIPELGPAPKWCSPLENLTEELEESAQTTIYDNYKFLAMEDLEKLQLTHLIGTDLLKASMHGYFINYHLYKKALAVIEPFAFDDYLERRKQEKLEEQRTQRITKKRRLPKVNRDLAARLHGDESEEENKTAEDGEATKKVLKKKKPILTDEHFVDGRFGSMFQNPDFQIDKDSYEYGVLHPVASSKKQPSLLDEHFEAVSDDDENSDSDASQPSDDEADDGDATRPSKKARTPKLYEVKDERHAAAYHNRTSLAKEDSLPMGERVKAIENRRGNFGGSKDIKFGPGGSREFSFKARGSSKYKEDRDDEYEDGQRNKRRGVQSLGLKSTNIRGGFRGRGGGGFRGRGGGGSRGKGGRGGGRGRGRQ

SEQ ID NO: 102927 - protein, 666 aa, Arabidopsis thaliana
  peptide (1)..(666): Ceres Seq. ID no. 13611554
MQRVELIQELKFETATTRIKATPDGEYLIASGIYPPQVKVYELNQLALKFERHLDSEIVDFEILDDDFSKLAFLCADRSINLHAKYGKHHTLRIPRMGRDMTYDSWSCDLLCAASSPDLYRINLEQGRFLSPLSTQSPALNVVSRSNLHGLVACGGEDGAVEFFDMRMKSSAARINAVTHGGDAAAEVTAIEFDDSEGLQVAVGSSAGKVFIYDLRTSTPIRVKDHMYESPILNIKWQRTLNTQQPKLITTNKHIVRIWDPNTGEGMTSIEPTQGGINDICVFRGSGLMLLALDSSLIPSYFIPELGPAPKWCSPLENLTEELEESAQTTIYDNYKFLAMEDLEKLQLTHLIGTDLLKASMHGYFINYHLYKKALAVIEPFAFDDYLERRKQEKLEEQRTQRITKKRRLPKVNRDLAARLHGDESEEENKTAEDGEATKKVLKKKKPILTDEHFVDGRFGSMFQNPDFQIDKDSYEYGVLHPVASSKKQPSLLDEHFEAVSDDDENSDSDASQPSDDEADDGDATRPSKKARTPKLYEVKDERHAAAYHNRTSLAKEDSLPMGERVKAIENRRGNFGGSKDIKFGPGGSREFSFKARGSSKYKEDRDDEYEDGQRNKRRGVQSLGLKSTNIRGGFRGRGGGGFRGRGGGGSRGKGGRGGGRGRGRQ

SEQ ID NO: 102928 - DNA, 1196 bp, Arabidopsis thaliana
  misc_feature (1)..(1196): Ceres Seq. ID no. 13611555
  misc_feature (1)..(1196): Ortholog of  Ceres SEQ ID NO 12615264 as cited in SEQ ID NO 62383
acaaaaaataaaaaaacgcctacctttaacttcgaattagggtttatcaggattcagtcgcctgctcacttgaatttcttcgcaagctcaaaaagttccgaaatttttgaaggaagatggtgaggccgtatgggattaaagtgaacaagagaaaggagagagaagagaggtatgataaggaagaagatgaagtagaggagcaaccaaagtttgagcaaaaacaaaaggcaagagaaagttcgaagaaagctaaaaaagaaagcacttcaagagcagaggaagataatgacgaggaggaagtaactgtggaagcaactgcagcagcagaggatattgtgggagggatacctattgtccttaatgctcctaacaaggaaaagtctggcattgtattcgtgcttgagaaggcctctcttgaagttgccaaagttggaaagacttaccagctactgaactcggatgatcatgctaatttcttgaaaaagaataacagaaatccggctgattaccgaccagacattactcatcaggcgcttcttatgattttggatagtccggttaataaagctgggaggttgaaagctgtttatgttagaacagaaaaaggtgtcctttttgaagttaagccacatgttcgtataccaagaactttcaaacgatttgccggaatcatgttgcaactgctacaaaagctgagcattactgcagttaacagccgtgagaagcttctacggtgtgtcaagaaccctatcgaagaacatcatctaccggttaactcccacagaataggcttctcgcatagctctgagaaactcgtcaatatgcagaaacacctagctactgtatgtgatgatgatagagacacagtttttgtggtaggcgcaatggcacacgggaaaatagactgcaactatatcgatgaatttgtgtcggtttcagagtatccattgagcgcagcctactgtatctcaagaatctgcgaggcattagcaacaaattggaatattatataaaagaatgattataaggtcctttgttttcctctctactgctctaatggtaggaactactttaagctatgttgttgtgatacacattgtttatctactatcgagtttataacttttcgtttgaaattttgactccactattttattcaaacgtaatataaagtaaaagaaagagatgttcctgtg

SEQ ID NO: 102929 - protein, 298 aa, Arabidopsis thaliana
  peptide (1)..(298): Ceres Seq. ID no. 13611556
MVRPYGIKVNKRKEREERYDKEEDEVEEQPKFEQKQKARESSKKAKKESTSRAEEDNDEEEVTVEATAAAEDIVGGIPIVLNAPNKEKSGIVFVLEKASLEVAKVGKTYQLLNSDDHANFLKKNNRNPADYRPDITHQALLMILDSPVNKAGRLKAVYVRTEKGVLFEVKPHVRIPRTFKRFAGIMLQLLQKLSITAVNSREKLLRCVKNPIEEHHLPVNSHRIGFSHSSEKLVNMQKHLATVCDDDRDTVFVVGAMAHGKIDCNYIDEFVSVSEYPLSAAYCISRICEALATNWNII

SEQ ID NO: 102930 - protein, 157 aa, Arabidopsis thaliana; identical to SEQ ID NO: 25228
  peptide (1)..(157): Ceres Seq. ID no. 13611557

SEQ ID NO: 102931 - DNA, 1354 bp, Arabidopsis thaliana
  misc_feature (1)..(1354): Ceres Seq. ID no. 13611558
  misc_feature (1)..(1354): Ortholog of  Ceres SEQ ID NO 13664220 as cited in SEQ ID NO 61151
  misc_feature (1)..(1354): Ortholog of  Ceres SEQ ID NO 13597477 as cited in SEQ ID NO 65160
atacataccaacagtcaacaatatctcttgttccggcggaaaaatgcccattaatcagaaaattccgacttggtttgccgttccggctgtttttgctgtcttgtccgtaatctcgtatcaaaccttaattgtgccggaaaatttagagggcgccaaaaatgtattgacaatggctaagaccataccaattcctgtcgctggaccggagagcattgagtttgacccaaaaggagaaggtccttatgctgcggtcgtggacggccgtattctcaagtggcgcggcgatgatctcggctgggttgattttgcctacacatctcctcacagagggaactgttcaaaaactgaagtagtgcctacttgtggaaggccattaggacttactttcgagaagaaaacgggagatttgtacatatgtgatggttacttggggctcatgaaagttggaccagagggaggcttggccgagttaattgttgatgaagccgaaggtcgtaaagttatgtttgctaaccaaggggatatagacgaagaggaagatgtcttttacttcaatgatagtagtgacaagtatcatttcagggacgtatttttcgtggctgtcagtggggagcggtcgggaagagtgatcagatacgataagaagacgaaagaagccaaagttatcatggacaatctcgtttgtaacaacggtttggctctaaacaaagaccggtcttttctaattacatgcgagtccggcacaagtcttgtccaccgatactggattaaaggtcccaaagccgggactcgtgatatctttgcgaaggtcccaggttaccctgacaacatccggctgacatcaactggagacttttggattggtttacactgcaagaaaaatctgatagggagattgattgtgaagtacaaatggcttgggaaattggtagaaaagacaatgaaactggagtacgtgattgcttttattaacggatttaaaccgcacggagtcgccgtgaaaatctccggcgagacgggagaggtacttgagttacttgaggacaaagaaggaaagacaatgaagtatgtaagcgaggcttatgaaagagatgatggaaagttgtggtttgggtctgtttactggccagccgtttgggttcttgatcgcaaatgagtgatcatgttgtatctacttataattatgttcgttttgtatattaataaatgtttatctgagttaaatcagcatttgtttgttgcgggaaaataaatgtgaatcctactttttcaaattgttttttttttctttgtattaatgctcccaagatgtttattgaactgaacacactagaatgaattatagcttttgtaa

SEQ ID NO: 102932 - protein, 384 aa, Arabidopsis thaliana
  peptide (1)..(384): Ceres Seq. ID no. 13611559
YIPTVNNISCSGGKMPINQKIPTWFAVPAVFAVLSVISYQTLIVPENLEGAKNVLTMAKTIPIPVAGPESIEFDPKGEGPYAAVVDGRILKWRGDDLGWVDFAYTSPHRGNCSKTEVVPTCGRPLGLTFEKKTGDLYICDGYLGLMKVGPEGGLAELIVDEAEGRKVMFANQGDIDEEEDVFYFNDSSDKYHFRDVFFVAVSGERSGRVIRYDKKTKEAKVIMDNLVCNNGLALNKDRSFLITCESGTSLVHRYWIKGPKAGTRDIFAKVPGYPDNIRLTSTGDFWIGLHCKKNLIGRLIVKYKWLGKLVEKTMKLEYVIAFINGFKPHGVAVKISGETGEVLELLEDKEGKTMKYVSEAYERDDGKLWFGSVYWPAVWVLDRK

SEQ ID NO: 102933 - protein, 370 aa, Arabidopsis thaliana
  peptide (1)..(370): Ceres Seq. ID no. 13611560
MPINQKIPTWFAVPAVFAVLSVISYQTLIVPENLEGAKNVLTMAKTIPIPVAGPESIEFDPKGEGPYAAVVDGRILKWRGDDLGWVDFAYTSPHRGNCSKTEVVPTCGRPLGLTFEKKTGDLYICDGYLGLMKVGPEGGLAELIVDEAEGRKVMFANQGDIDEEEDVFYFNDSSDKYHFRDVFFVAVSGERSGRVIRYDKKTKEAKVIMDNLVCNNGLALNKDRSFLITCESGTSLVHRYWIKGPKAGTRDIFAKVPGYPDNIRLTSTGDFWIGLHCKKNLIGRLIVKYKWLGKLVEKTMKLEYVIAFINGFKPHGVAVKISGETGEVLELLEDKEGKTMKYVSEAYERDDGKLWFGSVYWPAVWVLDRK

SEQ ID NO: 102934 - protein, 328 aa, Arabidopsis thaliana
  peptide (1)..(328): Ceres Seq. ID no. 13611561
MAKTIPIPVAGPESIEFDPKGEGPYAAVVDGRILKWRGDDLGWVDFAYTSPHRGNCSKTEVVPTCGRPLGLTFEKKTGDLYICDGYLGLMKVGPEGGLAELIVDEAEGRKVMFANQGDIDEEEDVFYFNDSSDKYHFRDVFFVAVSGERSGRVIRYDKKTKEAKVIMDNLVCNNGLALNKDRSFLITCESGTSLVHRYWIKGPKAGTRDIFAKVPGYPDNIRLTSTGDFWIGLHCKKNLIGRLIVKYKWLGKLVEKTMKLEYVIAFINGFKPHGVAVKISGETGEVLELLEDKEGKTMKYVSEAYERDDGKLWFGSVYWPAVWVLDRK

SEQ ID NO: 102935 - DNA, 748 bp, Arabidopsis thaliana
  misc_feature (1)..(748): Ceres Seq. ID no. 13611566
  misc_feature (1)..(748): Ortholog of  Ceres SEQ ID NO 13598160 as cited in SEQ ID NO 61317
  misc_feature (1)..(748): Ortholog of  Ceres SEQ ID NO 12614253 as cited in SEQ ID NO 68518
agataagggagacaaaaatggaagtgaaagggaaagagacagcttcggttctgtgtctgagcaaatacgtggatctatcgagtgaagagagtcatagatactatcttgcgcggcgaaatggcttgcagatgctccgagacagaggctacgaagtctccgacgaagatatcaatctctcccttcacgattttcgaactgtttacggtgaacgtcccgatgttgatcgtcttcgcatctccgctctgcatcgctccgattctaccaaaaaggtaaaaattgtcttttttggtactagtatggttaaagtcaacgcaatccgcagtgtagtagcggatatacttagccaagaaaccataactgggctgatattggttctgcaaaaccatgtaaccaatcaagccttgaaagccattgaacttttttctttcaaggtcgagatattccagataacggatctgctagtcaacataaccaaacattcactgaagccacaacatcaggtgttgaatgatgaagagaagacaacacttctcaagaagttcagcattgaggaaaaacagcttcctcggatttcaaagaaagatgctatcgtccggtactacggattagagaaagggcaagttgtgaaggtgaattacagaggcgaactcacggaatcgcatgttgccttccgatgtgtgtggtgaagaaaccaattaaaaaccatcttgtgtacttattttcaggaaaaaataacttgtatgtttct

SEQ ID NO: 102936 - protein, 227 aa, Arabidopsis thaliana
  peptide (1)..(227): Ceres Seq. ID no. 13611567
IRETKMEVKGKETASVLCLSKYVDLSSEESHRYYLARRNGLQMLRDRGYEVSDEDINLSLHDFRTVYGERPDVDRLRISALHRSDSTKKVKIVFFGTSMVKVNAIRSVVADILSQETITGLILVLQNHVTNQALKAIELFSFKVEIFQITDLLVNITKHSLKPQHQVLNDEEKTTLLKKFSIEEKQLPRISKKDAIVRYYGLEKGQVVKVNYRGELTESHVAFRCVW

SEQ ID NO: 102937 - protein, 222 aa, Arabidopsis thaliana; identical to SEQ ID NO: 28138
  peptide (1)..(222): Ceres Seq. ID no. 13611568

SEQ ID NO: 102938 - protein, 185 aa, Arabidopsis thaliana; identical to SEQ ID NO: 28139
  peptide (1)..(185): Ceres Seq. ID no. 13611569

SEQ ID NO: 102939 - DNA, 1136 bp, Arabidopsis thaliana
  misc_feature (1)..(1136): Ceres Seq. ID no. 13611574
  misc_feature (1)..(1136): Ortholog of  Ceres SEQ ID NO 15171279 as cited in SEQ ID NO 51378
  misc_feature (1)..(1136): Ortholog of  Ceres SEQ ID NO 13596816 as cited in SEQ ID NO 62287
atgtgtaatggatccagtttcttagcctcattaccactgttattgcttcttctcagcttcatattggcttccttcttcgacacggcagtgtgctacgggagaaatggaaacaacctgcgacccgcgtccgaagtcgtggcgctttaccaacaacggaacatccggcggatgcggctgtacgatcccaaccaggagactctcaacgctctccgcggctccaatatcgagctcgtgctcgatgttccaaaccctgatctccagcgtctcgcctccagccaagcggaagccgacacatgggtccgcaacaacgtccgcaactatgcaaacgtcacatttcgctacatctctgtcgggaacgaggtacagccctcagaccaagctgcgagctttgtcctccccgcgatgcagaacatagagagagcagtttcaagcctcgggatcaaggtctcgacggctatagacaccagaggcatttccgggtttccgccgtcaagtgggacgttcacaccggagtttaggagctttatcgcaccggtgataagtttcttgtcaagcaagcaatctcctctgctcgtgaataattacccttacttcagctacacgggaaacatgcgagacatccggttagactacactctgttcaccgcaccgtcaactgtagtcaatgacggacaaaaccaatatcgaaacctattccacgcaatcttagacactgtttacgcatcattagagaaagctggaggtggttcgttggagatcgtggtgtccgagagtggttggccgacagcgggaggagcagcgacgggtgtggataatgcgagaacttatgtgaacaatttgatacaaactgtgaaaaatggatctccgaggagaccagggagagctacagagacttatatatttgctatgttcgatgagaattcgaagcagggtcccgagactgagaagttttggggactgtttcttccaaatctacagcctaagtatgttgtcaatttcaactaatatccttgaagacacttcacgataaagcgatatgagataaatgacttgtatcgtaaaagtttcctaagagtatgggagcttattgtaatagtaaggaatagactaatgagaccagaaaaataagaaaagcc

SEQ ID NO: 102940 - protein, 334 aa, Arabidopsis thaliana
  peptide (1)..(334): Ceres Seq. ID no. 13611575
MCNGSSFLASLPLLLLLLSFILASFFDTAVCYGRNGNNLRPASEVVALYQQRNIRRMRLYDPNQETLNALRGSNIELVLDVPNPDLQRLASSQAEADTWVRNNVRNYANVTFRYISVGNEVQPSDQAASFVLPAMQNIERAVSSLGIKVSTAIDTRGISGFPPSSGTFTPEFRSFIAPVISFLSSKQSPLLVNNYPYFSYTGNMRDIRLDYTLFTAPSTVVNDGQNQYRNLFHAILDTVYASLEKAGGGSLEIVVSESGWPTAGGAATGVDNARTYVNNLIQTVKNGSPRRPGRATETYIFAMFDENSKQGPETEKFWGLFLPNLQPKYVVNFN

SEQ ID NO: 102941 - protein, 278 aa, Arabidopsis thaliana; identical to SEQ ID NO: 72448
  peptide (1)..(278): Ceres Seq. ID no. 13611576

SEQ ID NO: 102942 - protein, 200 aa, Arabidopsis thaliana; identical to SEQ ID NO: 72449
  peptide (1)..(200): Ceres Seq. ID no. 13611577

SEQ ID NO: 102943 - DNA, 1193 bp, Arabidopsis thaliana
  misc_feature (1)..(1193): Ceres Seq. ID no. 13611578
  misc_feature (1)..(1193): Ortholog of  Ceres SEQ ID NO 15171279 as cited in SEQ ID NO 51378
  misc_feature (1)..(1193): Ortholog of  Ceres SEQ ID NO 13596816 as cited in SEQ ID NO 62287
gtcataacagtaaatgatttccacctcgctcttaattttctacaaatcatctctttcttcacctaacgacgatggatctccgattcttggcgtccttgacccttcttctcggtctattcttcgtcaatacaaatccaacaggtggacaagtcggcgtttgctatggaagaaacggcaacaacctcccttcaccagcagaaaccattgcgctcttcaaacagaaaaacatccaacgagttaggctatacagtccggaccacgacgttctagccgccctacgtggctccaacatcgaggtaacgctgggtcttcccaactcttacctacagagcgtggcctcgagccaatcacaagctaacgcgtgggtacaaacctacgtcatgaactacgcgaatggcgtcaggttccgttacatatctgttgggaatgaagttaaaatctccgactcttacgcacagttcctagtccctgccatggaaaacattgaccgggcggttttagcagccggactcggtggtcgtatcaaggtatccacatcggtagacatgggagtgctccgagagtcttatccaccatcgaaaggttcgtttaggggagatgttatggtggtaatggaaccaatcatacgtttcttggtaagcaagaactctcctttactcttaaacctctacacttacttcagctacgcgggcaatgtaggccaaatccggctcgattacgctctcttcacggctccttcaggaatcgtttcggaccctcctagatcttaccaaaacctatttgatgcgatgctcgatgcgatgtactcggctctagagaaatcgggtggcgcatcattggaaatagttgtggcggagactggatggccaacgggaggaggaaccgatacaaacatagagaatgcgagaatttataacaataatttgattaagcatgtgaagaatgggacaccgaagagaccagggaaagaaatcgagacatatttatttgccatttatgacgagaatcaaaagccgactcctccttatgttgagaagttttggggattgttctatcccaacaagcagcctaagtatgatattaacttttattgagccgaaccaatattctatcaagggaatggtatatttatatttgaaaactaatatagatattggtactatcattcattatacaataaataaagtttgagg

SEQ ID NO: 102944 - protein, 340 aa, Arabidopsis thaliana
  peptide (1)..(340): Ceres Seq. ID no. 13611579
MDLRFLASLTLLLGLFFVNTNPTGGQVGVCYGRNGNNLPSPAETIALFKQKNIQRVRLYSPDHDVLAALRGSNIEVTLGLPNSYLQSVASSQSQANAWVQTYVMNYANGVRFRYISVGNEVKISDSYAQFLVPAMENIDRAVLAAGLGGRIKVSTSVDMGVLRESYPPSKGSFRGDVMVVMEPIIRFLVSKNSPLLLNLYTYFSYAGNVGQIRLDYALFTAPSGIVSDPPRSYQNLFDAMLDAMYSALEKSGGASLEIVVAETGWPTGGGTDTNIENARIYNNNLIKHVKNGTPKRPGKEIETYLFAIYDENQKPTPPYVEKFWGLFYPNKQPKYDINFY

SEQ ID NO: 102945 - protein, 237 aa, Arabidopsis thaliana
  peptide (1)..(237): Ceres Seq. ID no. 13611580
MNYANGVRFRYISVGNEVKISDSYAQFLVPAMENIDRAVLAAGLGGRIKVSTSVDMGVLRESYPPSKGSFRGDVMVVMEPIIRFLVSKNSPLLLNLYTYFSYAGNVGQIRLDYALFTAPSGIVSDPPRSYQNLFDAMLDAMYSALEKSGGASLEIVVAETGWPTGGGTDTNIENARIYNNNLIKHVKNGTPKRPGKEIETYLFAIYDENQKPTPPYVEKFWGLFYPNKQPKYDINFY

SEQ ID NO: 102946 - protein, 206 aa, Arabidopsis thaliana
  peptide (1)..(206): Ceres Seq. ID no. 13611581
MENIDRAVLAAGLGGRIKVSTSVDMGVLRESYPPSKGSFRGDVMVVMEPIIRFLVSKNSPLLLNLYTYFSYAGNVGQIRLDYALFTAPSGIVSDPPRSYQNLFDAMLDAMYSALEKSGGASLEIVVAETGWPTGGGTDTNIENARIYNNNLIKHVKNGTPKRPGKEIETYLFAIYDENQKPTPPYVEKFWGLFYPNKQPKYDINFY

SEQ ID NO: 102947 - DNA, 943 bp, Arabidopsis thaliana
  misc_feature (1)..(943): Ceres Seq. ID no. 13611582
  misc_feature (1)..(943): Ortholog of  Ceres SEQ ID NO 14301727 as cited in SEQ ID NO 61209
aaccactccatctctcgtgctgaccacgctccgattctccatttctttcccttttgacttttcacttccaatttttcggtatcagatctggacgatggcttcacaaatctctcagcttgcttgtttctcatccaccaatcgccaatttcacttccaaagccgatcgtttccatgccctatgattcgtccccagtcttttgtagttaaaagtgttgatgggaatagctctgaaacaccagcttctctaagctatacagctgaggtttcaaaacctgttgttgagaaaacatccaaaccgtattccactgttgatgaaactgctaccaataaagagagcatcacagagccagtagaggaagatgttgccacacaaccaataagagcagcaaagatccacgacttctgtttcggcattccttatggtggtctcgttgtgagtggagggcttcttggttttgcgttttcacgaaatcttacaagtttaagtactggtgtcctctatggtggtggccttctagcccttagtacactgagcttaaagatttggcgagagggaaaatctagtttcccttatatactaggacaagcagtgctttcagctgtcgtcttctggaagaacttcacagcttattcgatgactaagaagctgtttccggccggggtttttgctgtcatcagtgcttgcatgttgtgtttctattcatatgtggtgctctctggaggaaacccacctccaaagaaattgaaaccatctgcgactagtccttcatactgaagggactttacataggtttagatttaaaaaagtggagatcttctctcttttgataactctggtctgttggattactggtgtaattttatactctttacgaattgatacacttggttttgtttgtgacctgttctttccagtgtcataatctaaagttttgattttctt

SEQ ID NO: 102948 - protein, 257 aa, Arabidopsis thaliana; identical to SEQ ID NO: 29559
  peptide (1)..(257): Ceres Seq. ID no. 13611583

SEQ ID NO: 102949 - protein, 226 aa, Arabidopsis thaliana; identical to SEQ ID NO: 29560
  peptide (1)..(226): Ceres Seq. ID no. 13611584

SEQ ID NO: 102950 - protein, 198 aa, Arabidopsis thaliana; identical to SEQ ID NO: 29561
  peptide (1)..(198): Ceres Seq. ID no. 13611585

SEQ ID NO: 102951 - DNA, 1152 bp, Arabidopsis thaliana
  misc_feature (1)..(1152): Ceres Seq. ID no. 13611590
  misc_feature (1)..(1152): Ortholog of  Ceres SEQ ID NO 15169703 as cited in SEQ ID NO 59628
agcccctttcccaatatttgatcaatttctaaagaaaaccccttcctctactagtcctcctcctatatatacaaaatcttaagaaatctctctacttgtttcctctgttatcataatctcttctctctatatctcttctcttcttcttttaccctgttttttttttcattccacagagcccaggttgattgattttgttattcagagatatggggagaggaaggattgagattaagaagattgagaatatcaacagtcgtcaagtcactttctctaagagacgaaacggtttgatcaagaaggctaaagagctttcgattctctgtgacgccgaggttgctcttatcatcttctccagcaccggcaagatttacgatttctccagcgtctgtatggagcaaattctttctagatatggatacactactgcgtccactgagcataaacaacaaagagaacaccaacttctaatttgtgcttcacatggaaatgaagctgtgttgcgaaatgatgattctatgaagggggaacttgaaagattacagcttgcaattgagagacttaagggtaaggagcttgaaggtatgagtttcccggatcttatttctcttgaaaaccagttgaacgagagcttgcatagtgtcaaggatcaaaagacacaaatcctgctcaaccagattgagagatccaggatacaggagaaaaaagcattggaagaaaaccaaatcttgcgcaaacaggttgagatgttggggagaggttcaggaccaaaagtgttgaatgaaaggcctcaagattctagcccagaagccgatcccgagagctcttcatcagaagaggatgagaatgacaacgaggagcaccattccgacacttccttgcagttggggttgtcgtcgacggggtattgcacaaagagaaagaagccgaagatcgaactggtctgcgataactctgggagtcaagtggcttctgattgatggaatcgattatttttctaattctggttgtttaggggtctctatgtgtcttcttgtttctggctgttcttttgctttatttcatctcaagtagagttttcttaatgtttaggtggaacatttttccataatcaagaagggatttgatcaatcaataacattagattttctt

SEQ ID NO: 102952 - protein, 256 aa, Arabidopsis thaliana
  peptide (1)..(256): Ceres Seq. ID no. 13611591
MGRGRIEIKKIENINSRQVTFSKRRNGLIKKAKELSILCDAEVALIIFSSTGKIYDFSSVCMEQILSRYGYTTASTEHKQQREHQLLICASHGNEAVLRNDDSMKGELERLQLAIERLKGKELEGMSFPDLISLENQLNESLHSVKDQKTQILLNQIERSRIQEKKALEENQILRKQVEMLGRGSGPKVLNERPQDSSPEADPESSSSEEDENDNEEHHSDTSLQLGLSSTGYCTKRKKPKIELVCDNSGSQVASD

SEQ ID NO: 102953 - protein, 195 aa, Arabidopsis thaliana
  peptide (1)..(195): Ceres Seq. ID no. 13611592
MEQILSRYGYTTASTEHKQQREHQLLICASHGNEAVLRNDDSMKGELERLQLAIERLKGKELEGMSFPDLISLENQLNESLHSVKDQKTQILLNQIERSRIQEKKALEENQILRKQVEMLGRGSGPKVLNERPQDSSPEADPESSSSEEDENDNEEHHSDTSLQLGLSSTGYCTKRKKPKIELVCDNSGSQVASD

SEQ ID NO: 102954 - protein, 153 aa, Arabidopsis thaliana
  peptide (1)..(153): Ceres Seq. ID no. 13611593
MKGELERLQLAIERLKGKELEGMSFPDLISLENQLNESLHSVKDQKTQILLNQIERSRIQEKKALEENQILRKQVEMLGRGSGPKVLNERPQDSSPEADPESSSSEEDENDNEEHHSDTSLQLGLSSTGYCTKRKKPKIELVCDNSGSQVASD

SEQ ID NO: 102955 - DNA, 2841 bp, Arabidopsis thaliana
  misc_feature (1)..(2841): Ceres Seq. ID no. 13611594
  misc_feature (1)..(2841): Ortholog of  Ceres SEQ ID NO 12586556 as cited in SEQ ID NO 64667
  misc_feature (1)..(2841): Ortholog of  Ceres SEQ ID NO 13660894 as cited in SEQ ID NO 67475
actgatacagtttaacagaaatctccacgaacctcgatttcataagcaaataaagatattttcggagaaatatcttaatgtcatgtcctcttgccttcaccttctctctcccgtctattttcccctttccttctcaactgcttccattttcccgccataaacatccttatcttcttcgcgccacaccaacctctgcaaccgaagatgttgcctccgccgtttctggcgcaccttcaatatttatctctcaatcacgctctccggagtggtggattgacttgctccggtccaaagttcgatctaatttgctccgtgaagctgttttgacttacgttgacatgattgttttgggtataaaacccgataattatgcgttccctgctttgctaaaggctgtagcagatcttcaggacatggaactggggaaacagattcatgcccatgtgtataaatttgggtacggtgtggattccgtgactgtggctaatacccttgtgaatttgtatagaaagtgtggagatttcggagctgtctataaggtgttcgatagaatatctgagagaaaccaagtctcttggaattctttaatttcttctttgtgtagttttgagaagtgggaaatggcgttagaggcatttcggtgtatgttggatgaaaatgtggaacctagttcgtttaccttggtgagtgtggttactgcttgttcgaatttgcctatgcctgagggattaatgatgggtaagcaggttcacgcctatggtttgagaaagggtgaattgaattcgtttataatcaacacattggtggctatgtatggtaaactgggaaaattagcatcttctaaagtcttacttggttcttttggaggccgtgacttggtcacatggaacactgtgttgagctcgttatgtcagaacgagcagttgcttgaagcattggaatatttgcgtgaaatggtgcttgaaggtgttgaaccagatgagttcactatttcaagtgttcttcctgcttgttcacacttggagatgcttcgcacagggaaagaattgcatgcttatgctttgaaaaatggctctttggatgagaattcctttgttggtagtgctttggttgacatgtattgcaattgcaagcaagtgttgagtggtcgtcgagtatttgatggaatgtttgatagaaagattggtctgtggaatgctatgatcgctgggtattcccagaatgagcatgacaaggaagcgttgttgcttttcattggaatggaagaaagtgctgggcttctggctaactctaccacaatggcaggtgttgttcctgcttgtgtccgttctggtgcgttctctagaaaggaagctatccatggatttgttgtgaagagaggtttagatagagacaggtttgtgcagaatacactgatggatatgtattctaggctgggaaagatcgatatcgccatgcggatattcggtaaaatggaagatagagatttagttacgtggaacacgatgattacgggttatgtattctcagaacaccatgaggacgcacttctcctgctacacaagatgcaaaaccttgaaagaaaagtgagcaagggggctagccgagttagtcttaaacctaattccatcactctgatgacaatccttcccagttgtgctgcactatcagcattagcaaaaggaaaagaaattcatgcttatgccatcaagaacaatttggcaactgatgtggctgtcggaagcgctttagttgacatgtacgcaaaatgcgggtgcctacagatgtcgagaaaagtgtttgatcagattccacaaaaaaatgttattacttggaatgtgattataatggcttacgggatgcatggaaacggtcaagaagccatagatctgctaagaatgatgatggttcagggagtaaaaccaaacgaggttacattcatctcagtatttgcagcttgtagccactcaggcatggtggatgaaggattaaggatattctatgttatgaaacccgactacggggttgaaccaagctcagatcattatgcttgtgttgtagatttgcttggaagggctggtagaattaaagaagcatatcaactcatgaatatgatgcctcgtgatttcaacaaagctggagcatggagtagcctccttggtgccagtcggattcacaataacctagaaattggagaaattgctgctcaaaatctcattcaactggaaccaaatgtagctagtcactatgtgttacttgccaatatttattcatcagcaggcctctgggataaagcaacagaggtaagaagaaatatgaaagagcaaggcgtgagaaaagaacctggatgtagctggattgagcatggcgatgaagtacataaatttgtagccggtgactcatctcacccgcaaagcgaaaagctcagtggatatctcgagacattgtgggagagaatgagaaaagaaggatatgtacctgacacatcttgtgtactccacaatgtagaggaagatgaaaaagagattctgctttgtggacacagtgagaagctagcaattgcgtttgggatacttaacacatcacccggtacaattattagggtggctaaaaacctcagggtttgtaatgattgtcatcttgcaaccaagtttatctcaaagattgttgatagagaaatcatcttgagagatgttaggaggtttcatcgtttcaagaatggaacttgctcctgtggagactattggtgaaagataagctccataaaactctcttttttcttcattgtatatcttgtaagtgttgattcttgtataagttatacagtataacacacagttg

SEQ ID NO: 102956 - protein, 890 aa, Arabidopsis thaliana
  peptide (1)..(890): Ceres Seq. ID no. 13611595
MSCPLAFTFSLPSIFPFPSQLLPFSRHKHPYLLRATPTSATEDVASAVSGAPSIFISQSRSPEWWIDLLRSKVRSNLLREAVLTYVDMIVLGIKPDNYAFPALLKAVADLQDMELGKQIHAHVYKFGYGVDSVTVANTLVNLYRKCGDFGAVYKVFDRISERNQVSWNSLISSLCSFEKWEMALEAFRCMLDENVEPSSFTLVSVVTACSNLPMPEGLMMGKQVHAYGLRKGELNSFIINTLVAMYGKLGKLASSKVLLGSFGGRDLVTWNTVLSSLCQNEQLLEALEYLREMVLEGVEPDEFTISSVLPACSHLEMLRTGKELHAYALKNGSLDENSFVGSALVDMYCNCKQVLSGRRVFDGMFDRKIGLWNAMIAGYSQNEHDKEALLLFIGMEESAGLLANSTTMAGVVPACVRSGAFSRKEAIHGFVVKRGLDRDRFVQNTLMDMYSRLGKIDIAMRIFGKMEDRDLVTWNTMITGYVFSEHHEDALLLLHKMQNLERKVSKGASRVSLKPNSITLMTILPSCAALSALAKGKEIHAYAIKNNLATDVAVGSALVDMYAKCGCLQMSRKVFDQIPQKNVITWNVIIMAYGMHGNGQEAIDLLRMMMVQGVKPNEVTFISVFAACSHSGMVDEGLRIFYVMKPDYGVEPSSDHYACVVDLLGRAGRIKEAYQLMNMMPRDFNKAGAWSSLLGASRIHNNLEIGEIAAQNLIQLEPNVASHYVLLANIYSSAGLWDKATEVRRNMKEQGVRKEPGCSWIEHGDEVHKFVAGDSSHPQSEKLSGYLETLWERMRKEGYVPDTSCVLHNVEEDEKEILLCGHSEKLAIAFGILNTSPGTIIRVAKNLRVCNDCHLATKFISKIVDREIILRDVRRFHRFKNGTCSCGDYW

SEQ ID NO: 102957 - protein, 803 aa, Arabidopsis thaliana; identical to SEQ ID NO: 72444
  peptide (1)..(803): Ceres Seq. ID no. 13611596

SEQ ID NO: 102958 - protein, 778 aa, Arabidopsis thaliana; identical to SEQ ID NO: 72445
  peptide (1)..(778): Ceres Seq. ID no. 13611597

SEQ ID NO: 102959 - DNA, 1973 bp, Arabidopsis thaliana
  misc_feature (1)..(1973): Ceres Seq. ID no. 13611598
  misc_feature (1)..(1973): Ortholog of  Ceres SEQ ID NO 13501807 as cited in SEQ ID NO 67558
aggcaaaaaacaatggcatcatcatcatcatcacatttgttttgacgctccaagaaaatttgcatggcgacacattctatgatcattccttctccttcttcttcttcctcgtctctcgctactgctgcgtctccgtttaaagagactctaccactctttagtagatctctcacattcccgagaaaatccttgttttctcaggttcgcttgagattcttcgccgagaaacattctcagcttgatacttcaaatgggtgtgccactaatttcgcttctttacaagattctggagatcaacttacagaggaacatgttacaaaaggagagtctactcttagtattacagttgttggagcgtcaggggacttagccaagaagaagatatttcctgcattgtttgctctcttttatgagggttgtcttcctcaggacttttctgtttttggttatgctcggactaaactcactcatgaagagcttcgtgacatgattagtagtactttaacttgccggattgatcagagggaaaaatgtggggataagatggagcagttcttgaaaagatgcttttaccattcgggtcagtataactcggaagaggattttgcggaactaaacaagaagctcaaagagaaagaggcaggaaagatatcaaacaggctgtactatttgtcgatacccccaaacatattcgttgatgtggttaggtgtgcaagtcttagagcctcctcagagaatggctggacaagggtcattgtggaaaagccatttggtcgtgactctgaatcatccggagagttaactagatgtctgaaacagtatcttacagaggagcaaatcttcaggattgatcactatttgggaaaggagcttgttgagaacctttcagtgctccgattctcaaatcttgttttcgagcctctgtggtcaagaaattacatacgcaacgttcagctgattttttctgaggatttcggaacagaagggcgtggaggttactttgatcaatatggaatcatacgagacatcatgcaaaaccatctcttgcaaatacttgcactttttgcaatggagacgccagtgagcttagatgctgaggacataagaagtgaaaaggtgaaagttttgagatcaatgaaaccgttgcggcttgaagatgtggttgttggtcaatacaaaggccataacaagggaggaaaaacttatccaggttatacagacgatccaacggttccaaatcacagtctcactcctacatttgctgcagcagccatgttcatcaacaatgcgagatgggacggtgttccttttcttatgaaagctggaaaagctctccataccagaggagcagagatcagagttcagttcagacatgtcccaggaaacttgtacaagaaaagttttgctactaatttagacaatgcaacaaatgaactagtgattagagttcagcctgatgaagggatatacctgaggatcaacaacaaagttcctggtcttggaatgagactagatcgcagcgaccttaaccttctatatcgatccaggtatccaagagagataccagatgcatatgaaagactgcttctcgatgcaatcgaaggagagaggaggttgtttatcagaagtgatgagctagatgcagcatgggatctattcacaccggctttgaaggaactagaggagaagaaaatcattcctgagctctatccatatggaagcagaggtcctgttggtgcacattaccttgcatctaagtacaatgtgagatggggagatcttggagaagcttaagctttcgacagaaacaatatgatttggtgttaatatgagtaaactaacttgtcgatattatcaatgcgtagataaatccttgttaccaaaacttgctttttctctgacattttttgattgtttttggttctaaatcgagcatttcggaggaatgtaccaaaactcttgcaggaatagac

SEQ ID NO: 102960 - protein, 576 aa, Arabidopsis thaliana; identical to SEQ ID NO: 35335
  peptide (1)..(576): Ceres Seq. ID no. 13611599

SEQ ID NO: 102961 - protein, 571 aa, Arabidopsis thaliana; identical to SEQ ID NO: 35336
  peptide (1)..(571): Ceres Seq. ID no. 13611600

SEQ ID NO: 102962 - protein, 435 aa, Arabidopsis thaliana; identical to SEQ ID NO: 35337
  peptide (1)..(435): Ceres Seq. ID no. 13611601

SEQ ID NO: 102963 - DNA, 1735 bp, Arabidopsis thaliana
  misc_feature (1)..(1735): Ceres Seq. ID no. 13611606
  misc_feature (1)..(1735): Ortholog of  Ceres SEQ ID NO 15174599 as cited in SEQ ID NO 53646
  misc_feature (1)..(1735): Ortholog of  Ceres SEQ ID NO 15174646 as cited in SEQ ID NO 54499
acgtgactcaataaaatcaagtcttttgtttccttttatccaaaaaaaaaaaaaagtcttgtgtttctcttaggttggttgagaatcatttcatttcaatggaatccaattgtgttcaatttctcggtaacaagaccattctcatcacaggagctcctggttttcttgccaaggttttggtagagaaaatactaaggttgcaaccaaatgtgaagaagatataccttctgttgagagctcccgacgaaaaatcagccatgcaacgcctacgtagtgaggttatggagatcgacctttttaaagtgttgaggaacaatctaggagaagacaatttgaatgccttgatgcgggaaaaaattgtgccggttccaggtgatatatcgatcgataatttgggattgaaagacactgatctcatacaacgtatgtggagtgagattgatatcataatcaacatagcagccacaacaaatttcgatgaaagatatgatattggtcttggcatcaacacatttggagccctgaatgttctcaacttcgccaaaaagtgtgttaaaggacaattgcttctccatgtctcaaccgcgtatataagcggtgaacaacctggattgttactagagaaaccattcaagatgggggagactctcagcggggatcgggaactagacatcaatatagaacatgatctaatgaaacaaaaattgaaagagcttcaagattgttctgatgaagagatctcgcaaacaatgaaagattttggaatggcaagggcaaagcttcatggatggccaaatacatatgtattcaccaaagcaatgggagagatgctaatgggaaaatacagagaaaatttgccacttgttatcatacgtccaacaatgattactagtactattgccgaaccattccccggttggattgaagggttgaaaacattagacagtgtgattgttgcatatggtaaaggaaggcttaaatgttttcttgcggattcaaactcagtctttgaccttataccggcagacatggtagtaaatgcgatggttgcagccgcgacagctcattcgggagacaccgggattcaggcaatatatcatgttggttcgtcttgtaagaatccagtcacgtttggacaacttcacgatttcacggctcgttacttcgctaaacgtcctttgattggtcggaatggctcgccaatcatagtggtcaaaggaaccattctgtccactatggctcaattcagcctctacatgacccttcgttacaagcttcctctacagatacttcgattgatcaatatagtttatccatggagtcacggagataactacagtgacctaagccgcaaaatcaagctagctatgcgactagttgagctttaccagccttacttactcttcaagggcatatttgatgatttaaataccgaaagactgcgaatgaaaagaaaggagaatatcaaagagttagatggatcgttcgagttcgatcccaagtccattgattgggacaattatatcacaaacacccacattcctggcctcatcacccatgtgcttaaacaataaattatgctggtaatatgtttggaactattgtgaatctcgtgtgtaatattattaaagaatacgattatatcattctaatcttgtaatttacagtttgtgttggcgtgtaatatcaaaataaataaaaaaaacttattccacaatggataagactttgaatc

SEQ ID NO: 102964 - protein, 491 aa, Arabidopsis thaliana; identical to SEQ ID NO: 76486
  peptide (1)..(491): Ceres Seq. ID no. 13611607

SEQ ID NO: 102965 - protein, 438 aa, Arabidopsis thaliana; identical to SEQ ID NO: 76487
  peptide (1)..(438): Ceres Seq. ID no. 13611608

SEQ ID NO: 102966 - protein, 430 aa, Arabidopsis thaliana
  peptide (1)..(430): Ceres Seq. ID no. 13611609
MEIDLFKVLRNNLGEDNLNALMREKIVPVPGDISIDNLGLKDTDLIQRMWSEIDIIINIAATTNFDERYDIGLGINTFGALNVLNFAKKCVKGQLLLHVSTAYISGEQPGLLLEKPFKMGETLSGDRELDINIEHDLMKQKLKELQDCSDEEISQTMKDFGMARAKLHGWPNTYVFTKAMGEMLMGKYRENLPLVIIRPTMITSTIAEPFPGWIEGLKTLDSVIVAYGKGRLKCFLADSNSVFDLIPADMVVNAMVAAATAHSGDTGIQAIYHVGSSCKNPVTFGQLHDFTARYFAKRPLIGRNGSPIIVVKGTILSTMAQFSLYMTLRYKLPLQILRLINIVYPWSHGDNYSDLSRKIKLAMRLVELYQPYLLFKGIFDDLNTERLRMKRKENIKELDGSFEFDPKSIDWDNYITNTHIPGLITHVLKQ

SEQ ID NO: 102967 - DNA, 1206 bp, Arabidopsis thaliana
  misc_feature (1)..(1206): Ceres Seq. ID no. 13611610
  misc_feature (1)..(1206): Ortholog of  Ceres SEQ ID NO 14304057 as cited in SEQ ID NO 53782
ccggcgaagagtttcggagaacaagtttggtctttttaggggtttgagcagtggagtcggtaaccatgttatgcggaggctctcgcgcctccgtgcatttgtgggaccatcgtcatcctcctaggctcggtgctaaggttttgcggaaatcttcgttcatgctcagaccttgttcggctatatcgcagcagcggataaagtcgtcgtttaggtctcactgtaaaactccaagaaaaatcccagctcctctcgattgtttcagccagggagatgatcatcctgagctttcagctgaagggctttccccagttgcaggaggcattgttgctctagggaagtttgatgccctgcatatcggtcatcgagagcttgcaattcaagctgcaagaattggtactccgtatctactgtcgtttgttggattggctgaagtacttggttggaagcctagagcaccaatagtagccaaatgcgacagaaaacgagtgctttcctcttgggcatcgtattgtggtaacatagcaccggtagagtttgagattgaatttgccagcgttcgacaccttaacccacaacagtttgtcgagaagttgtcaagagagcttagagtctgcggagttgtggcaggcgaaaattacaggtttggataccgggcttctggtgacgcctctgaacttgtgaggttatgcaaagactttggtatcagcgcttacatcattaactccgtgatggataagaaccaagtctctgtaaacacagaggaggaggactcaaagtcgaaagaaagaggtcaagtctcatccacacgagtccgtcatgctctagctgcaggagatgtgaggtatgtaacagagctcctcggcagaccacacagggtcatctctcggacaagaacacaagatttaacgagcaaaagagggaggatctcgcttcagacatcttcgctactaaatttaccaccagggaatggagtttacaaagcatgctcgcttatagttggtgataagcatccaatttcgtgtaaggttattgtcgatacatcgaatctctatatagaaacagaggaagaacgtttccacaactcagatgagtctcaagagtttcaactcttagggattgagttcggttaattcacacattgataatcaaaagaataacatttccatttcaagataacgattaacaaagatgttaactttgactcca

SEQ ID NO: 102968 - protein, 354 aa, Arabidopsis thaliana
  peptide (1)..(354): Ceres Seq. ID no. 13611611
MLCGGSRASVHLWDHRHPPRLGAKVLRKSSFMLRPCSAISQQRIKSSFRSHCKTPRKIPAPLDCFSQGDDHPELSAEGLSPVAGGIVALGKFDALHIGHRELAIQAARIGTPYLLSFVGLAEVLGWKPRAPIVAKCDRKRVLSSWASYCGNIAPVEFEIEFASVRHLNPQQFVEKLSRELRVCGVVAGENYRFGYRASGDASELVRLCKDFGISAYIINSVMDKNQVSVNTEEEDSKSKERGQVSSTRVRHALAAGDVRYVTELLGRPHRVISRTRTQDLTSKRGRISLQTSSLLNLPPGNGVYKACSLIVGDKHPISCKVIVDTSNLYIETEEERFHNSDESQEFQLLGIEFG

SEQ ID NO: 102969 - protein, 323 aa, Arabidopsis thaliana
  peptide (1)..(323): Ceres Seq. ID no. 13611612
MLRPCSAISQQRIKSSFRSHCKTPRKIPAPLDCFSQGDDHPELSAEGLSPVAGGIVALGKFDALHIGHRELAIQAARIGTPYLLSFVGLAEVLGWKPRAPIVAKCDRKRVLSSWASYCGNIAPVEFEIEFASVRHLNPQQFVEKLSRELRVCGVVAGENYRFGYRASGDASELVRLCKDFGISAYIINSVMDKNQVSVNTEEEDSKSKERGQVSSTRVRHALAAGDVRYVTELLGRPHRVISRTRTQDLTSKRGRISLQTSSLLNLPPGNGVYKACSLIVGDKHPISCKVIVDTSNLYIETEEERFHNSDESQEFQLLGIEFG

SEQ ID NO: 102970 - DNA, 1355 bp, Arabidopsis thaliana
  misc_feature (1)..(1355): Ceres Seq. ID no. 13611620
  misc_feature (1)..(1355): Ortholog of  Ceres SEQ ID NO 14303116 as cited in SEQ ID NO 57665
gctcagaaacatttctgtctctgtggagacagctgaagaagcagcagcactatcaatggcgtctctgagattgttctcaacgaatcatcaatctcttctccttccatcatctctctcacaaaagactctaatatcttcaccaagattcgtcaataaccctagcagacggagtccaatacgatccgttcttcaatttaatcgcaaaccggaactcgccggagaaacgccgcgtatcgtcgttatcacctccggaaaaggcggtgttggaaagacgacaaccaccgcaaatgtcggtctctctctcgctcgttacggtttctcagttgtcgccattgacgccgaccttggtctccgtaacctcgatctcctcctagggttagagaatcgagtcaattacacttgcgtcgaggttataaacggagattgtcgtctcgatcaagctctggtacgtgataagcgttggtcgaatttcgaattgctatgtatatctaaacctagatcgaaacttccgatgggatttggtggtaaagcattggaatggcttgtggatgcgttgaaaactagaccggaaggttcaccggatttcatcatcatcgattgtcctgcaggaatcgatgccggattcataaccgccattactccggcgaatgaagcagttctggtaacaactccggatataacagcgttaagggatgctgatagggttacgggtttgttagaatgcgatggaatcagagatataaagatgattgtgaacagagtgagaactgatatgattaaaggagaggatatgatgtcagtgttagatgtgcaggagatgttgggattgtcattgcttggtgtaattcctgaagattctgaggttattcgaagcacgaatcgagggtttccgcttgttctgaataagcctcctacgcttgcgggattggcgtttgagcaggcggcttggagactcgttgagcaagatagtatgaaggctgttatggtggaggaagaacctaagaaacgtggcttcttctctttctttggcggctaaatggcaaacggatcgaaccgaaccgaacggtactgaactgaactgaaacttcttcctcgggtatgtatgcattgaaatcttttgtacaggagctagagatttttgaagattttgtctcttttgctttgagaatttagatttgttcctaggacaatgtggaattctactgctagtttgttgctgagttcaagctctgattcttatgccttttgttcttgaggttcttgatttctgtttctgtaatctgtttatgttaaaattgagagtttccaatatatctcaagttcttatgtcaaatcgttatgatgagaacttcaat

SEQ ID NO: 102971 - protein, 344 aa, Arabidopsis thaliana
  peptide (1)..(344): Ceres Seq. ID no. 13611621
LRNISVSVETAEEAAALSMASLRLFSTNHQSLLLPSSLSQKTLISSPRFVNNPSRRSPIRSVLQFNRKPELAGETPRIVVITSGKGGVGKTTTTANVGLSLARYGFSVVAIDADLGLRNLDLLLGLENRVNYTCVEVINGDCRLDQALVRDKRWSNFELLCISKPRSKLPMGFGGKALEWLVDALKTRPEGSPDFIIIDCPAGIDAGFITAITPANEAVLVTTPDITALRDADRVTGLLECDGIRDIKMIVNRVRTDMIKGEDMMSVLDVQEMLGLSLLGVIPEDSEVIRSTNRGFPLVLNKPPTLAGLAFEQAAWRLVEQDSMKAVMVEEEPKKRGFFSFFGG

SEQ ID NO: 102972 - protein, 326 aa, Arabidopsis thaliana; identical to SEQ ID NO: 78172
  peptide (1)..(326): Ceres Seq. ID no. 13611622

SEQ ID NO: 102973 - protein, 174 aa, Arabidopsis thaliana; identical to SEQ ID NO: 25910
  peptide (1)..(174): Ceres Seq. ID no. 13611623

SEQ ID NO: 102974 - DNA, 1549 bp, Arabidopsis thaliana
  misc_feature (1)..(1549): Ceres Seq. ID no. 13611632
  misc_feature (1)..(1549): Ortholog of  Ceres SEQ ID NO 13663419 as cited in SEQ ID NO 66561
aatcagaatctgaaatacgaaatggcaaacaagtacgtttcctctgttctgaagtcgctgcttgtgcttcttcaccttgtattcttgagtaagcaacatgttgactctgcctcaatcgtcaagtctcttcctggttttgaaggtcaacttccctttgagcttgaaaccgggtatattggtgttggtgaggaagaggaagtgcaactattctactacttcatcaagtctgagaggaacccaaaagaagaccctcttattctctggctaactggaggacctggctgctctgccatctctggccttctttttgaaaatgggcctctaactatgaagcttgacgtttacaatggaactctcccttctttggtctctactacatattcttggacaaagacttcaagcataatattcttggatcagcctgttggaactggcttttcctattcaagaactcaacaatttaataaacctagtgattcaggagaagccaaacggatccatgagtttcttcaaaaatggctaggaaagcatcaagtgttttcctccaaccctttctatgttgccggagattcttattccggtttggttgttcccgctaccgttcaagaaatctcaaaaggaaattatgaatgctgcaatcctccaataaatcttcagggctatgtgctcggtaacccgttaacagactatacaactggtagtaacagccgcattccatttgcccatggaatggcactgatatctgatgaactctacgagtcgttgaagaaaacctgtaaaggagaatatacaaatgttcatccacgtaacacacaatgcttgaaattcgttgaagaatttaataagtgcacaaacagaatattccaacaacttatactagatccgttgtgcgaaactgaaactccagattgctatatttatcggtatttgctaactacctactgggccaatgacgcgactgtgcgcgaagctcttcaaatcaataaggagagtataggggaatgggtacgatgttattacagtattccttacaataatgacattaaaagtagcatgccttaccatgtgaataacagcatcagtggttatcgttctctcatctacagtggtgatcatgatttcgaagtaccttaccttggaactcaagcttggataagatctctcaactattcaattattgatgactggaggccatggatggtcaaaaatcaaatcgctggatacacaaggacttatgccaacaaaatgacatttgctactataaaaggaggtgggcacacagcagagagtaaaccagaggaagcctctatcatgtttcaaaggtggatcaatggccaacctctctaaaagaggggaggacctgcctttacgtataacggacaagaaaatatgattctagtaacacatccaaatatatatgagaacccttggccctataaatgaatagaatttaaactcataatttgtaagcaacatgtgtgttgcttttcaacaagcttggtgtacagttgcatttcaccttctttttttttcaacaagcttgttttct

SEQ ID NO: 102975 - protein, 448 aa, Arabidopsis thaliana
  peptide (1)..(448): Ceres Seq. ID no. 13611633
NQNLKYEMANKYVSSVLKSLLVLLHLVFLSKQHVDSASIVKSLPGFEGQLPFELETGYIGVGEEEEVQLFYYFIKSERNPKEDPLILWLTGGPGCSAISGLLFENGPLTMKLDVYNGTLPSLVSTTYSWTKTSSIIFLDQPVGTGFSYSRTQQFNKPSDSGEAKRIHEFLQKWLGKHQVFSSNPFYVAGDSYSGLVVPATVQEISKGNYECCNPPINLQGYVLGNPLTDYTTGSNSRIPFAHGMALISDELYESLKKTCKGEYTNVHPRNTQCLKFVEEFNKCTNRIFQQLILDPLCETETPDCYIYRYLLTTYWANDATVREALQINKESIGEWVRCYYSIPYNNDIKSSMPYHVNNSISGYRSLIYSGDHDFEVPYLGTQAWIRSLNYSIIDDWRPWMVKNQIAGYTRTYANKMTFATIKGGGHTAESKPEEASIMFQRWINGQPL

SEQ ID NO: 102976 - protein, 441 aa, Arabidopsis thaliana
  peptide (1)..(441): Ceres Seq. ID no. 13611634
MANKYVSSVLKSLLVLLHLVFLSKQHVDSASIVKSLPGFEGQLPFELETGYIGVGEEEEVQLFYYFIKSERNPKEDPLILWLTGGPGCSAISGLLFENGPLTMKLDVYNGTLPSLVSTTYSWTKTSSIIFLDQPVGTGFSYSRTQQFNKPSDSGEAKRIHEFLQKWLGKHQVFSSNPFYVAGDSYSGLVVPATVQEISKGNYECCNPPINLQGYVLGNPLTDYTTGSNSRIPFAHGMALISDELYESLKKTCKGEYTNVHPRNTQCLKFVEEFNKCTNRIFQQLILDPLCETETPDCYIYRYLLTTYWANDATVREALQINKESIGEWVRCYYSIPYNNDIKSSMPYHVNNSISGYRSLIYSGDHDFEVPYLGTQAWIRSLNYSIIDDWRPWMVKNQIAGYTRTYANKMTFATIKGGGHTAESKPEEASIMFQRWINGQPL

SEQ ID NO: 102977 - protein, 339 aa, Arabidopsis thaliana
  peptide (1)..(339): Ceres Seq. ID no. 13611635
MKLDVYNGTLPSLVSTTYSWTKTSSIIFLDQPVGTGFSYSRTQQFNKPSDSGEAKRIHEFLQKWLGKHQVFSSNPFYVAGDSYSGLVVPATVQEISKGNYECCNPPINLQGYVLGNPLTDYTTGSNSRIPFAHGMALISDELYESLKKTCKGEYTNVHPRNTQCLKFVEEFNKCTNRIFQQLILDPLCETETPDCYIYRYLLTTYWANDATVREALQINKESIGEWVRCYYSIPYNNDIKSSMPYHVNNSISGYRSLIYSGDHDFEVPYLGTQAWIRSLNYSIIDDWRPWMVKNQIAGYTRTYANKMTFATIKGGGHTAESKPEEASIMFQRWINGQPL

SEQ ID NO: 102978 - DNA, 1403 bp, Arabidopsis thaliana
  misc_feature (1)..(1403): Ceres Seq. ID no. 13611636
  misc_feature (1)..(1403): Ortholog of  Ceres SEQ ID NO 14306538 as cited in SEQ ID NO 53117
atgggagaaaacggagccaagcgatggaacttcggagctaacgaggtcgtcgaacgatctaactcacttaccattcgtgattaccttaacaccttaatcaattgtctcgacggtggtgatgtaagacccgtcatcccactaggtcacggcgatccttctccgttcccgagctttcgtaccgatcaagccgctgttgaagccatctgtgatgctgtccgttcgaccaagtttaacaactactcttcttcttccggtgttcctgtcgctaggaaggctgttgcagagtacctctctagtgatctctcttaccagatatcaccaaatgatgttcatatcacagctggttgtgtgcaagccattgagattttgatatccgctctcgcaattcctggagctaacattctgctacctaggcctacttacccgatgtacgattcccgagcggctttttgccaactcgaggttcgttatttcgacctcctaccggaaaatggttgggatgttgatctagatggagttgaagctcttgcggatgacaaaaccgttgctatacttgttatcaacccttgcaatccatgtgggaatgttttctctcgccaacatcttcaaaagattgcagagacggcttgcaagcttggtatacttgtgatcgcagacgaagtctatgaccattttgcctttggggataaaccatttgtgtccatggcagagtttgcagagctagtgcctgttattgtcttaggtgctatatctaaaagatggtttgttcctggatggagacttggttggatggtgactcttgaccctcatggcatcatgaaagattctgggtttgttcagactcttatcaatgttgtcaacatgtcgacggatcctgcaacgtttattcagggagcaatgcctgatatcattgggaatacaaaggaagagttcttctcatcaaaacttgaaatggtgaaaaaatgtgcagagatttgttatgaggagcttatgaagattccttgcatcacttgcccctgcaaacccgagggctcaatgttcacgatggtgaagttaaacttttcactactcgaagatatcagtgatgatttggacttctgctccaagctggctaaagaggaatctatgatcatcctaccaggtcaagctgttgggcttaagaactggctacgtatcacctttgcagttgagcttgagcttctcatagaagggttttccaggctaaagaactttactgagagacactccaagaatcagccatgagacgtattaagactctctctctctttctccacagccaaagcaaattagattttgctgtgaggctattttacatactattgttggctttataaaatatttgcacaaacaatgaatcactaatgccaagaagcagccatgac

SEQ ID NO: 102979 - protein, 420 aa, Arabidopsis thaliana
  peptide (1)..(420): Ceres Seq. ID no. 13611637
MGENGAKRWNFGANEVVERSNSLTIRDYLNTLINCLDGGDVRPVIPLGHGDPSPFPSFRTDQAAVEAICDAVRSTKFNNYSSSSGVPVARKAVAEYLSSDLSYQISPNDVHITAGCVQAIEILISALAIPGANILLPRPTYPMYDSRAAFCQLEVRYFDLLPENGWDVDLDGVEALADDKTVAILVINPCNPCGNVFSRQHLQKIAETACKLGILVIADEVYDHFAFGDKPFVSMAEFAELVPVIVLGAISKRWFVPGWRLGWMVTLDPHGIMKDSGFVQTLINVVNMSTDPATFIQGAMPDIIGNTKEEFFSSKLEMVKKCAEICYEELMKIPCITCPCKPEGSMFTMVKLNFSLLEDISDDLDFCSKLAKEESMIILPGQAVGLKNWLRITFAVELELLIEGFSRLKNFTERHSKNQP

SEQ ID NO: 102980 - protein, 278 aa, Arabidopsis thaliana
  peptide (1)..(278): Ceres Seq. ID no. 13611638
MYDSRAAFCQLEVRYFDLLPENGWDVDLDGVEALADDKTVAILVINPCNPCGNVFSRQHLQKIAETACKLGILVIADEVYDHFAFGDKPFVSMAEFAELVPVIVLGAISKRWFVPGWRLGWMVTLDPHGIMKDSGFVQTLINVVNMSTDPATFIQGAMPDIIGNTKEEFFSSKLEMVKKCAEICYEELMKIPCITCPCKPEGSMFTMVKLNFSLLEDISDDLDFCSKLAKEESMIILPGQAVGLKNWLRITFAVELELLIEGFSRLKNFTERHSKNQP

SEQ ID NO: 102981 - DNA, 1220 bp, Arabidopsis thaliana
  misc_feature (1)..(1220): Ceres Seq. ID no. 13611639
  misc_feature (1)..(1220): Ortholog of  Ceres SEQ ID NO 14312266 as cited in SEQ ID NO 59225
  misc_feature (1)..(1220): Ortholog of  Ceres SEQ ID NO 13597620 as cited in SEQ ID NO 65383
gtgttaatttgattaattccattacatcttcaaaaccgtacagatctctgtttcggagcagcttcttcacacgctcaagctcaccgatcgattcttccaatgctcttctaattcatctgcaaaactctcagatcactcatgggtttgatttcaaaccctacccgtttgattctcgtcgccaccatcttcttcctcgtttcttcaatctccggtcaggattctgtcgttgagaacaatgagagacaagaatctgaaggatctggtaaagagcttggtcgtcgtggaatggttggtactgaacgaattggagttgatactgttgtagacaatattggtgctcttggtttgaatctagaccttgatgctactgctcctagtgtatttgatgctttgttttcgagtttctcgatgatacttgtcaccgagattggggatgaaacttttataatagcggcattgatggctatgcgacatcctaaagctactgttttatctggtgcactctcagctttgtttgttatgactatactttctactggacttggtaggatagtgccaaacttgatatcgaggaagcacaccaatagtgctgctacagtgctctatgcattttttggtttgcgactactctacattgcttggaggtctactgattcaaagtcaaatcagaagaaagaaatggaggaagttgaagagaagctcgagtcaggtcaagggaagacacccttccgtcgtttattctcaagattttgtaccccaatatttctggagtccttcatcttaacctttctagctgaatggggtgaccgtagccagatcgctacaatagctttggcgactcacaagaacgccataggagtggccattggggcaagtattggacacactgtgtgtacttcactagcagttgttggaggaagcatgctggcttcaaggatctcgcaacgtacggtcgcaactgttggaggcttactcttcctcggcttttcagtctcctcctatttctatcctccattgtagtaaatgtgcttctttcgaaaatgggtgttagagacaatttctaagtaaagtttcaattttttttttgattttaatttaagtttgatattttgtttaatatcaatggccaaaatggccaaaccaaagaatccaacgcctatgcttttacaatttactttcttgaagtgtaacaaatctaattaaataaaattttgcagtat

SEQ ID NO: 102982 - protein, 293 aa, Arabidopsis thaliana; identical to SEQ ID NO: 25308
  peptide (1)..(293): Ceres Seq. ID no. 13611640

SEQ ID NO: 102983 - protein, 244 aa, Arabidopsis thaliana; identical to SEQ ID NO: 25309
  peptide (1)..(244): Ceres Seq. ID no. 13611641

SEQ ID NO: 102984 - protein, 203 aa, Arabidopsis thaliana; identical to SEQ ID NO: 25310
  peptide (1)..(203): Ceres Seq. ID no. 13611642

SEQ ID NO: 102985 - DNA, 718 bp, Arabidopsis thaliana
  misc_feature (1)..(718): Ceres Seq. ID no. 13611671
  misc_feature (1)..(718): Ortholog of  Ceres SEQ ID NO 15179051 as cited in SEQ ID NO 0
atcaagataagcttatagttatcactaagagttttgtctacgtacattttgtgatcaaacaagtaatcaatcaaaagatggaaggcaaaactgtgatctcaagtctgctcataatgagtcttgtcttagcacagattcaagtagaagcaaaaatctgctgtcctaccaaggatgatagatctgtgtattttgtatgcatgctttccgtgtcatcccaattttattgtctattaaagagtaaatgcaaaaatacatctcagacgatatgtcctccgggatatactaatgacattctcgaaaattctggtgatgctgtcaatgaatattgcaagctagggtgtgcatcctctgtgtgtggtgccttgaccactctccaaaactttgacacaagtaaagtattgagtgaagcggttgaacaatgcaccaaggcatgttcttctgtctgcaccggaggatctaccgccgcagttaaaagtgcctaaacaagtacatttaaaactgaaggatggtcgcaattcagagtggcgtgactgttttcatggaataattgtcgtctatcgatgtatgttataaaaaaaatgctagactatggtgctagtactgtttaataagttgtttccggtttgccaacgtgtcatgagggtttttgatcctagattgtattatatcccttctacttgtctttctctaaataaataataatgtgtccttctcgact

SEQ ID NO: 102986 - protein, 159 aa, Arabidopsis thaliana
  peptide (1)..(159): Ceres Seq. ID no. 13611672
QDKLIVITKSFVYVHFVIKQVINQKMEGKTVISSLLIMSLVLAQIQVEAKICCPTKDDRSVYFVCMLSVSSQFYCLLKSKCKNTSQTICPPGYTNDILENSGDAVNEYCKLGCASSVCGALTTLQNFDTSKVLSEAVEQCTKACSSVCTGGSTAAVKSA

SEQ ID NO: 102987 - protein, 134 aa, Arabidopsis thaliana
  peptide (1)..(134): Ceres Seq. ID no. 13611673
MEGKTVISSLLIMSLVLAQIQVEAKICCPTKDDRSVYFVCMLSVSSQFYCLLKSKCKNTSQTICPPGYTNDILENSGDAVNEYCKLGCASSVCGALTTLQNFDTSKVLSEAVEQCTKACSSVCTGGSTAAVKSA

SEQ ID NO: 102988 - protein, 122 aa, Arabidopsis thaliana
  peptide (1)..(122): Ceres Seq. ID no. 13611674
MSLVLAQIQVEAKICCPTKDDRSVYFVCMLSVSSQFYCLLKSKCKNTSQTICPPGYTNDILENSGDAVNEYCKLGCASSVCGALTTLQNFDTSKVLSEAVEQCTKACSSVCTGGSTAAVKSA

SEQ ID NO: 102989 - DNA, 861 bp, Arabidopsis thaliana
  misc_feature (1)..(861): Ceres Seq. ID no. 13611694
  misc_feature (1)..(861): Ortholog of  Ceres SEQ ID NO 15175677 as cited in SEQ ID NO 55728
aatttttacacacagagtagagcagagagagagagagagagagagatgggtgattctgacgtcggtgatcgtcttccccctccatcttcttccgacgaactctcgagctttctccgacagattctttcccgtactcctacagctcaaccttcttcaccaccgaagagtactaatgtttcctccgctgagaccttcttcccttccgtttccggcggagctgtttcttccgtcggttatggagtctctgaaactggccaagacaaatatgctttcgaacacaagagaagtggagctaaacagagaaattcgttgaagagaaacattgatgctcaattccacaacttgtctgaaaagaagaggaggagcaagatcaacgagaaaatgaaagctttgcagaaactcattcccaattccaacaagactgataaagcctcaatgcttgatgaagctatagaatatctgaagcagcttcaacttcaagtccagactttagccgttatgaatggtttaggcttaaaccctatgcgattaccacaggttccacctccaactcatacaaggatcaatgagaccttagagcaagacctgaacctagagactcttctcgctgctcctcactcgctggaaccagctaaaacaagtcaaggaatgtgcttttccacagccactctgctttgaagataacattcagacaatgatgatgatcggaattcctctagtacctgccagacaggagtgaacaatgttttgagttttagcattggccagatttctatgttcagttatagttatgctaataagctttaggagtgaacaaaatctgagtagtttgattataatgatgtctgaagcagattatat

SEQ ID NO: 102990 - protein, 225 aa, Arabidopsis thaliana
  peptide (1)..(225): Ceres Seq. ID no. 13611695
NFYTQSRAEREREREMGDSDVGDRLPPPSSSDELSSFLRQILSRTPTAQPSSPPKSTNVSSAETFFPSVSGGAVSSVGYGVSETGQDKYAFEHKRSGAKQRNSLKRNIDAQFHNLSEKKRRSKINEKMKALQKLIPNSNKTDKASMLDEAIEYLKQLQLQVQTLAVMNGLGLNPMRLPQVPPPTHTRINETLEQDLNLETLLAAPHSLEPAKTSQGMCFSTATLL

SEQ ID NO: 102991 - protein, 210 aa, Arabidopsis thaliana
  peptide (1)..(210): Ceres Seq. ID no. 13611696
MGDSDVGDRLPPPSSSDELSSFLRQILSRTPTAQPSSPPKSTNVSSAETFFPSVSGGAVSSVGYGVSETGQDKYAFEHKRSGAKQRNSLKRNIDAQFHNLSEKKRRSKINEKMKALQKLIPNSNKTDKASMLDEAIEYLKQLQLQVQTLAVMNGLGLNPMRLPQVPPPTHTRINETLEQDLNLETLLAAPHSLEPAKTSQGMCFSTATLL

SEQ ID NO: 102992 - DNA, 1400 bp, Arabidopsis thaliana
  misc_feature (1)..(1400): Ceres Seq. ID no. 13611732
  misc_feature (1)..(1400): Ortholog of  Ceres SEQ ID NO 15177079 as cited in SEQ ID NO 51989
  misc_feature (1)..(1400): Ortholog of  Ceres SEQ ID NO 14315354 as cited in SEQ ID NO 58232
  misc_feature (1)..(1400): Ortholog of  Ceres SEQ ID NO 13596392 as cited in SEQ ID NO 62136
  misc_feature (1)..(1400): Ortholog of  Ceres SEQ ID NO 14313244 as cited in SEQ ID NO 66802
  misc_feature (1)..(1400): Ortholog of  Ceres SEQ ID NO 13654360 as cited in SEQ ID NO 67980
  misc_feature (1)..(1400): Ortholog of  Ceres SEQ ID NO 13596394 as cited in SEQ ID NO 68561
tttgttttgatttcctctctcactctgcacacgaaggcgagagagagagagaaagaaaaaagcgaagaatacgcagaatccatccaatttagggttagggctgcccctaatctggaaacctttgcctcgtttctgatctgttttccggatccgacttgaaggaaagaagacgacgacgcactaccaaaaacatgggcgcgaattcgcttccaacggatgcaaccctcgatctagatgagcagatctcgcagctcatgcagtgcaagcctctctccgagcaacaggtcagagcattatgtgagaaagctaaggagatcttaatggatgaaagcaacgttcagcctgttaaaagccctgtgacaatctgcggtgatattcatggacagttccatgatcttgcagagcttttccgtattgggggaaagtgtcctgataccaactatctgtttatgggagactatgtcgaccgtggatattattctgtggaaactgttacgctgttggttggcttgaaagtacggtatccacagcgaatcactattcttagaggaaaccatgaaagtcgtcagattactcaggtttatggattttatgatgaatgtctgcgaaagtatggcaatgcaaatgtttggaagatatttacagacctctttgactatttcccactgacagccttggtggagtcggaaatattctgccttcacggtggattatcaccatccatcgagacccttgacaacattaggaactttgatcgggttcaagaagttccacatgaagggcctatgtgtgacttattatggtctgatcctgatgacagatgtggctggggaatctctcctcgtggtgctggatatacatttggtcaggatatttcggaacaattcaatcacactaacaacttaaagctgatcgcccgagcgcatcagctcgttatggatggattcaattgggcacacgagcaaaaagtggttactatattcagtgcaccaaactattgctatcgctgtggaaacatggcctcaattcttgaggtcgatgactgcaggaaccacacgttcattcagtttgaaccagcaccgaggagaggagagccagatgtaacccgaaggacacctgactatttcctttgaagatactcagctcctcctgcagcttccggttgttggtttttgaagatctctgcttattccatttggttcaacgcatttgtgttccaggttgcttctctttaaaatcaatttagccctctcccttggaatagtgtaatataggcaaagaggtcaatgaactttaaaacctctcatgaacatgtgtttggctgaacttattagctcccttctgcatcagaatctgtttattgtgagatattttttcgatttatttcacgtaatttttcc

SEQ ID NO: 102993 - protein, 313 aa, Arabidopsis thaliana; identical to SEQ ID NO: 23777
  peptide (1)..(313): Ceres Seq. ID no. 13611733

SEQ ID NO: 102994 - protein, 292 aa, Arabidopsis thaliana; identical to SEQ ID NO: 23778
  peptide (1)..(292): Ceres Seq. ID no. 13611734

SEQ ID NO: 102995 - protein, 270 aa, Arabidopsis thaliana; identical to SEQ ID NO: 23779
  peptide (1)..(270): Ceres Seq. ID no. 13611735

SEQ ID NO: 102996 - DNA, 649 bp, Arabidopsis thaliana
  misc_feature (1)..(649): Ceres Seq. ID no. 13611740
  misc_feature (1)..(649): Ortholog of  Ceres SEQ ID NO 12583682 as cited in SEQ ID NO 56297
attaactgatggctagattcatggcttacaatcaaaatccacaaatgttggctctatgcataacagtagcagtaatgttccttggtgtgagatcagaattgagtcaggatataaagggatgtcaggatgcgatgtctgatctctactcttgtcttccttttgtcactaacaaagctaaagcaccagactcaacatgttgcagcacactcaaggtaaaaatagacaaagggcagaccaggaaatgtctatgtactctagtcaaagacagggatgatcctggtttggggttcaaagttgatgccaaccgtgcaatgagcctcccttccgcttgtcatgtccctgcaaacatctctcaatgcccagatcttctacatctgcttccagattcaccagcctctcaaatatttaagcaattcactgaatcttcttctcagactgttggacataaagcggtctccacaagctcaagcatcaaaggaagagacaacaagcaatttggtttaatgatggctggtgctctctcaatatggtatataatgtaaaatcctctgtgatctaaagttgatgaacacaataaccaaaatcattatacgagtcatatctactagctgaagcagatgtatcatggcttattaataagaacttattg

SEQ ID NO: 102997 - protein, 177 aa, Arabidopsis thaliana; identical to SEQ ID NO: 20793
  peptide (1)..(177): Ceres Seq. ID no. 13611741

SEQ ID NO: 102998 - protein, 173 aa, Arabidopsis thaliana; identical to SEQ ID NO: 20794
  peptide (1)..(173): Ceres Seq. ID no. 13611742

SEQ ID NO: 102999 - protein, 165 aa, Arabidopsis thaliana; identical to SEQ ID NO: 20795
  peptide (1)..(165): Ceres Seq. ID no. 13611743

SEQ ID NO: 103000 - DNA, 728 bp, Arabidopsis thaliana
  misc_feature (1)..(728): Ceres Seq. ID no. 13611748
  misc_feature (1)..(728): Ortholog of  Ceres SEQ ID NO 13594501 as cited in SEQ ID NO 51327
atcttcttgtctctctctcatttcttgttattatccacgaacgaagaaaaacctagaaaacagttgaagaaagaaaatcacaagagaagccatggccggaattggaccgattactcaggattgggaaccagttgtgatccgcaagagagctcctaacgctgcagctaagcgcgacgagaagactgtcaacgccgctcgtcgaagcggcgccgatattgagaccgttcgaaaattcaatgctggatcgaacaaggctgcatcaagcggcacctccttgaacacaaagaagctagatgatgatactgagaacttatctcatgatcgtgtgcccactgaattgaagaaagccatcatgcaagctagaggggagaagaagctgactcagtcccaacttgcccatctgatcaatgagaagccacaagtgatccaagaatacgagtctgggaaagcaattccgaatcaacagatcctttcaaagctggagagggcacttggtgctaaactccgtggaaagaagtagaagtgtagaacaaagctcttaaaggtaacaacaaaagctgatcgcagtttctctccagtccacatgctttaccatatcctaaaaactatatctatgtatggtttggtttaatggcgtagtagtttgttgcgaggaatctttcatgatgtaagaaaaacaaagctgtttggaaccttttgtcattataaataatctcttctctttcttt

SEQ ID NO: 103001 - protein, 142 aa, Arabidopsis thaliana; identical to SEQ ID NO: 40131
  peptide (1)..(142): Ceres Seq. ID no. 13611749

SEQ ID NO: 103002 - DNA, 1224 bp, Arabidopsis thaliana
  misc_feature (1)..(1224): Ceres Seq. ID no. 13611750
  misc_feature (1)..(1224): Ortholog of  Ceres SEQ ID NO 13502952 as cited in SEQ ID NO 62271
  misc_feature (1)..(1224): Ortholog of  Ceres SEQ ID NO 13502973 as cited in SEQ ID NO 68052
  misc_feature (1)..(1224): Ortholog of  Ceres SEQ ID NO 13596000 as cited in SEQ ID NO 68188
atcaagttaaaaaaaaaacagaaggagaaatggcaataagttttagaactctagctcttttgaccctctcggtgttactaatttccatatctctcggcgtcgtcacagcaacagagtcgcagaggaatgaaggggaggtgcttacaatgtacgagcaatggcttgtagagaatgggaagaactataacggtcttggagagaaggagagacggttcaagatcttcaaagacaacttgaagcgcatcgaagaacacaattcagatccaaaccggagttatgaacgcgggttgaacaagttttcggatctaacggctgatgagtttcaagctagttacttaggtgggaagatggaaaagaaaagcctatcagatgtagcggagaggtatcagtacaaagaaggagatgttttacctgatgaagttgattggagggagagaggagcagttgttccaagagtcaaaagacaaggagagtgtggaagttgttgggcgtttgccgcgactggagcggtggaaggtataaaccagatcacaaccggagaattagtatctttatcggaacaagaactcattgactgcgatagagggaacgacaactttggatgtgctggtggtggagcagtatgggcctttgagttcattaaggagaacggtggtattgtatccgatgaagtttatggttataccggtgaagatactgccgcatgcaaggccattgagatgaaaaccactcgggttgttaccattaatggtcatgaggttgttcctgtaaacgatgagatgtctttgaagaaagctgttgcttatcaacctattagtgttatgatatcagctgcaaacatgagcgactacaaatctggtgtgtataaaggagcatgtagtaatttgtggggagatcacaatgtgctaattgtggggtatggaacatcatcagatgaaggagactactggcttattcgtaattcttggggaccagagtggggagaaggcgggtaccttaggcttcaacgtaacttccatgaaccaaccgggaaatgtgcagtcgctgtagctcctgtatacccaatcaagtcgaactcttcatctcatttgttgtctccaagtgtgtttaaattggttgttttatttgtttttcagttgattagtttggccttgctttgaaatatacttttatcggtgttcaagttcgttggtttttggtttaataaaggaaacaagattcgtc

SEQ ID NO: 103003 - protein, 385 aa, Arabidopsis thaliana; identical to SEQ ID NO: 25022
  peptide (1)..(385): Ceres Seq. ID no. 13611751

SEQ ID NO: 103004 - protein, 376 aa, Arabidopsis thaliana; identical to SEQ ID NO: 25023
  peptide (1)..(376): Ceres Seq. ID no. 13611752

SEQ ID NO: 103005 - protein, 337 aa, Arabidopsis thaliana; identical to SEQ ID NO: 25024
  peptide (1)..(337): Ceres Seq. ID no. 13611753

SEQ ID NO: 103006 - DNA, 1505 bp, Arabidopsis thaliana
  misc_feature (1)..(1505): Ceres Seq. ID no. 13611762
  misc_feature (1)..(1505): Ortholog of  Ceres SEQ ID NO 13497992 as cited in SEQ ID NO 58175
aagatcacggaaccacgccaggatccttccgccgtcggcgacgtcgctcctgacgtcacctcaacacgtaaaccacacaattaagtttattcctctctctctccgtcaacttaaaccggtgtttgtatataaatctgattgatatagaaatcgaaactcaaattggagaacattcgagaagctttggatttttgaatcacgaagacatggaaaaaacagaatctgtatcaggaaaggggaagagagtgattgttatcggcggcggaatcgccggctctctcgcttcgaaatttcttcaattcgattccgatctcaccctcattgatccgaaggagtattttgagattatttgggcaagtttaaggtcaatggtagagccagcttttgctgaaagatcggtgataaaccacaagaagtatttacaaaatggtcgtgttgtgacttctccagcggttaatatcacagacaccgatgttttgaccgcggatggtcttgtctttgggtatgattatcttgttattgctactggtcacaatgatgtgcttcctaaaactaggcaagagaagttatctcaataccaaacagaacatgagaagatcaagtcatctgagtcgattctgattgttggtggaggtccgtcgggtgtggagctcgctgcggagatagctgtcgatttccctgagaaaaaggttactatagtacacaatggaccgagattgctggaatttgttggtcagaaagctgcagacaaggcattagactggatgaagtccaagagagttgaagtgatattgaaccaaagggttgatttgagttcagcttcagatgggagtaaaacgtaccgaacatcgggtggagagacgatacacgcggattgtcacttcctctgtactggaaaacctttgtcttcagaatggctaaaaggaactgttctgaaagataacttggatggcaaaggaaggcttatggtcgatgagtacttgagagttaagggtcgcaagaatgtattcgctattggtgatattactgatgtcccggagatgaaacaaggctacattgctgagaaacacgcctctgtagctacaaagaacataaagttgttgatgtctggtgggaacgagaagaagatgtcgacttacaagcctggtccggacattgccataatatctttaggaagaaaggactcggttgctcagttcccattcatgacagtctcgggttgcatacctggtttgatcaaatctaaggatctgtttgtcgggaagacgaggaaggcaagaggtctggatcctaaccttgtggagccttgagtgattgtgcttatcttcatgatgagattcttcttgtgcaggcgcatttcgtcgtttatttcatcacacgtttgttgtatgttgatttggtccactctcctgtttgtggattctcagagtggagtgttgtttgcttttgttgtaacatgatttgtaaagaatctgttcgatttctctaaaaggaaccaaagttgt

SEQ ID NO: 103007 - protein, 367 aa, Arabidopsis thaliana; identical to SEQ ID NO: 40394
  peptide (1)..(367): Ceres Seq. ID no. 13611763

SEQ ID NO: 103008 - protein, 313 aa, Arabidopsis thaliana; identical to SEQ ID NO: 40395
  peptide (1)..(313): Ceres Seq. ID no. 13611764

SEQ ID NO: 103009 - DNA, 1864 bp, Arabidopsis thaliana
  misc_feature (1)..(1864): Ceres Seq. ID no. 13611775
  misc_feature (1)..(1864): Ortholog of  Ceres SEQ ID NO 15177343 as cited in SEQ ID NO 51182
atggagaagcttgaatcacggagaagactagtcgtattaatggaaactccgtgtaaatcgaatgagcttcttcttttggatgggtgtgttttatgtatggatggatttaagggtaaaagaacatctagaccgattatgccacggaaagcaagtggtcttgtgttacatgagaatatgaagaagaaagatgataagagtgttgtccctatctgcagtagaattggttgcagttccagggttagttccactaagggagatttgattgatcataaagcaaaagctactgtgtcttcgtttcgatctcctttgagtggaaaggaaaccgttggtagttcatctcgaagtatgagtggatttggtggtacaaaaaaggcttccaaggttattggtaggagacaactctcttctcttttggacatggattcttcagagagcagcagtgttaatgaagactcacccacaagtgagcgttcccttcctcgtggaaagacaaaagaaagcactattagtgttcattctgaaagtagtgtctctggagaagttgtgacagaggcaggaagctcgagtagaggaactggtagaagcattcatcagagacctgatttggtctcccgagatgctcgtgtgagtaatagtgagcaaaatgcaagagctagtgtgaacaagaatggattaagagacttgaggaacaaatctggttctgatgttcttccatctaattcaactccgacaagaaaaagtaacatctttagaaagaaaacctctgatggtgagagcagctcttcgagtagagggaataagacggaaggatcagtggttgggggaaagaatattagttcccctcaggggaatggcatcaccatgtctgaacctaggaggaacagaaacttaccaagtgttagggacaacagtgttgtttcaagtagtactaggagatcaactggttattatggtagaacaggacgtgctggagcggttgcaacactacaagcacctcggcctccaacaagagctgatctcaatccttctagatcggcagaagcttcgcgtagtcctttaaatagttacagtaggccaatcagtagtaatggcaggttacgtagcctgatgatgcctggtagcccctcagaagccggcctttctcgctctttgatgaaccgtgatactttcagacggtataacatgaatggagttgcagaggtattgttggccctggaaaggattgagcaagacgaagagcttacatacgagcaattggctgttttagagaccaatctgttcttaaatggtatgagcagcttccacgatcagcatagagatatgaggcttgacattgacaacatgtcgtatgaggaactgttagcattagaggagaaaatgggtacagtgagcactgctctaagcgaagaagcgcttctgaaaagcctcaagtcaagtatttaccgtccaaacgatgaatccgacgacatttgcctgaacaaagatgatgatgtcaagtgcagcatttgccaggaagagtatgttgatggagatgaagtagggactttgccttgccaacataaataccacgtgagctgcgcgcaacaatggctacggatgaagaattggtgtcctatatgtaaaacctctgcagaatctcagccacatccattttcatgatgatgggattgcagagacatttaccaaagtgtttgtgtctacttccactaccttgctctctattatttgtacataaaaggttttcttttttacttacacacaattgggaacaaatagaaaataagatcaggtggacaaattattgttttcaccttgtattggttcgtaatttcaacaatatttggtttaattccatatatagttt

SEQ ID NO: 103010 - protein, 552 aa, Arabidopsis thaliana
  peptide (1)..(552): Ceres Seq. ID no. 13611776
MEKLESRRRLVVLMETPCKSNELLLLDGCVLCMDGFKGKRTSRPIMPRKASGLVLHENMKKKDDKSVVPICSRIGCSSRVSSTKGDLIDHKAKATVSSFRSPLSGKETVGSSSRSMSGFGGTKKASKVIGRRQLSSLLDMDSSESSSVNEDSPTSERSLPRGKTKESTISVHSESSVSGEVVTEAGSSSRGTGRSIHQRPDLVSRDARVSNSEQNARASVNKNGLRDLRNKSGSDVLPSNSTPTRKSNIFRKKTSDGESSSSSRGNKTEGSVVGGKNISSPQGNGITMSEPRRNRNLPSVRDNSVVSSSTRRSTGYYGRTGRAGAVATLQAPRPPTRADLNPSRSAEASRSPLNSYSRPISSNGRLRSLMMPGSPSEAGLSRSLMNRDTFRRYNMNGVAEVLLALERIEQDEELTYEQLAVLETNLFLNGMSSFHDQHRDMRLDIDNMSYEELLALEEKMGTVSTALSEEALLKSLKSSIYRPNDESDDICLNKDDDVKCSICQEEYVDGDEVGTLPCQHKYHVSCAQQWLRMKNWCPICKTSAESQPHPFS

SEQ ID NO: 103011 - protein, 539 aa, Arabidopsis thaliana
  peptide (1)..(539): Ceres Seq. ID no. 13611777
METPCKSNELLLLDGCVLCMDGFKGKRTSRPIMPRKASGLVLHENMKKKDDKSVVPICSRIGCSSRVSSTKGDLIDHKAKATVSSFRSPLSGKETVGSSSRSMSGFGGTKKASKVIGRRQLSSLLDMDSSESSSVNEDSPTSERSLPRGKTKESTISVHSESSVSGEVVTEAGSSSRGTGRSIHQRPDLVSRDARVSNSEQNARASVNKNGLRDLRNKSGSDVLPSNSTPTRKSNIFRKKTSDGESSSSSRGNKTEGSVVGGKNISSPQGNGITMSEPRRNRNLPSVRDNSVVSSSTRRSTGYYGRTGRAGAVATLQAPRPPTRADLNPSRSAEASRSPLNSYSRPISSNGRLRSLMMPGSPSEAGLSRSLMNRDTFRRYNMNGVAEVLLALERIEQDEELTYEQLAVLETNLFLNGMSSFHDQHRDMRLDIDNMSYEELLALEEKMGTVSTALSEEALLKSLKSSIYRPNDESDDICLNKDDDVKCSICQEEYVDGDEVGTLPCQHKYHVSCAQQWLRMKNWCPICKTSAESQPHPFS

SEQ ID NO: 103012 - protein, 520 aa, Arabidopsis thaliana; identical to SEQ ID NO: 77854
  peptide (1)..(520): Ceres Seq. ID no. 13611778

SEQ ID NO: 103013 - DNA, 1293 bp, Arabidopsis thaliana
  misc_feature (1)..(1293): Ceres Seq. ID no. 13611783
  misc_feature (1)..(1293): Ortholog of  Ceres SEQ ID NO 14304863 as cited in SEQ ID NO 54200
  misc_feature (1)..(1293): Ortholog of  Ceres SEQ ID NO 13598340 as cited in SEQ ID NO 68543
agaccacaaacatcctccaataagccaaaagaagacgagagaaggagaagagtcgaaatcgccattgaaatggctctcaaagcttcacctgttaccggattattccctcctctccgtcctactgcttcttcttccccttcgacttcttctaatcgcccttgttccctcaggattctccctctcagaacatctttcttcggtaactcaagtggagcgctgagagtgaatgtgttgagattagcttgtgataatagactcaggtgcaatggtcatggtgctactatgaatctttttgaacgattttctagagtggtcaagtcatatgcaaatgcgctcataagctcttttgaagacccggagaaaatcctggagcaaactgtcattgaaatgaatagtgatttgacaaagatgcgtcaagccactgcacaggttttagcatcacaaaagcagttacagaacaaatataaagctgcacagcagtcttctgatgattggtacaaaagagcacaacttgctcttgcaaaaggagatgaggatcttgcacgtgaggcccttaaacgacgaaagtcttttgctgacaacgctactgctttgaaaactcaactagatcagcaaaaaggtgttgtcgacaatcttgtttcaaatacaaggctcttggagagtaagatacaagaggcaaaagcaaagaaagatacgctccttgcacgtgctcgcactgctaagactgcaaccaaagtgcaagagatgatagggacagtaaatacaagcggtgctctttcagcttttgagaaaatggaggagaaagttatggctatggagtctgaagcagatgcactaactcagattggaaccgatgaactcgaggggaagtttcaaatgcttgaaacttcatctgtggatgatgatcttgcagacttgaagaaagaattgtctggaagctcaaagaaaggagagcttcctccagggagaagcactgttgcagcaagcacgagataccctttcaaagactcagagatcgagaatgagttaaacgaactgcgaaggaaagctaacgacttttagatatcggctgtttccgaattgtgactgggttacattacgttcctgctgtaaactatcttgtgtcttgtagaaagacacaaaaagcatgtgtactcttaaagtaaatatccagctatctaatccccatttatagttgggttatgtacattcagacacttttgaaagtgtggtttccattttgactcactttgtgtcaagtggacacgtttttttataagctgttttactcgc

SEQ ID NO: 103014 - protein, 353 aa, Arabidopsis thaliana
  peptide (1)..(353): Ceres Seq. ID no. 13611784
RPQTSSNKPKEDERRRRVEIAIEMALKASPVTGLFPPLRPTASSSPSTSSNRPCSLRILPLRTSFFGNSSGALRVNVLRLACDNRLRCNGHGATMNLFERFSRVVKSYANALISSFEDPEKILEQTVIEMNSDLTKMRQATAQVLASQKQLQNKYKAAQQSSDDWYKRAQLALAKGDEDLAREALKRRKSFADNATALKTQLDQQKGVVDNLVSNTRLLESKIQEAKAKKDTLLARARTAKTATKVQEMIGTVNTSGALSAFEKMEEKVMAMESEADALTQIGTDELEGKFQMLETSSVDDDLADLKKELSGSSKKGELPPGRSTVAASTRYPFKDSEIENELNELRRKANDF

SEQ ID NO: 103015 - protein, 330 aa, Arabidopsis thaliana; identical to SEQ ID NO: 21976
  peptide (1)..(330): Ceres Seq. ID no. 13611785

SEQ ID NO: 103016 - protein, 259 aa, Arabidopsis thaliana; identical to SEQ ID NO: 21977
  peptide (1)..(259): Ceres Seq. ID no. 13611786

SEQ ID NO: 103017 - DNA, 989 bp, Arabidopsis thaliana
  misc_feature (1)..(989): Ceres Seq. ID no. 13611791
  misc_feature (1)..(989): Ortholog of  Ceres SEQ ID NO 12608730 as cited in SEQ ID NO 58313
acataataaaccaaacccaacaaagaaaataaaatttcaaaccaaaaaaaaaaaaaatgagaactttagaagaatcgaagatctctattgtcttcttgttgcttcttctcttctcaatcttcatcagttccagtcaccaggcaaatgaggtattaccagctgaaggagataatgagatgatgatggtgccattgggggaggagaagtttatggtaatgaatgaaacaagaaggaaacttggaagttttcagatatgttcagtttgtacttgttgtggtggtgctaaaggtctttgcttgccttctccttgttgctatgctattaactgcaatatccctaatagaccctttggttactgttctttcactcccaaaacttgcaattgctttggttgccatatctgagatcttctacttcattgtaatttgggagagaaacaagtgaatctaaatcttgattcatcttcaagtgtgaaagggaggaaaaaaagaagaatatctgttcttggtttgagtcttctacttattttttgtctataatttatttttcagtcttcattaaatttcattacctactatctcagcaacatcatcatcctcattaattaattgtctttttgcatttgccattttttcataattttctagggttttttttgttttgagaatcttgttcacacttcaagcaagatttgtttcttcttctctgttcaatcaattctctctatctgtctttctctctctctttttttttttttttcattctcttgtttacttcatcattttgtttcttatgtgttttaagaaagttaaaagttagaatttagcatattttggaaaagagtcattgtttggttaagctggcaattggaagagtatttaatatgatgatgatgatggtattgatggtgatggtggtgatagtgaagctgttaaagttaagtctttgtaatgagtgacatgttaagaaaatggatcaagtttagtgcc

SEQ ID NO: 103018 - protein, 115 aa, Arabidopsis thaliana; identical to SEQ ID NO: 27158
  peptide (1)..(115): Ceres Seq. ID no. 13611792

SEQ ID NO: 103019 - protein, 75 aa, Arabidopsis thaliana; identical to SEQ ID NO: 27159
  peptide (1)..(75): Ceres Seq. ID no. 13611793

SEQ ID NO: 103020 - protein, 74 aa, Arabidopsis thaliana
  peptide (1)..(74): Ceres Seq. ID no. 13611794
MKQEGNLEVFRYVQFVLVVVVLKVFACLLLVAMLLTAISLIDPLVTVLSLPKLAIALVAISEIFYFIVIWERNK

SEQ ID NO: 103021 - DNA, 841 bp, Arabidopsis thaliana
  misc_feature (1)..(841): Ceres Seq. ID no. 13611795
  misc_feature (1)..(841): Ortholog of  Ceres SEQ ID NO 15178133 as cited in SEQ ID NO 0
aatcatcactcatcttcaccaatctccattgattccttcaagccaagcttcttgcattctcctcttagatcaatctggttctttcatattccttgtggatatgatccgttaagattcgttcgttttgtgtctagtagatcgctgtgacgtaatataaagaaaaccctaaatctcagaaaactcgagactggttctaatggcttgtcaaattcaagcttcacgcgttttcccagttctagaaattgaaaaaggtctctcctttatgataaatgtcttccataggagaataaaagcttcgtccattactctcacttcatttccttatcccatgaaaagttttcagataagaagaccaaaccggaaaatagcgtttgcgttagacactggttcttctattcctggagatagtggtgaagggcaagagatgaatggagacagaaccggtctcggtagcactcggttaggtagaattgcgattgcaggaggcaaacagttacttgggaagataaactctgcaagaaaaaacttcccaatgaagatatttctgctgcttcttggtttctacactgccaatgcactagctactattcttggacagactggtgattgggatgtgcttgttgccggaatcgtcgttgctgcgatcgaaggaatcggtatgcttatgtataagaaaccgtcttcttcaatgttttcagggaagttgcagtcttttgttgtgtttatgaatttttggaaagctggtgtttgcttaggtctctttgttgatgctttcaagttgggtagttaaaaagacaaatctttcttttcttctactctatgtatatatgcaattgttact

SEQ ID NO: 103022 - protein, 197 aa, Arabidopsis thaliana
  peptide (1)..(197): Ceres Seq. ID no. 13611796
MACQIQASRVFPVLEIEKGLSFMINVFHRRIKASSITLTSFPYPMKSFQIRRPNRKIAFALDTGSSIPGDSGEGQEMNGDRTGLGSTRLGRIAIAGGKQLLGKINSARKNFPMKIFLLLLGFYTANALATILGQTGDWDVLVAGIVVAAIEGIGMLMYKKPSSSMFSGKLQSFVVFMNFWKAGVCLGLFVDAFKLGS

SEQ ID NO: 103023 - protein, 175 aa, Arabidopsis thaliana
  peptide (1)..(175): Ceres Seq. ID no. 13611797
MINVFHRRIKASSITLTSFPYPMKSFQIRRPNRKIAFALDTGSSIPGDSGEGQEMNGDRTGLGSTRLGRIAIAGGKQLLGKINSARKNFPMKIFLLLLGFYTANALATILGQTGDWDVLVAGIVVAAIEGIGMLMYKKPSSSMFSGKLQSFVVFMNFWKAGVCLGLFVDAFKLGS

SEQ ID NO: 103024 - protein, 153 aa, Arabidopsis thaliana
  peptide (1)..(153): Ceres Seq. ID no. 13611798
MKSFQIRRPNRKIAFALDTGSSIPGDSGEGQEMNGDRTGLGSTRLGRIAIAGGKQLLGKINSARKNFPMKIFLLLLGFYTANALATILGQTGDWDVLVAGIVVAAIEGIGMLMYKKPSSSMFSGKLQSFVVFMNFWKAGVCLGLFVDAFKLGS

SEQ ID NO: 103025 - DNA, 1023 bp, Arabidopsis thaliana
  misc_feature (1)..(1023): Ceres Seq. ID no. 13611814
  misc_feature (1)..(1023): Ortholog of  Ceres SEQ ID NO 13655934 as cited in SEQ ID NO 65278
  misc_feature (1)..(1023): Ortholog of  Ceres SEQ ID NO 15180098 as cited in SEQ ID NO 0
aagatctacaaacaaagcttcttcttcttcttggtgtcatcaagattttccaaaaatgtctcaacaccaaaaaatctatccggtccaagatccagaagccgcaacagcgcgtccaacagctcctttggttcctcgtggttcctctagatcagaacatggagacccatccaaagtccctttgaaccaaaggccacaacggttcgtgccgttggctcctccaaagaagagaagaagttgttgttgcagatgcttttgctacacgttctgctttcttttgcttcttgtcgttgcagtaggcgcatccattggtatactataccttgtctttaaaccgaagctaccggattactctattgaccggttacagctcacccggtttgcactgaaccaagactcgagtttgactacggcttttaacgtgactataaccgctaagaatccgaacgagaagattggaatttattatgaagatgggagcaagattaccgtgtggtacatggaacatcaactaagcaatgggtcgttgccaaaattttaccaaggacatgaaaatacgacagtgatatacgtagaaatgactggtcaaacacaaaatgcatcgggtttaaggacgacattagaagagcaacaacaaagaaccgggaatataccattgagaattagagtaaaccaaccggttcgggtcaaatttgggaagttgaagctcttcgaagtaagattcttggtcagatgtggtgtatttgttgatagcttggctaccaataatgttattaagattcaaagtagtagttgcaaatttcgtcttaggttatagatccgtttttttttatataattaatatcgagatatacagagggaattttgtcagatatagtcacatactcatatatagttctcctctaaagtacattattgtgtctcagacctttgttgtataataaactgttggtttaaattaatatattaaagtatacaatactatgtacataggtggaattcaaagtatagtagttgtaagttttt

SEQ ID NO: 103026 - protein, 270 aa, Arabidopsis thaliana; identical to SEQ ID NO: 35068
  peptide (1)..(270): Ceres Seq. ID no. 13611815

SEQ ID NO: 103027 - protein, 252 aa, Arabidopsis thaliana; identical to SEQ ID NO: 35069
  peptide (1)..(252): Ceres Seq. ID no. 13611816

SEQ ID NO: 103028 - DNA, 1806 bp, Arabidopsis thaliana
  misc_feature (1)..(1806): Ceres Seq. ID no. 13611825
  misc_feature (1)..(1806): Ortholog of  Ceres SEQ ID NO 15169264 as cited in SEQ ID NO 55026
  misc_feature (1)..(1806): Ortholog of  Ceres SEQ ID NO 15224709 as cited in SEQ ID NO 68627
aatctctctttatctctctttctctgtttactaaatcgccagtattcgccgcaagaaagatgtctccggcgaagaagagccgaagttttcctccgataagcgagtgtaaaagcagagagtatgattcgatcgctgcggatctcgacgggactctgcttctgtcaagaagctctttcccttacttcatgctggtggccattgaagcaggtagtctcttccgtggattgatccttcttctttctcttcccatcgtcatcatcgcttatctcttcgtctccgaatctctcggaatccaaatccttatcttcatctccttcgccggtatcaagatcaagaacatcgaactcgtctctcgcgccgttcttacacggttttacgcggcggatgtgaggaaagatagttttgaggtgtttgataaatgtaagaagaggaaagtagtggtgactgcgaatccgatagtgatggttgagccattcgtcaaagactatttgggaggagataaagttttgggaacagagattgaagttaaccccaaaacgatgaaagctactggttttgtgaaaaagcctggtgttcttgttggtgatctcaagagattagccatcttgaaagagttcggcgatgactcaccggatcttggcctcggtgaccgcacctccgatcacgatttcatgtccatttgcaaggaaggttacatggtgcatgagaccaaatcagccacaacagtccctatagagagtctcaagaaccgcataatcttccatgatggccgtcttgtccaacgtccgaccccattaaacgccttaatcatttacctttggcttcctttcggcttcatgctctctgtcttccgcgtctacttcaacctccctttacccgaacgcttcgtccgctacacttacgagatcctcggcattcacctcacaatccgtggccaccgtcctccacctccttcccccggaaaacctggaaacctctacgttctcaaccaccgcaccgcccttgaccccattatcatcgccattgctctcggccgtaagatcacatgtgtcacttatagtgtctctcgcctctccctgatgctctcacccattcctgctgttgctctgacccgagaccgtgtcgctgacgcagcccgcatgaggcaactcctcgagaaaggtgatttggtgatctgtcctgaaggcacaacgtgtagagaaccatatctactaaggttcagtgctctatttgcagagctgagcgaccggatcgtgcctgtggccatgaactgcaagcaagggatgttcaacgggacgacagttagaggtgtgaaattctgggatccgtacttcttcttcatgaacccccgacctagctacgaggccactttcttggaccgtttgcccgaagaaatgacggtaaacggtggtggcaagactccttttgaggtggctaattacgttcagaaggtgatcggtggagttttggggttcgaatgtactgaacttacaaggaaggataagtatctgttgcttggaggcaacgacggaaaggttgagtctatcaataagaccaagtccatggagtaataatccagctagtctggttgctgctattttgcttgggagtgaagttaggtctttcgggttttcccaattacttttttttttgttttttttcatgtattgttcgaggaaaatgttttgttgaatatgcactggataatgaaactacatttgaatcaaagtacgtacatgtagtgtaccatttccccttgccttaactatgaatgatttgtaaactcaccttgtattataagatatc

SEQ ID NO: 103029 - protein, 522 aa, Arabidopsis thaliana
  peptide (1)..(522): Ceres Seq. ID no. 13611826
SLFISLSLFTKSPVFAARKMSPAKKSRSFPPISECKSREYDSIAADLDGTLLLSRSSFPYFMLVAIEAGSLFRGLILLLSLPIVIIAYLFVSESLGIQILIFISFAGIKIKNIELVSRAVLTRFYAADVRKDSFEVFDKCKKRKVVVTANPIVMVEPFVKDYLGGDKVLGTEIEVNPKTMKATGFVKKPGVLVGDLKRLAILKEFGDDSPDLGLGDRTSDHDFMSICKEGYMVHETKSATTVPIESLKNRIIFHDGRLVQRPTPLNALIIYLWLPFGFMLSVFRVYFNLPLPERFVRYTYEILGIHLTIRGHRPPPPSPGKPGNLYVLNHRTALDPIIIAIALGRKITCVTYSVSRLSLMLSPIPAVALTRDRVADAARMRQLLEKGDLVICPEGTTCREPYLLRFSALFAELSDRIVPVAMNCKQGMFNGTTVRGVKFWDPYFFFMNPRPSYEATFLDRLPEEMTVNGGGKTPFEVANYVQKVIGGVLGFECTELTRKDKYLLLGGNDGKVESINKTKSME

SEQ ID NO: 103030 - protein, 503 aa, Arabidopsis thaliana
  peptide (1)..(503): Ceres Seq. ID no. 13611827
MSPAKKSRSFPPISECKSREYDSIAADLDGTLLLSRSSFPYFMLVAIEAGSLFRGLILLLSLPIVIIAYLFVSESLGIQILIFISFAGIKIKNIELVSRAVLTRFYAADVRKDSFEVFDKCKKRKVVVTANPIVMVEPFVKDYLGGDKVLGTEIEVNPKTMKATGFVKKPGVLVGDLKRLAILKEFGDDSPDLGLGDRTSDHDFMSICKEGYMVHETKSATTVPIESLKNRIIFHDGRLVQRPTPLNALIIYLWLPFGFMLSVFRVYFNLPLPERFVRYTYEILGIHLTIRGHRPPPPSPGKPGNLYVLNHRTALDPIIIAIALGRKITCVTYSVSRLSLMLSPIPAVALTRDRVADAARMRQLLEKGDLVICPEGTTCREPYLLRFSALFAELSDRIVPVAMNCKQGMFNGTTVRGVKFWDPYFFFMNPRPSYEATFLDRLPEEMTVNGGGKTPFEVANYVQKVIGGVLGFECTELTRKDKYLLLGGNDGKVESINKTKSME

SEQ ID NO: 103031 - protein, 461 aa, Arabidopsis thaliana
  peptide (1)..(461): Ceres Seq. ID no. 13611828
MLVAIEAGSLFRGLILLLSLPIVIIAYLFVSESLGIQILIFISFAGIKIKNIELVSRAVLTRFYAADVRKDSFEVFDKCKKRKVVVTANPIVMVEPFVKDYLGGDKVLGTEIEVNPKTMKATGFVKKPGVLVGDLKRLAILKEFGDDSPDLGLGDRTSDHDFMSICKEGYMVHETKSATTVPIESLKNRIIFHDGRLVQRPTPLNALIIYLWLPFGFMLSVFRVYFNLPLPERFVRYTYEILGIHLTIRGHRPPPPSPGKPGNLYVLNHRTALDPIIIAIALGRKITCVTYSVSRLSLMLSPIPAVALTRDRVADAARMRQLLEKGDLVICPEGTTCREPYLLRFSALFAELSDRIVPVAMNCKQGMFNGTTVRGVKFWDPYFFFMNPRPSYEATFLDRLPEEMTVNGGGKTPFEVANYVQKVIGGVLGFECTELTRKDKYLLLGGNDGKVESINKTKSME

SEQ ID NO: 103032 - DNA, 1291 bp, Arabidopsis thaliana
  misc_feature (1)..(1291): Ceres Seq. ID no. 13611829
  misc_feature (1)..(1291): Ortholog of  Ceres SEQ ID NO 15176333 as cited in SEQ ID NO 52787
  misc_feature (1)..(1291): Ortholog of  Ceres SEQ ID NO 15170403 as cited in SEQ ID NO 53457
  misc_feature (1)..(1291): Ortholog of  Ceres SEQ ID NO 14303479 as cited in SEQ ID NO 54254
  misc_feature (1)..(1291): Ortholog of  Ceres SEQ ID NO 14312047 as cited in SEQ ID NO 55656
  misc_feature (1)..(1291): Ortholog of  Ceres SEQ ID NO 13660872 as cited in SEQ ID NO 60830
  misc_feature (1)..(1291): Ortholog of  Ceres SEQ ID NO 12616221 as cited in SEQ ID NO 63291
  misc_feature (1)..(1291): Ortholog of  Ceres SEQ ID NO 14302355 as cited in SEQ ID NO 65830
aagtttcaaaaacgccaagtttcagaggtagagagagagatactacaattgattaggataggatcaggatcatcctcaacaacctcctcctaattcctcctccattcatagtaacaataatattaagaaagagggtaaactatgtcagaattattacagttgcctccaggtttccgatttcaccctaccgatgaagagcttgtcatgcactatctctgccgcaaatgtgcctctcagtccatcgccgttccgatcatcgctgagatcgatctctacaaatacgatccatgggagcttcctggtttagccttgtatggtgagaaggaatggtacttcttctctcccagggacagaaaatatcccaacggttcgcgtcctaaccggtccgctggttctggttactggaaagctaccggagctgataaaccgatcggactacctaaaccggtcggaattaagaaagctcttgttttctacgccggcaaagctccaaagggagagaaaaccaattggatcatgcacgagtaccgtctcgccgacgttgaccggtccgttcgcaagaagaagaatagtctcaggctggatgattgggttctctgccggatttacaacaaaaaaggagctaccgagaggcggggaccaccgcctccggttgtttacggcgacgaaatcatggaggagaagccgaaggtgacggagatggttatgcctccgccgccgcaacagacaagtgagttcgcgtatttcgacacgtcggattcggtgccgaagctgcatactacggattcgagttgctcggagcaggtggtgtcgccggagttcacgagcgaggttcagagcgagcccaagtggaaagattggtcggccgtaagtaatgacaataacaatacccttgattttgggtttaattacattgatgccaccgtggataacgcgtttggaggaggagggagtagtaatcagatgtttccgctacaggatatgttcatgtacatgcagaagccttactagaagggaattcctttcctgccgccgaaacgcaacgcaaaacgaccctcgtttttgcgtttatggcaacacgagaccgttttatatggtcaatgagtgtgccgattcggccattagatttctgttcagtcttcgtttattctatagaccgtccgatttcagatcatccctaatcggacggtggtcgttggatgtatcagtagtgtattactgtgttaggtagaagaaaatccacttgttcttaaattggcataaaagtcagaagctaatatttatatgtgcc

SEQ ID NO: 103033 - protein, 289 aa, Arabidopsis thaliana; identical to SEQ ID NO: 34865
  peptide (1)..(289): Ceres Seq. ID no. 13611830

SEQ ID NO: 103034 - protein, 268 aa, Arabidopsis thaliana; identical to SEQ ID NO: 34866
  peptide (1)..(268): Ceres Seq. ID no. 13611831

SEQ ID NO: 103035 - protein, 164 aa, Arabidopsis thaliana; identical to SEQ ID NO: 34867
  peptide (1)..(164): Ceres Seq. ID no. 13611832

SEQ ID NO: 103036 - DNA, 1511 bp, Arabidopsis thaliana
  misc_feature (1)..(1511): Ceres Seq. ID no. 13611837
  misc_feature (1)..(1511): Ortholog of  Ceres SEQ ID NO 14307288 as cited in SEQ ID NO 54318
gtacgccaaatatctaacaaggagctctttagattgagactagtggaagagagacgagcaaggaattagcaatggcggcggatttgccggaggcgacagtacagaacattctggaccaagagtctcttaaatgggttttcgtcggaggtaaaggaggtgttgggaagacgacatgcagttcaattctcgcaatttgtctcgccagtgttcgatcctccgttctcatcatctccaccgatcctgctcacaatcttagtgatgcctttcagcaacgcttcactaaatctcccactttggttcaaggtttctctaatctctttgccatggaggtagatcctaccgttgaaactgatgacatggctggtacagacgggatggatggtttattctctgatttggcaaatgcgattcctggaatcgatgaggctatgagttttgctgagatgttgaagttggtgcaaacaatggattatgctactattgtgtttgacactgctcctactggacatactctccgcctgttacagtttccggccacactagaaaagggactttcgaagttgatgtcattgaagagtagatttggtggcttgatgactcagatgagccgtatgtttggcatggaggatgagttcggagaggatgctttgctgggaagacttgagggcttgaaagatgtgattgagcaagtaaatcggcaattcaaagacccggatatgactacgttcgtttgtgtctgcatccccgagttcttgtctctctatgaaacagagagacttgttcaggaactcgccaagtttgagattgacacgcataacattatcatcaaccaagtactatacgacgacgaagatgtggagtccaagttgctcagagcaaggatgcggatgcaacagaagtatcttgatcagttttatatgctatacgatgactttaatatcacaaagcttcctctgcttccggaagaggtgacaggggttgaagccttaaaggcgttttcacataagttcttgacgccgtaccatcctaccactagcaggagcaatgtagaggagctggagaggaaagtacacacattgcgtttgcagttaaaaacagctgaagaagaactcgaacgggtcaagagtggctaaagataaggctctgttcttccctttaattgtggaaaattaaaactgaatctttttctctctagttcttcatctagcaacaactctttataggacaggaaagaagatcaagcagaatcttcttttgcgttgttttattgttatgcattggatttgtttttatatttgtaataatcatgactacatagactcatatctaccaagaaatcgttgttttacgacttaatcagctttttatatattaagttgaagggtatctgtgacaagcgaatgctatgatctcttgtaacagctttttatatactgtagactggtcttgcaacagagaaggaaaattcatgtaaaaaaattatagtaaataagagatgttttgatttattg

SEQ ID NO: 103037 - protein, 353 aa, Arabidopsis thaliana
  peptide (1)..(353): Ceres Seq. ID no. 13611838
MAADLPEATVQNILDQESLKWVFVGGKGGVGKTTCSSILAICLASVRSSVLIISTDPAHNLSDAFQQRFTKSPTLVQGFSNLFAMEVDPTVETDDMAGTDGMDGLFSDLANAIPGIDEAMSFAEMLKLVQTMDYATIVFDTAPTGHTLRLLQFPATLEKGLSKLMSLKSRFGGLMTQMSRMFGMEDEFGEDALLGRLEGLKDVIEQVNRQFKDPDMTTFVCVCIPEFLSLYETERLVQELAKFEIDTHNIIINQVLYDDEDVESKLLRARMRMQQKYLDQFYMLYDDFNITKLPLLPEEVTGVEALKAFSHKFLTPYHPTTSRSNVEELERKVHTLRLQLKTAEEELERVKSG

SEQ ID NO: 103038 - protein, 269 aa, Arabidopsis thaliana
  peptide (1)..(269): Ceres Seq. ID no. 13611839
MEVDPTVETDDMAGTDGMDGLFSDLANAIPGIDEAMSFAEMLKLVQTMDYATIVFDTAPTGHTLRLLQFPATLEKGLSKLMSLKSRFGGLMTQMSRMFGMEDEFGEDALLGRLEGLKDVIEQVNRQFKDPDMTTFVCVCIPEFLSLYETERLVQELAKFEIDTHNIIINQVLYDDEDVESKLLRARMRMQQKYLDQFYMLYDDFNITKLPLLPEEVTGVEALKAFSHKFLTPYHPTTSRSNVEELERKVHTLRLQLKTAEEELERVKSG

SEQ ID NO: 103039 - protein, 258 aa, Arabidopsis thaliana
  peptide (1)..(258): Ceres Seq. ID no. 13611840
MAGTDGMDGLFSDLANAIPGIDEAMSFAEMLKLVQTMDYATIVFDTAPTGHTLRLLQFPATLEKGLSKLMSLKSRFGGLMTQMSRMFGMEDEFGEDALLGRLEGLKDVIEQVNRQFKDPDMTTFVCVCIPEFLSLYETERLVQELAKFEIDTHNIIINQVLYDDEDVESKLLRARMRMQQKYLDQFYMLYDDFNITKLPLLPEEVTGVEALKAFSHKFLTPYHPTTSRSNVEELERKVHTLRLQLKTAEEELERVKSG

SEQ ID NO: 103040 - DNA, 1662 bp, Arabidopsis thaliana
  misc_feature (1)..(1662): Ceres Seq. ID no. 13611845
  misc_feature (1)..(1662): Ortholog of  Ceres SEQ ID NO 13656435 as cited in SEQ ID NO 65853
ctcccgacgccattatccttcaccctcggagcttttcttgaagcagggattcttctaatcattaatccctacttctttctttcttttttgtttgttctcctttgagatctatctagtactagtagtaaaaccccctcccctccattgaatttgaattgaattgaatctctgggaatcaaatctttgatgtcgcatctggacgacattccttctacgcctgggaaattcaagatgatggataaatcccccttcttcctgcaccgtactcgttggcaatcctccgtcgccaagcttgccttttggtcccttgtctttttcggattgctcttcatcttcttctaccgatctcccatctccaatcccgattcctctcgccgctctcttcgcacctactcttggggcggtcccgcctgggagaaacgcgtccgatcctccgctcgtgtccgcacccgcaacggcgtctccgttctcgtcaccggggccgccggtttcgtcgggactcacgtctctgccgctcttaaacgacgcggcgacggcgttctaggcctcgacaacttcaacgattactacgacacctctctcaagagatctcgacaagccctcctcgagagaagcggagtgttcatcgttgaaggagacatcaacgatctgtctctcctcaagaagctcttcgaggtcgtccctttcactcacgtcatgcatcttgccgctcaagctggtgtcagatacgccatggagaaccccggctcctacgttcacagcaacatcgctggtttcgttaacctcctcgaggtctgtaaatccgctaatcctcagccggcgatcgtgtgggcatcgtctagctccgtctacggtttaaacaccaaagtccccttctctgagaaagacagaacagatcagcctgcgagtctctacgctgcgaccaagaaagctggagaagagattgcccacacttacaaccacatctacgggctctctctcaccggcttgaggtttttcacggtgtacgggccgtggggaagacctgacatggcttacttcttcttcaccagagacatcctcaaagggaaagctatttcgatcttcgaaggagccaatcacggaacagtggctagggatttcacatacatcgatgacatagtgaaaggatgtttgggggctctggacacggcggagaagagcacagggagtggtggcaagaagcggggagcggctcagctaagggtattcaacctggggaacacatctccggtgccggtgacggatcttgtgagtatattggagagattgttgaaagtgaaagccaagaggaacatgatgaagctgccgaggaatggtgatgtgcccttcacacatgctaatatcagttcggcacagagagagtttgggtacaaaccaagcacggatttgcagactggtctaaagaagtttgtgagatggtatcttggttactacaagcaggggggaaagaaagttgctgctgctgcttgaatattgataattcacaagattctttagtgtatagtgagtgagtggattgatacacaccataaagaagagacatgattcattcgagattatatattctttacatttgtattctgctttgtaatttcgatctcttgagtcgaatctctgatatttatttcataggaagttcac

SEQ ID NO: 103041 - protein, 434 aa, Arabidopsis thaliana; identical to SEQ ID NO: 40836
  peptide (1)..(434): Ceres Seq. ID no. 13611846

SEQ ID NO: 103042 - protein, 419 aa, Arabidopsis thaliana; identical to SEQ ID NO: 40837
  peptide (1)..(419): Ceres Seq. ID no. 13611847

SEQ ID NO: 103043 - protein, 418 aa, Arabidopsis thaliana; identical to SEQ ID NO: 40838
  peptide (1)..(418): Ceres Seq. ID no. 13611848

SEQ ID NO: 103044 - DNA, 1365 bp, Arabidopsis thaliana
  misc_feature (1)..(1365): Ceres Seq. ID no. 13611852
  misc_feature (1)..(1365): Ortholog of  Ceres SEQ ID NO 13586135 as cited in SEQ ID NO 1210
  misc_feature (1)..(1365): Ortholog of  Ceres SEQ ID NO 13654329 as cited in SEQ ID NO 68717
aagcctctctctgtctcttcctagaaaagaaaactttgtaccttttccaaagtctaagcaaatcattgtttttgattactggaactcgttgagggattgagaaaaaaataatcagaagagaaagatccatggctgataattgtatcagacttcttcactcagcctctgttttcttctgtttagggcttctaatttcatccttcaacttgttgcagggtattgcagctgaaaatctttccaagcagaaactgacctcatggattcttcagaatgagattgtaaaggaagtcaatgagaatccaaacgctggatggaaagcttctttcaatgatcggtttgcaaacgccactgttgcagagtttaagcgccttcttggtgttaaaccaacaccaaagacggaatttttgggtgtgcctattgtaagccatgatatatctttgaagcttccaaaagaatttgatgctagaaccgcttggtcacagtgcaccagtattggaaggatcttagatcagggtcactgtggttcttgctgggcctttggtgctgttgaatcactgtctgacagattctgcatcaaatataacatgaatgtttctttatctgtcaatgatcttttagcatgttgtggattcctttgcggtcaaggttgtaatggtggatacccaattgctgcgtggcggtactttaagcaccacggtgtagtcactgaagagtgtgatccatacttcgacaatactggttgctcgcacccgggatgtgaacccgcttaccctacaccaaaatgtgcaaggaaatgtgttagcggaaaccagctttggcgtgaatcaaaacattatggtgttagtgcgtacaaggtcagatctcaccctgatgacattatggcagaagtttacaaaaatggacctgttgaggttgccttcactgtttacgaggactttgcgcattacaaatctggagtgtacaagcacataacaggtactaacattggaggtcatgctgttaaacttattggctggggaacttctgatgacggtgaagattattggttgcttgcaaatcaatggaaccgaagctggggtgatgatgggtacttcaagatcaggagaggaacaaacgaatgtggcattgaacatggtgttgtagctggtttaccttcagacaggaacgtagttaaaggtattactacttcagatgatcttcttgtttcctcattttaaacaggaatatgtgtctctactctgtaatacataatttcccactgtgttgttgttaccaatgaaataaaacgactttcaacccaaaaagaagtctattgtatataccatttagctttttgttcatattcaatataatgtgttgttgttt

SEQ ID NO: 103045 - protein, 362 aa, Arabidopsis thaliana; identical to SEQ ID NO: 22660
  peptide (1)..(362): Ceres Seq. ID no. 13611853

SEQ ID NO: 103046 - protein, 210 aa, Arabidopsis thaliana; identical to SEQ ID NO: 22661
  peptide (1)..(210): Ceres Seq. ID no. 13611854

SEQ ID NO: 103047 - DNA, 822 bp, Arabidopsis thaliana
  misc_feature (1)..(822): Ceres Seq. ID no. 13611855
  misc_feature (1)..(822): Ortholog of  Ceres SEQ ID NO 13599568 as cited in SEQ ID NO 509
  misc_feature (1)..(822): Ortholog of  Ceres SEQ ID NO 13638595 as cited in SEQ ID NO 52050
  misc_feature (1)..(822): Ortholog of  Ceres SEQ ID NO 13594748 as cited in SEQ ID NO 52114
  misc_feature (1)..(822): Ortholog of  Ceres SEQ ID NO 12623490 as cited in SEQ ID NO 61136
  misc_feature (1)..(822): Ortholog of  Ceres SEQ ID NO 12583993 as cited in SEQ ID NO 68098
  misc_feature (1)..(822): Ortholog of  Ceres SEQ ID NO 13654535 as cited in SEQ ID NO 68227
atagttaaataaaattcatcttttcacggatatatttaatttggagccatgatgaattcaagaatttctattatcattgcgttatcttgcattatgatcacttcaattcgtgcatacgatcccgacgctcttcaagatctctgcgttgccgataaatctcacggaaccaaactgaatggatttccgtgcaaggaaacattaaacatcacggagtccgacttcttcttcgccggaatctcaaaacccgccgtcataaactctacgatgggttcggccgtaacaggagccaacgtggaaaagatcccaggcctcaacactctctccgtctccttagcacgtatagactacgcgccgggaggtttaaacccaccgcacactcacccacgcgccaccgaagtcgtctacgttctagaaggagagcttgaggttggatttatcacaacagcgaataagcttttcactaaaaccataaagattggtgaagttttcgtttttccaagagggcttgtgcattttcaaaagaacaatgggaaatctcccgcgtcggttttgtcggcatttaatagtcagttgccgggaacggcttctgttgcggcaaccctatttgcggcagagccggctttgccggaagatgtgttaactaagacttttcaagtgggatctaagatggttgataagattaaggaaaggcttgccactaaaaaataattcataaaagtttaaaaaaaaaataaaaacatgaaaatataatgtaaccgttacctagaaagattttatttaacactactgtattgaataaaaaggtgttactgtgattatctt

SEQ ID NO: 103048 - protein, 219 aa, Arabidopsis thaliana
  peptide (1)..(219): Ceres Seq. ID no. 13611856
MMNSRISIIIALSCIMITSIRAYDPDALQDLCVADKSHGTKLNGFPCKETLNITESDFFFAGISKPAVINSTMGSAVTGANVEKIPGLNTLSVSLARIDYAPGGLNPPHTHPRATEVVYVLEGELEVGFITTANKLFTKTIKIGEVFVFPRGLVHFQKNNGKSPASVLSAFNSQLPGTASVAATLFAAEPALPEDVLTKTFQVGSKMVDKIKERLATKK

SEQ ID NO: 103049 - protein, 218 aa, Arabidopsis thaliana
  peptide (1)..(218): Ceres Seq. ID no. 13611857
MNSRISIIIALSCIMITSIRAYDPDALQDLCVADKSHGTKLNGFPCKETLNITESDFFFAGISKPAVINSTMGSAVTGANVEKIPGLNTLSVSLARIDYAPGGLNPPHTHPRATEVVYVLEGELEVGFITTANKLFTKTIKIGEVFVFPRGLVHFQKNNGKSPASVLSAFNSQLPGTASVAATLFAAEPALPEDVLTKTFQVGSKMVDKIKERLATKK

SEQ ID NO: 103050 - protein, 204 aa, Arabidopsis thaliana
  peptide (1)..(204): Ceres Seq. ID no. 13611858
MITSIRAYDPDALQDLCVADKSHGTKLNGFPCKETLNITESDFFFAGISKPAVINSTMGSAVTGANVEKIPGLNTLSVSLARIDYAPGGLNPPHTHPRATEVVYVLEGELEVGFITTANKLFTKTIKIGEVFVFPRGLVHFQKNNGKSPASVLSAFNSQLPGTASVAATLFAAEPALPEDVLTKTFQVGSKMVDKIKERLATKK

SEQ ID NO: 103051 - DNA, 989 bp, Arabidopsis thaliana
  misc_feature (1)..(989): Ceres Seq. ID no. 13611863
  misc_feature (1)..(989): Ortholog of  Ceres SEQ ID NO 14307280 as cited in SEQ ID NO 59443
  misc_feature (1)..(989): Ortholog of  Ceres SEQ ID NO 14316536 as cited in SEQ ID NO 60272
  misc_feature (1)..(989): Ortholog of  Ceres SEQ ID NO 13597264 as cited in SEQ ID NO 63897
  misc_feature (1)..(989): Ortholog of  Ceres SEQ ID NO 13598570 as cited in SEQ ID NO 65434
  misc_feature (1)..(989): Ortholog of  Ceres SEQ ID NO 13656452 as cited in SEQ ID NO 65745
  misc_feature (1)..(989): Ortholog of  Ceres SEQ ID NO 13660333 as cited in SEQ ID NO 67464
  misc_feature (1)..(989): Ortholog of  Ceres SEQ ID NO 13596238 as cited in SEQ ID NO 68834
  misc_feature (1)..(989): Ortholog of  Ceres SEQ ID NO 15174329 as cited in SEQ ID NO 0
atcaagatcgatccctctctaaaaatggctcaacaacactcttttctcctcttatgcttcttcctctcaatctcttatttactatcttccgcccaaaccgaagccacctcaatcgagagattagtgccaagagacctctacaacaaaattttcatccacaaggacaataccgcttgtcccgcaaatggtttctacacttacgaatcatttgtccaagcgacgaggcggtttccgagattcgggagcgtaggaagccccgtgacacaacgactcgaagtggctgcatttttggctcagatttcacacgagacgaccggaggatgggcaacggcaccagacggaccgtacgcttggggattatgctttaaagaagaagtgagtccacaaagcacttattgtgattcttctgatacacagtggccttgtttccctaacaagacttatcaaggaagaggtccaattcaactatcgtggaactacaattacggaccggccggtcgagccttaggattcgacggtctaaggaatccagaaacggtgtcaaataattcagtgatagcttttcaaacagcactttggttttggatgacgccacagagtcccaaaccttcgtgccatgacgtcatgatcggaaaataccgacctacggcggcggatttggcagctaaccggaccggcgggtttggtttaaccacaaatataataaatggcggtttagagtgtgggattcctggagacggacgggtcaatgaccgaatcgggttttttcagagatatactgggctgtttaaagtagcaactgggccgaatttggactgtgaaaatcaaaggccttatgcttaaacaattaatttggttgacccgaaatatgtatgtttataaacaaaaagtcaacatgtatgtttatggcattgcccacacatggagccataaaaggggtttatattcaataatgtaattcaatttaatgtgatttgatggttttgatt

SEQ ID NO: 103052 - protein, 280 aa, Arabidopsis thaliana
  peptide (1)..(280): Ceres Seq. ID no. 13611864
IKIDPSLKMAQQHSFLLLCFFLSISYLLSSAQTEATSIERLVPRDLYNKIFIHKDNTACPANGFYTYESFVQATRRFPRFGSVGSPVTQRLEVAAFLAQISHETTGGWATAPDGPYAWGLCFKEEVSPQSTYCDSSDTQWPCFPNKTYQGRGPIQLSWNYNYGPAGRALGFDGLRNPETVSNNSVIAFQTALWFWMTPQSPKPSCHDVMIGKYRPTAADLAANRTGGFGLTTNIINGGLECGIPGDGRVNDRIGFFQRYTGLFKVATGPNLDCENQRPYA

SEQ ID NO: 103053 - protein, 272 aa, Arabidopsis thaliana
  peptide (1)..(272): Ceres Seq. ID no. 13611865
MAQQHSFLLLCFFLSISYLLSSAQTEATSIERLVPRDLYNKIFIHKDNTACPANGFYTYESFVQATRRFPRFGSVGSPVTQRLEVAAFLAQISHETTGGWATAPDGPYAWGLCFKEEVSPQSTYCDSSDTQWPCFPNKTYQGRGPIQLSWNYNYGPAGRALGFDGLRNPETVSNNSVIAFQTALWFWMTPQSPKPSCHDVMIGKYRPTAADLAANRTGGFGLTTNIINGGLECGIPGDGRVNDRIGFFQRYTGLFKVATGPNLDCENQRPYA

SEQ ID NO: 103054 - DNA, 1787 bp, Arabidopsis thaliana
  misc_feature (1)..(1787): Ceres Seq. ID no. 13611866
  misc_feature (1)..(1787): Ortholog of  Ceres SEQ ID NO 13658728 as cited in SEQ ID NO 66270
  misc_feature (1)..(1787): Ortholog of  Ceres SEQ ID NO 12465428 as cited in SEQ ID NO 68898
atccttacaacaaaaatgaatttccgtaatctgattgcttccggttctcgcctcggcaagaggttctgtgcaacggtatttgctccggcgtcggcgactggcatcgtcgaagcctctgtttcttctccagcggcggcgaatgtcgtcgaagcctctgtttcttctccggcggcggagaatggcgtcagaacctctgttgctgctccgacggtggcttcaaggcagcgagagttgtacaagaaactttctatgcttagtgtgacgggaggaacagtggcagagacgttaaatcagttcatcatggagggtattactgtcagaaaagacgatctctttcgctgtgctaaaacccttcgcaaattccgtcgacctcaacacgcttttgagatctttgattggatggagaagaggaaaatgacattttctgtgtctgatcatgcaatttgtttggatctaattggaaagactaaaggtttagaagcagctgagaactactttaacaacttagatccttctgcaaagaatcatcagtcgacttatggggcgctcatgaactgttactgtgttgaacttgaggaagagaaagcaaaggctcattttgagataatggatgagcttaactttgttaacaattcgttaccgtttaataacatgatgtctatgtacatgcggttgagtcaaccggagaaggtacctgtgttggttgatgcgatgaaacagaggggtatatctccttgtggtgtcacttactctatatggatgcagagctgtggaagtttgaatgacttagatggattagagaagattatagatgagatggggaaagacagtgaagctaaaaccacttggaatactttctctaatctggctgcaatctacactaaagctggtctttacgagaaggcggattctgcactgaaatctatggaggagaaaatgaatcctaacaaccgtgattcccaccattttctcatgagtttgtacgctggaatctcgaaaggtcctgaggtttatagggtttgggaatcgctgaagaaggctcgtcctgaggtcaacaacttgagctatctagtcatgttacaagcgatgagtaaactaggcgacttagatgggattaagaagattttcacagagtgggaatcgaaatgctgggcttacgatatgaggctggctaatatcgcgattaacacgtatttgaaagggaatatgtatgaagaagcagagaagattcttgatggtgccatgaaaaagtctaaaggtcctttctccaaagcgagacagcttctgatgatccatctgttggagaacgataaagcggatttggctatgaagcatttggaagcagcggtttctgattctgcagagaacaaagacgaatggggctggagctcagagctggtcagcttgtttttccttcactttgagaaagctaaagatgttgatggagcggaagatttctgcaagattttgtcgaattggaaacctcttgattctgaaactatgacatttctcataaagacttatgcagcagcagagaagactagtcctgatatgcgagagagattgtctcaacagcagatcgaagtaagcgaggagatccaagacttgcttaaaacagtttgtccctaaactaagtaataaatgtgattagcacgttatgtttaaacttgtgtcccgtttagagtttccagttccagaaaacaaagcttagttctttttttaagtctttgacatatgtgtcggttacatagtggaagatctcataaacaattaagtgtttctttcat

SEQ ID NO: 103055 - protein, 542 aa, Arabidopsis thaliana
  peptide (1)..(542): Ceres Seq. ID no. 13611867
ILTTKMNFRNLIASGSRLGKRFCATVFAPASATGIVEASVSSPAAANVVEASVSSPAAENGVRTSVAAPTVASRQRELYKKLSMLSVTGGTVAETLNQFIMEGITVRKDDLFRCAKTLRKFRRPQHAFEIFDWMEKRKMTFSVSDHAICLDLIGKTKGLEAAENYFNNLDPSAKNHQSTYGALMNCYCVELEEEKAKAHFEIMDELNFVNNSLPFNNMMSMYMRLSQPEKVPVLVDAMKQRGISPCGVTYSIWMQSCGSLNDLDGLEKIIDEMGKDSEAKTTWNTFSNLAAIYTKAGLYEKADSALKSMEEKMNPNNRDSHHFLMSLYAGISKGPEVYRVWESLKKARPEVNNLSYLVMLQAMSKLGDLDGIKKIFTEWESKCWAYDMRLANIAINTYLKGNMYEEAEKILDGAMKKSKGPFSKARQLLMIHLLENDKADLAMKHLEAAVSDSAENKDEWGWSSELVSLFFLHFEKAKDVDGAEDFCKILSNWKPLDSETMTFLIKTYAAAEKTSPDMRERLSQQQIEVSEEIQDLLKTVCP

SEQ ID NO: 103056 - protein, 537 aa, Arabidopsis thaliana
  peptide (1)..(537): Ceres Seq. ID no. 13611868
MNFRNLIASGSRLGKRFCATVFAPASATGIVEASVSSPAAANVVEASVSSPAAENGVRTSVAAPTVASRQRELYKKLSMLSVTGGTVAETLNQFIMEGITVRKDDLFRCAKTLRKFRRPQHAFEIFDWMEKRKMTFSVSDHAICLDLIGKTKGLEAAENYFNNLDPSAKNHQSTYGALMNCYCVELEEEKAKAHFEIMDELNFVNNSLPFNNMMSMYMRLSQPEKVPVLVDAMKQRGISPCGVTYSIWMQSCGSLNDLDGLEKIIDEMGKDSEAKTTWNTFSNLAAIYTKAGLYEKADSALKSMEEKMNPNNRDSHHFLMSLYAGISKGPEVYRVWESLKKARPEVNNLSYLVMLQAMSKLGDLDGIKKIFTEWESKCWAYDMRLANIAINTYLKGNMYEEAEKILDGAMKKSKGPFSKARQLLMIHLLENDKADLAMKHLEAAVSDSAENKDEWGWSSELVSLFFLHFEKAKDVDGAEDFCKILSNWKPLDSETMTFLIKTYAAAEKTSPDMRERLSQQQIEVSEEIQDLLKTVCP

SEQ ID NO: 103057 - protein, 459 aa, Arabidopsis thaliana
  peptide (1)..(459): Ceres Seq. ID no. 13611869
MLSVTGGTVAETLNQFIMEGITVRKDDLFRCAKTLRKFRRPQHAFEIFDWMEKRKMTFSVSDHAICLDLIGKTKGLEAAENYFNNLDPSAKNHQSTYGALMNCYCVELEEEKAKAHFEIMDELNFVNNSLPFNNMMSMYMRLSQPEKVPVLVDAMKQRGISPCGVTYSIWMQSCGSLNDLDGLEKIIDEMGKDSEAKTTWNTFSNLAAIYTKAGLYEKADSALKSMEEKMNPNNRDSHHFLMSLYAGISKGPEVYRVWESLKKARPEVNNLSYLVMLQAMSKLGDLDGIKKIFTEWESKCWAYDMRLANIAINTYLKGNMYEEAEKILDGAMKKSKGPFSKARQLLMIHLLENDKADLAMKHLEAAVSDSAENKDEWGWSSELVSLFFLHFEKAKDVDGAEDFCKILSNWKPLDSETMTFLIKTYAAAEKTSPDMRERLSQQQIEVSEEIQDLLKTVCP

SEQ ID NO: 103058 - DNA, 639 bp, Arabidopsis thaliana
  misc_feature (1)..(639): Ceres Seq. ID no. 13611892
  misc_feature (1)..(639): Ortholog of  Ceres SEQ ID NO 14305657 as cited in SEQ ID NO 52544
cagcacaaaaaaaccctaatttcttcacaaattcagcggcgatgaagttcaatccgcgtgtgagctcttctcgccggaagaacaggaaggctcacttcacagctccttcaagcgtgaggcgcgttctcatgagctcgccgttatccaaggatctccgtaacaaacacaacgtcagatccatgccgattcgtaaagacgacgaagtgcaagttgttcgtgggacgttcaagggaagagaagggaaggtgatgcaggtgtatcgccgcaagtgggtgattcacatcgagagaatcacaagggagaaagtcaacggatccacggtcaacgtcggagtcaatgcttcgaatgtgatgatcactaagctccgtctcgataaggataggaagtcgcttttggagcgtaaggctaatggacgcgccgccgccgataaggagaagggaaccaagttttcagccgaagatgtcatggagaacgtagattgatcttaacgtatggttttttcttcttcttttctagttttctattttgatttcattgatgatgatatgattcagaattcgaagttgaattttgtggttttcttatcaatgtacctcatttatgcttatatttctagctattgaaattggactgagattt

SEQ ID NO: 103059 - protein, 159 aa, Arabidopsis thaliana
  peptide (1)..(159): Ceres Seq. ID no. 13611893
AQKNPNFFTNSAAMKFNPRVSSSRRKNRKAHFTAPSSVRRVLMSSPLSKDLRNKHNVRSMPIRKDDEVQVVRGTFKGREGKVMQVYRRKWVIHIERITREKVNGSTVNVGVNASNVMITKLRLDKDRKSLLERKANGRAAADKEKGTKFSAEDVMENVD

SEQ ID NO: 103060 - protein, 146 aa, Arabidopsis thaliana; identical to SEQ ID NO: 26350
  peptide (1)..(146): Ceres Seq. ID no. 13611894

SEQ ID NO: 103061 - protein, 117 aa, Arabidopsis thaliana; identical to SEQ ID NO: 26351
  peptide (1)..(117): Ceres Seq. ID no. 13611895

SEQ ID NO: 103062 - DNA, 1132 bp, Arabidopsis thaliana
  misc_feature (1)..(1132): Ceres Seq. ID no. 13611896
  misc_feature (1)..(1132): Ortholog of  Ceres SEQ ID NO 13594341 as cited in SEQ ID NO 57917
  misc_feature (1)..(1132): Ortholog of  Ceres SEQ ID NO 13656441 as cited in SEQ ID NO 65703
aagtttttgatttcagagtccaccgttgagcctgttcaattaaatcgttgaatctcgcggtgcgttttactttgattctttcgaattttttttatatggatgttgccgcgatggcgagatgtgtgggaaggtgctacgtttcgccggcgttcggtgagtctgaatcgcaccggttatcggagcggcggtttctgaaattgtctagctccacgaattcggatcccgccggtagtaaaagtttgaagcttcgcgggaaaattcatcggagaatgagctacttccgtccgatcatggcaaaagatgaatccatttcatcgcggtccggtgaaacgaagcaaatcaatggaaagcaaaagaacattgtctggcatgattgtcccgttactaaatccgacaggcaagaattaattaagcaaaagggatgtgtgatttggattactggcttaagtggttcaggtaaaagtagtctggcatgtgctcttagtcgagctttgcacaatcgtggaaagctttcgtatatacttgatggtgacaatgttcgacatggtttaaacagcgatcttagtttcgaagcagatgatcgagctgaaaacattcgaagagttggtgaagtggctaaactgtttgcagattctggtattatctgtattgcaagtttaatatctccttaccggatagaacgagctgcctgccgtgcattattaccacaaggagatttcattgaggtatttatggatgtgccactccatgtttgtgaagctagagatccaaagggcttatacaaacgtgcacgcgctggtaaaatcaaaggttttacaggagtagatgatccatatgaagcgcctttggattgcgagattgtaatacaaaacagtagagacaaggggctttcttcttcatcttcatcttcatcttcaccttcatcttcgtcttcttctctgtgtgaaatggcagatattgttgtgtcgtacttggaccaaaatggatacctgaagaaacactccacaaaatcacgtaattgtatgtaaatgtaatattaatatcattgttgtaacgtttcttaaacctattttacctatggacgattaaattgtgaaaacataaatgtaattcacaatctgcaaagagttgg

SEQ ID NO: 103063 - protein, 310 aa, Arabidopsis thaliana; identical to SEQ ID NO: 41933
  peptide (1)..(310): Ceres Seq. ID no. 13611897

SEQ ID NO: 103064 - protein, 305 aa, Arabidopsis thaliana; identical to SEQ ID NO: 41934
  peptide (1)..(305): Ceres Seq. ID no. 13611898

SEQ ID NO: 103065 - protein, 252 aa, Arabidopsis thaliana; identical to SEQ ID NO: 41935
  peptide (1)..(252): Ceres Seq. ID no. 13611899

SEQ ID NO: 103066 - DNA, 708 bp, Arabidopsis thaliana
  misc_feature (1)..(708): Ceres Seq. ID no. 13611900
  misc_feature (1)..(708): Ortholog of  Ceres SEQ ID NO 15170822 as cited in SEQ ID NO 52758
  misc_feature (1)..(708): Ortholog of  Ceres SEQ ID NO 12611129 as cited in SEQ ID NO 55967
  misc_feature (1)..(708): Ortholog of  Ceres SEQ ID NO 12584296 as cited in SEQ ID NO 67866
  misc_feature (1)..(708): Ortholog of  Ceres SEQ ID NO 15178857 as cited in SEQ ID NO 0
acagaagtagaagaaaccaaagcgaaatcaaaaagctcagcaattttccagatttctctaattgacgatggcgctttgtgctactactcaaaggactatccgtatagcggcgacgctccggcgtgttgctcgacctttcgctactgacgcggtggttgagtcggattacaagcgtggtgagatcggtaaggtctccggaatcccagaggagcatctttctcgcaaggtgataatatactcacctgctagaacagctacccagtcaggatctggaaaactcggaaaatggaagattaacttcgtctccaccttaaagtgggagaatccgttgatgggatggacttctacaggtgacccctatgctaatgttggtgactctgctcttgcttttgattctgaagaagctgctaagtcttttgctgagcgtcatggttgggattataaggtcaagaagcccaacacaccattattgaaggtcaagtcttactcggacaacttcaagtggaaaggcaatcctcaaccagaaaactgatgttacaccttcttccaattcttctcgagcaaaagaagaaacctcatttgatattaattctcatgtttctttgttattttagcatctgtgagctttttggttgaaaagaaccattatccatggctatgtttacttattacaataatatgatgatgatgatgaaacacactcctttg

SEQ ID NO: 103067 - protein, 154 aa, Arabidopsis thaliana; identical to SEQ ID NO: 21064
  peptide (1)..(154): Ceres Seq. ID no. 13611901

SEQ ID NO: 103068 - DNA, 1487 bp, Arabidopsis thaliana
  misc_feature (1)..(1487): Ceres Seq. ID no. 13611906
  misc_feature (1)..(1487): Ortholog of  Ceres SEQ ID NO 13594104 as cited in SEQ ID NO 55505
aacccaacgataaaacgcaggagccatagaagaataacagataaaactctctgtgtgagtgagtgagactcaaccatggcgtctttggctcagcaattctcgggattgagatgttccccactctcttcttcttctaggttatcgaggagagcttcgaagaactttccccagaacaaatctgcctctgtttctccgactattgtcgccgcggttgcaatgtctagcggtcaaacaaaggagcgtcttgagctgaagaagatgttcgaagatgcttatgaacgatgtagaacttctcctatggaaggtgttgctttcaccgtcgacgatttcgctgctgctattgaacaatacgacttcaattccgaaatcggcactagggtaaaaggaacagtgttcaagactgatgcaaatggtgcattagttgacatttctgcaaagtcatcggcttacttgtcggtagaacaagcgtgtattcatagaattaagcatgtggaagaagctggtattgtacctggtatggtggaagagtttgtcatcattggtgaaaatgaaagtgatgacagtttgctattgagcttaaggaatattcaatacgaacttgcttgggaacgttgcaggcagcttcaggctgaggatgttattgtcaaggctaaggttattggtgctaacaaaggtggattggttgctcttgtggaaggtcttcgtggatttgtgcccttttcgcagatatcatcgaaagcagcagctgaagagcttcttgaaaaagaaatacctcttaagtttgtggaggttgatgaggaacaaacaaagcttgtcctcagcaaccgtaaagctgtagcagatagccaagctcagcttggaattggatctgtggtcctcggagttgttcagagcttgaaaccttatggtgccttcattgacattggtggaatcaatgggcttcttcatgtcagtcagataagtcatgaccgtgtctcagatatcgcaactgttcttcagcctggtgacactttgaaggttatgatattgagtcacgaccgtgacagaggaagagtaagtctctccacaaagaagctggagccaacacctggtgatatgattcgtaacccaaaacttgtgttcgagaaggctgaggagatggctcagacattcagacagagaattgcgcaagcagaagccatggctcgtgcagacatgcttcgcttccaacctgagagtggactgacgctgagttctgacgggatactaggaccactcggatctgagttaccagatgatggcgtagatctaacggtcgacgacattccttctgcagttgatatttagattctaaagctttagtgtattttttcatacacaaaaacacctccttgagcttaattgaatatgtagtttacttcctacaagacattttatcatgtgtactttgtcttttgtaatcgatatgttctgttacaatgtcaagaaaccaaagaaaggctttgccc

SEQ ID NO: 103069 - protein, 416 aa, Arabidopsis thaliana; identical to SEQ ID NO: 26933
  peptide (1)..(416): Ceres Seq. ID no. 13611907

SEQ ID NO: 103070 - protein, 369 aa, Arabidopsis thaliana; identical to SEQ ID NO: 26934
  peptide (1)..(369): Ceres Seq. ID no. 13611908

SEQ ID NO: 103071 - protein, 355 aa, Arabidopsis thaliana; identical to SEQ ID NO: 26935
  peptide (1)..(355): Ceres Seq. ID no. 13611909

SEQ ID NO: 103072 - DNA, 1169 bp, Arabidopsis thaliana
  misc_feature (1)..(1169): Ceres Seq. ID no. 13611910
  misc_feature (1)..(1169): Ortholog of  Ceres SEQ ID NO 14316095 as cited in SEQ ID NO 52477
attcaataaattcttcttttcttgcattttcaactcaatctttatctcatgctttcgtcttcgtcttcgtcaacggtggagcaaccatcacgtggcggaagtccgggaatcaacgccgtgtcctccgatgttttacggtctaacatcctaacccgcctcgacggttcctctctcgccgccctaagctgcacgtgctccaacctaaactctttttgctccgacgagtccctctggaggcaacaatgttccgctacatggccttctacctcggatacacgtgtccaaagcatcatctcaacgttccccgacggtcaccggacgtttttttccgattcctttccgtttcttgaacatgatgttgggatcaatctcccaccgtccgttgatacctcggagttaatctcagccgttgatatattctacaaagatgacgtgattttctcaagggttcatgttacagagacagtctctggttggttcctttgctcacctatgcgtgtcgatcttgtcgaaccgaaagaactaattccgaccagagttttggttacggaccaatgtaaggatgacacgtggaaaagtgacttggaagagaatctctccttgagctggatactcattgacccgacatgtaaacgtgcggcggatgtatcaacccgtaaacctgtctcggtgcaccgtcattggttaaccggagaagtccacgtaaaattctcctctatttttgtcgtgggcaacaagaaaaggtcggagcaagtggagttcactgtaacggtggtgctggcggtgtttaaccggagggaagaggagacagcagtgatgcagataagagaggtgagcctagtagcagaggacaaggatgggaggaatttaggagggaaggttagtttggaaattttggtggcggccatggggatgaaacgtaggtttagggcgggaggggaagaagaagggaaagagaagtacatagaatatatggagaggaagaccgcgaaggcggagatgaagtggcggcgagggaaagaaacggctatggagacggcggcgtgctggatcgccgtcctcttacttggtttccttttgtgtttttatctgtttatgcataaaaatttagtagctattatgaaaaaactaataaaatagttaaataatatgttttgattcaaaacttc

SEQ ID NO: 103073 - protein, 363 aa, Arabidopsis thaliana
  peptide (1)..(363): Ceres Seq. ID no. 13611911
MLSSSSSSTVEQPSRGGSPGINAVSSDVLRSNILTRLDGSSLAALSCTCSNLNSFCSDESLWRQQCSATWPSTSDTRVQSIISTFPDGHRTFFSDSFPFLEHDVGINLPPSVDTSELISAVDIFYKDDVIFSRVHVTETVSGWFLCSPMRVDLVEPKELIPTRVLVTDQCKDDTWKSDLEENLSLSWILIDPTCKRAADVSTRKPVSVHRHWLTGEVHVKFSSIFVVGNKKRSEQVEFTVTVVLAVFNRREEETAVMQIREVSLVAEDKDGRNLGGKVSLEILVAAMGMKRRFRAGGEEEGKEKYIEYMERKTAKAEMKWRRGKETAMETAACWIAVLLLGFLLCFYLFMHKNLVAIMKKLIK

SEQ ID NO: 103074 - protein, 215 aa, Arabidopsis thaliana
  peptide (1)..(215): Ceres Seq. ID no. 13611912
MRVDLVEPKELIPTRVLVTDQCKDDTWKSDLEENLSLSWILIDPTCKRAADVSTRKPVSVHRHWLTGEVHVKFSSIFVVGNKKRSEQVEFTVTVVLAVFNRREEETAVMQIREVSLVAEDKDGRNLGGKVSLEILVAAMGMKRRFRAGGEEEGKEKYIEYMERKTAKAEMKWRRGKETAMETAACWIAVLLLGFLLCFYLFMHKNLVAIMKKLIK

SEQ ID NO: 103075 - DNA, 1647 bp, Arabidopsis thaliana
  misc_feature (1)..(1647): Ceres Seq. ID no. 13611931
  misc_feature (1)..(1647): Ortholog of  Ceres SEQ ID NO 14302251 as cited in SEQ ID NO 62093
gactcattgctcatatcttcttctcaattccaattttgtaatccttatctcaaattaatttctatttttataactacttaatctcaattagaagaagcctgctctctaataacaaaaaaaaaaagccgtttgggatttcttttacacgaacacattcttccgatctttcttgtttttaacttaccggtaataacgaagatatgcagaggtttttctccgccagatcgattctcggttacgccgtcaagacgcggaggaggtctttctcttctcgttcttcgtctctcctattcgacgacactcagttacagtttaaagaaagtgtatccaagtttgcgcaagataatatcgctcctcatgcagaaagaattgataaaactaattcatttccaaaggatgtaaacttatggaagctaatgggtgagtttaatctccatggaatcactgcgccagaggaatatggagggctaggtcttggttacttgtatcattgtattgcaatggaggaaatcagtcgggcctcgggttcagttgctttgtcttatggtgctcattccaacctttgcatcaatcaattggtgaggaatggaactgcagcccaaaaggaaaagtatttgccaaagcttatcagtggagagcatgttggtgctcttgcaatgagtgaacctaatgctggttcagatgttgttggcatgaaatgcaaggctgagaaggtagatggtggttatatactaaatggcaacaagatgtggtgcactaatggtccatctgctgaaacactggttgtttacgcgaaaactgatacaaaagcaggttccaaaggaatcacggctttcatcatagagaaaggaatgaccggattcagtactgctcagaaattggacaaactaggaatgcggggaagcgatacgtgtgagcttgtttttgagaattgcttcgttccagaggaaaatattctagacaaggaaggaaaaggagtgtatgttctgatgtcaggtctggatttggagagacttgttttagcagctgggcccttagggatcatgcaggcatgcctcgacaatgttcttccctatattcgccagagagaacaatttggtcgtccagttggggaatttcagtttatacagggtaaagttgctgatatgtacactgcattacaatcttcaaggtcatacgtttactctgttgcgagggactgtgacaatgggaaagttgacccaaaggactgcgccggaactattctttgtgcggccgagagagcaacgcaggtcgctttacaggcgatacaatgtttaggcggaaatggatacataaacgaatatgcaacaggacgccttctaagagatgcaaagctatatgaaatcggtgcagggacaagcgagatcagaaggattgtcatcggtcgcgagcttttcaaagaagaatagagataagtctgttttctgcattgccaatgcgacattttcattctgtacacgtatatataattcacagtgtccttaataacctcacaataagaaaaatagcttcaagcaatcctctagaaaccatatcaattattagtcacattatgtgtgacatgttatcacgataccagcatgccaatctaacactgacacttctggttaaacttactattttgtc

SEQ ID NO: 103076 - protein, 409 aa, Arabidopsis thaliana
  peptide (1)..(409): Ceres Seq. ID no. 13611932
MQRFFSARSILGYAVKTRRRSFSSRSSSLLFDDTQLQFKESVSKFAQDNIAPHAERIDKTNSFPKDVNLWKLMGEFNLHGITAPEEYGGLGLGYLYHCIAMEEISRASGSVALSYGAHSNLCINQLVRNGTAAQKEKYLPKLISGEHVGALAMSEPNAGSDVVGMKCKAEKVDGGYILNGNKMWCTNGPSAETLVVYAKTDTKAGSKGITAFIIEKGMTGFSTAQKLDKLGMRGSDTCELVFENCFVPEENILDKEGKGVYVLMSGLDLERLVLAAGPLGIMQACLDNVLPYIRQREQFGRPVGEFQFIQGKVADMYTALQSSRSYVYSVARDCDNGKVDPKDCAGTILCAAERATQVALQAIQCLGGNGYINEYATGRLLRDAKLYEIGAGTSEIRRIVIGRELFKEE

SEQ ID NO: 103077 - protein, 337 aa, Arabidopsis thaliana; identical to SEQ ID NO: 22500
  peptide (1)..(337): Ceres Seq. ID no. 13611933

SEQ ID NO: 103078 - protein, 309 aa, Arabidopsis thaliana; identical to SEQ ID NO: 22501
  peptide (1)..(309): Ceres Seq. ID no. 13611934

SEQ ID NO: 103079 - DNA, 1077 bp, Arabidopsis thaliana
  misc_feature (1)..(1077): Ceres Seq. ID no. 13611935
  misc_feature (1)..(1077): Ortholog of  Ceres SEQ ID NO 15177991 as cited in SEQ ID NO 53915
  misc_feature (1)..(1077): Ortholog of  Ceres SEQ ID NO 15174347 as cited in SEQ ID NO 58577
  misc_feature (1)..(1077): Ortholog of  Ceres SEQ ID NO 13596609 as cited in SEQ ID NO 63070
  misc_feature (1)..(1077): Ortholog of  Ceres SEQ ID NO 12616895 as cited in SEQ ID NO 63909
  misc_feature (1)..(1077): Ortholog of  Ceres SEQ ID NO 14302096 as cited in SEQ ID NO 68356
  misc_feature (1)..(1077): Ortholog of  Ceres SEQ ID NO 13598574 as cited in SEQ ID NO 69083
atgtcttcatcacctcttctttaacgcctctggctctgcatttctcagtctttttgcacaagaaacaaagctcaggaaaacctcaaaaccctaagctatgagaacaagcaaccatctcataggtttagtcaacttcctcactttcctcctctcaataccaatcctcggcggtggaatatggttaagcagccgagctaactccaccgactgtttaagattccttcaatggcctctcatcgtcatcggaatctcaatcatggtcgtatctttagctggattcgctggagcttgttaccgtaacaagttccttatgtggctatacctagtagtcatgcttctcatcatcgctgctcttatcggtttcatcatcttcgcttacgcggttacagataaaggatccggtcgaaccgtacttaaccggggttatcttgactattatcttgaagattactctggttggttgaaagatcgagtttctgatgatagctattggggtaaaattagttcttgtcttagagattctggtgcttgtagaaagattggaagaaattttaatggtgtacctgaaactgctgatatgttcttccttagaagacttagccctgttgagtccggttgttgcaagccaccaacagattgcggtttttcatatgtgaatgagaccggatgggacacgagaggagggatgataggaccgaaccaggactgtatggtgtggagcaacgaccagagcatgctctgttatcagtgtagttcttgtaaagctggtgttcttgggagtttgaagaagagttggagaaaagtatcggtgatcaacattgtggtacttatcattctagttatcttttacgttatcgcttatgcagcttataggaatgtcaagaggatcgataacgatgaaccggctggtgaagctaggatgacaaaatcacatcctagtcatttccatctttgatcaaaatttggaacagttcaaaaaaatgtatcgaggctttgatttatgtttaaaggttttagtacttttgtgtatgtttttggtatgtaacacatttttttgtgtgtatattatttatgttg

SEQ ID NO: 103080 - protein, 285 aa, Arabidopsis thaliana
  peptide (1)..(285): Ceres Seq. ID no. 13611936
MRTSNHLIGLVNFLTFLLSIPILGGGIWLSSRANSTDCLRFLQWPLIVIGISIMVVSLAGFAGACYRNKFLMWLYLVVMLLIIAALIGFIIFAYAVTDKGSGRTVLNRGYLDYYLEDYSGWLKDRVSDDSYWGKISSCLRDSGACRKIGRNFNGVPETADMFFLRRLSPVESGCCKPPTDCGFSYVNETGWDTRGGMIGPNQDCMVWSNDQSMLCYQCSSCKAGVLGSLKKSWRKVSVINIVVLIILVIFYVIAYAAYRNVKRIDNDEPAGEARMTKSHPSHFHL

SEQ ID NO: 103081 - protein, 232 aa, Arabidopsis thaliana
  peptide (1)..(232): Ceres Seq. ID no. 13611937
MVVSLAGFAGACYRNKFLMWLYLVVMLLIIAALIGFIIFAYAVTDKGSGRTVLNRGYLDYYLEDYSGWLKDRVSDDSYWGKISSCLRDSGACRKIGRNFNGVPETADMFFLRRLSPVESGCCKPPTDCGFSYVNETGWDTRGGMIGPNQDCMVWSNDQSMLCYQCSSCKAGVLGSLKKSWRKVSVINIVVLIILVIFYVIAYAAYRNVKRIDNDEPAGEARMTKSHPSHFHL

SEQ ID NO: 103082 - protein, 214 aa, Arabidopsis thaliana
  peptide (1)..(214): Ceres Seq. ID no. 13611938
MWLYLVVMLLIIAALIGFIIFAYAVTDKGSGRTVLNRGYLDYYLEDYSGWLKDRVSDDSYWGKISSCLRDSGACRKIGRNFNGVPETADMFFLRRLSPVESGCCKPPTDCGFSYVNETGWDTRGGMIGPNQDCMVWSNDQSMLCYQCSSCKAGVLGSLKKSWRKVSVINIVVLIILVIFYVIAYAAYRNVKRIDNDEPAGEARMTKSHPSHFHL

SEQ ID NO: 103083 - DNA, 1039 bp, Arabidopsis thaliana
  misc_feature (1)..(1039): Ceres Seq. ID no. 13611939
  misc_feature (1)..(1039): Ortholog of  Ceres SEQ ID NO 14312281 as cited in SEQ ID NO 59172
  misc_feature (1)..(1039): Ortholog of  Ceres SEQ ID NO 15174396 as cited in SEQ ID NO 0
aaacattgaaacactttgtcccactctctctctttctctttcttgtaccaaaagctttttgaatctccaagattatagcaaaaccaaagataaaatactaacttaaaagatttctgaaaataatgagttgcaatggttgtcgagttctacgaaaaggttgcagtgagaattgcatcctccgtccatgtattcaatggatcgaatcacctgaagctcaaggccacgccaccgtcttcgtcgctaagttcttcggccgtgccggtttaatgtctttcatctccgccgtaccggaatctcaatgccctgctttgtttcagtctttgctatacgaagcttgtgggagaactgtgaatccggtgaacggagccgtcggattgttgtggacggggaattggaatgtttgtcaagcggcggttgagacggtgcttcgtggtggttctttaaaaccaataccggagcttcttaacggcggtggattcgccgggtttccgtctcctacttccgacgaagcttcggagatctgtacggaaatgttgaatctacgaaaagctgatgattccggtgatcggaacatttatcatcactgccgattctcaagctctagatctagatcaagatcaacagcttctccgccgaaacggaaacgattatcgtcggaacaacaaccttcgtcggagcttgatctctctcttattcctatttatccgattaaaaccttgccgtttaaggaagatacaccgtcgatgtactcggaggagtctgttaccacggtttcgtttcaaaacaacaacgccggtgatcggtacgtacgctgcggcggaggaggaggaggagcaacgacaaagttgctcaatctcttcgcttgaacggcgtcgtttttgttatgagggttaaaaatgtaatttcgagtaactttttgttgtggccttttttggattaatagcccttaatattttgtgaaatgtagcaaattacgtgatttatttctctctttaattatgagaaattatccaaagtaatagagaataatgatataatt

SEQ ID NO: 103084 - protein, 247 aa, Arabidopsis thaliana; identical to SEQ ID NO: 30451
  peptide (1)..(247): Ceres Seq. ID no. 13611940

SEQ ID NO: 103085 - protein, 199 aa, Arabidopsis thaliana; identical to SEQ ID NO: 30452
  peptide (1)..(199): Ceres Seq. ID no. 13611941

SEQ ID NO: 103086 - DNA, 1664 bp, Arabidopsis thaliana
  misc_feature (1)..(1664): Ceres Seq. ID no. 13611942
  misc_feature (1)..(1664): Ortholog of  Ceres SEQ ID NO 14301587 as cited in SEQ ID NO 66080
atctgcattgttctccgcctctctctctcaaactcttcagtttgcaaaacccttaagaaggtgtgaattagtaagtaatggggaagaagaagtttattgataagaaaaaggcggcgactttcgagttgtgtcctcgtgatacgtcagacccaagatacagtgatgcaccaggtggtgataagatcttcttacgagttgatcaaaaccctgttaacatcaatggtttcattgaagaagatgaagaagattttagagttagggtatcctgatgatggttataattacttggagcatttgagagagattaagaatactggtggtggttctaatttctatgtgaatcctaagtatgaggttgctcagttacctcgtgatgttaaggcttatgatgcgtctcgtgtgaagatctctggtatggtgaatgaagaaggtaatgataataagttgatgtatagtgttgcgtccaagactgttaacgtcaaggtgcagaaagctattgatcctgaagttgctgcgttgcttgaaaacagtgatgggtctgagtttggttctgatgttgaggatttggaagaagattttgttgttcaagctaatcttactcaaaagggtgaatcttctggtgtgagcaatggagagctcgagttttctgtaagacgtgaggttagagaaagagaaagtgatgaacctgtggctgaaaacccgagagttcctcgtcaaattgatgagctatttgatcagctcgaactcaatgaatatggaagtgatagtgacggtgatggttacatagctgaagatggagaagaagaagaagaagaagacttcatggctcaagaagttcagaatcttattcatgggaaggcaaaagattatgagcttgaagaaaaatatatgaaccctgcggatatactgaagaacagtgactctgtcagagataaagaggaagtggacactgctgctcatgttatccgccgaactgtagaatatggtgaaaattttgataacgggaatgaagatgaatttgtagagctgactgaagaaagcagcgatgaaagcgagaagcatgattgtgaaaccatagtctcaacatactcgaatctcgataacctccctggtaaaatccttgctgcagagtcagctaggcagaagaagctgagtgaaacattagctaacgcattgagttcaaatggaagaatcattaatctccaagggagagagaggattcctgtcgagtttttacctggtaggagagctgaacaaaccgatgtcaaagcggaaatcccaaaagctgaaccgatcaagaggaagactcatggtcaagagtcgaaagaagagaagaaagagcggaaaaatgctgtaaaagccgaaaagcgagaagcaaggataattaagaaacagacaaagatgctgtattgcggtgaaacgcagcgtgctcaaagagctgttgctacctctggtccatcgtcgagacctctaaaataatatgactaaggtaaaacaaaacaattctcagactgtttaaaaccagtttttccagccatttcgtgtaatatttgctgtttgttttttctttttcatcaagatttgaaaatcttgaatcttgttttggatgtggacttttgaatattatttattacttttactagtctaatttcgagaaagtgatg

SEQ ID NO: 103087 - protein, 438 aa, Arabidopsis thaliana; identical to SEQ ID NO: 42571
  peptide (1)..(438): Ceres Seq. ID no. 13611943

SEQ ID NO: 103088 - protein, 419 aa, Arabidopsis thaliana; identical to SEQ ID NO: 42572
  peptide (1)..(419): Ceres Seq. ID no. 13611944

SEQ ID NO: 103089 - protein, 413 aa, Arabidopsis thaliana; identical to SEQ ID NO: 42573
  peptide (1)..(413): Ceres Seq. ID no. 13611945

SEQ ID NO: 103090 - DNA, 673 bp, Arabidopsis thaliana
  misc_feature (1)..(673): Ceres Seq. ID no. 13611954
  misc_feature (1)..(673): Ortholog of  Ceres SEQ ID NO 14307370 as cited in SEQ ID NO 54127
  misc_feature (1)..(673): Ortholog of  Ceres SEQ ID NO 13596338 as cited in SEQ ID NO 68005
aaaaatttactcggattttaaagcagattccttcgatctaaagaaagagagaaaatggagaatatgttaggtcttctaagacttcatgtgattagaggtgttaatcttgccatcagagattctcaaagcagtgatccttatgtcattgtccgtatgggaaaacagaagctacgaacccgtgtgatgaaaaagaatttgaatacagaatggaacgaagacttgacactttctgttactgatccaactcttcctgtcaagatcatggtgtacgatagggacaggttctcaagggatgataagatgggagatgcgatttttcacattgatccgttccttgaagccatcagaatccaaaaccaactaggaggactacctgaggggactgtaataatgaagatacaggcaagcagacaaaactgcttgtcagaagagagcaagattgtatggcacaaaggaaagattgtccagaacatgttccttaagcttcagaatgttgaacgaggggagatagagctgcagcttgagtggatcgatgtctccggcgccttgactgatgatgcggaggatgttgctttctagatcgactctatactacaagaaattcctgtgatgatacggcgaaaacaataacacaaactgatgtagtgatttactcaattaataatcttaatgc

SEQ ID NO: 103091 - protein, 174 aa, Arabidopsis thaliana
  peptide (1)..(174): Ceres Seq. ID no. 13611955
MENMLGLLRLHVIRGVNLAIRDSQSSDPYVIVRMGKQKLRTRVMKKNLNTEWNEDLTLSVTDPTLPVKIMVYDRDRFSRDDKMGDAIFHIDPFLEAIRIQNQLGGLPEGTVIMKIQASRQNCLSEESKIVWHKGKIVQNMFLKLQNVERGEIELQLEWIDVSGALTDDAEDVAF

SEQ ID NO: 103092 - protein, 171 aa, Arabidopsis thaliana
  peptide (1)..(171): Ceres Seq. ID no. 13611956
MLGLLRLHVIRGVNLAIRDSQSSDPYVIVRMGKQKLRTRVMKKNLNTEWNEDLTLSVTDPTLPVKIMVYDRDRFSRDDKMGDAIFHIDPFLEAIRIQNQLGGLPEGTVIMKIQASRQNCLSEESKIVWHKGKIVQNMFLKLQNVERGEIELQLEWIDVSGALTDDAEDVAF

SEQ ID NO: 103093 - protein, 141 aa, Arabidopsis thaliana
  peptide (1)..(141): Ceres Seq. ID no. 13611957
MGKQKLRTRVMKKNLNTEWNEDLTLSVTDPTLPVKIMVYDRDRFSRDDKMGDAIFHIDPFLEAIRIQNQLGGLPEGTVIMKIQASRQNCLSEESKIVWHKGKIVQNMFLKLQNVERGEIELQLEWIDVSGALTDDAEDVAF

SEQ ID NO: 103094 - DNA, 1115 bp, Arabidopsis thaliana
  misc_feature (1)..(1115): Ceres Seq. ID no. 13611958
  misc_feature (1)..(1115): Ortholog of  Ceres SEQ ID NO 12617197 as cited in SEQ ID NO 63406
  misc_feature (1)..(1115): Ortholog of  Ceres SEQ ID NO 13597804 as cited in SEQ ID NO 64182
  misc_feature (1)..(1115): Ortholog of  Ceres SEQ ID NO 14301622 as cited in SEQ ID NO 65156
  misc_feature (1)..(1115): Ortholog of  Ceres SEQ ID NO 13598565 as cited in SEQ ID NO 65250
  misc_feature (1)..(1115): Ortholog of  Ceres SEQ ID NO 13598597 as cited in SEQ ID NO 65496
  misc_feature (1)..(1115): Ortholog of  Ceres SEQ ID NO 13596284 as cited in SEQ ID NO 68273
atcattacttaagccaacctaccaataataataaaagagaaatgaacggcgaaggaaaggttgtttgcgtcaccggagcttccggatacatagcttcttggattgttaagcttttgctcctccgtggctacaccgtcagggccaccgtccgaaacccaatggatacaaagaaaacaaatcatcttcttacacttgaaggtgcaagtgaaagactaaaactgttcaaatcagatcttttggaagaaggttctttcgatcaagctatagagggatgcgacggtgtcttccatactgcctctccagtttcattaaccgttacagatcctcagactgagatgatcgatccggcggttaatggtactttgaacgttttgagaacgtgcgccaaagtttcttctgtgaagagggtcattgtaacatcgtccactgctgctactctttctattaacccaaacgacgtggtggacgaaaccgtcttcaccgatctaagtgtttacttagcgatgaaggcatggtatggatattcaaaaactttggctgaggaaacagcgtggcggtttgctaaagaaaacgggatcgatttggttgtaatgaatccaggaaacgtgatcggaccagttttgcagccaactcttaattactctgtagaagtgattgtggatctgataaatggtaaaaacccttccaatagtttttactataggttcatggacgtgagagatgtttctcttgctcatatcaaagcgttcgaggtcccttctgctagtggcagatacatacttgctgatccagatgtaacaatgaaagacattcaaaagcttttacatgaactgtttcctgatttgtgccgtgttgataaggataatgagaatgaggtgggtgaaatggcatacaaagtgtgtgtcgataaattgaaaagtttgggaattgagttcactcctatcaaagaatctctcaaggatactgttgttagccttaaggagaggtgtcttcttatatgatcattgacatggactccttgtcatatctttatttttcttgtgatttttaataataaatatgatgtctattgtctaagctttcacaatgtaatgaaatatttgattataatcttc

SEQ ID NO: 103095 - protein, 332 aa, Arabidopsis thaliana
  peptide (1)..(332): Ceres Seq. ID no. 13611959
HYLSQPTNNNKREMNGEGKVVCVTGASGYIASWIVKLLLLRGYTVRATVRNPMDTKKTNHLLTLEGASERLKLFKSDLLEEGSFDQAIEGCDGVFHTASPVSLTVTDPQTEMIDPAVNGTLNVLRTCAKVSSVKRVIVTSSTAATLSINPNDVVDETVFTDLSVYLAMKAWYGYSKTLAEETAWRFAKENGIDLVVMNPGNVIGPVLQPTLNYSVEVIVDLINGKNPSNSFYYRFMDVRDVSLAHIKAFEVPSASGRYILADPDVTMKDIQKLLHELFPDLCRVDKDNENEVGEMAYKVCVDKLKSLGIEFTPIKESLKDTVVSLKERCLLI

SEQ ID NO: 103096 - protein, 319 aa, Arabidopsis thaliana
  peptide (1)..(319): Ceres Seq. ID no. 13611960
MNGEGKVVCVTGASGYIASWIVKLLLLRGYTVRATVRNPMDTKKTNHLLTLEGASERLKLFKSDLLEEGSFDQAIEGCDGVFHTASPVSLTVTDPQTEMIDPAVNGTLNVLRTCAKVSSVKRVIVTSSTAATLSINPNDVVDETVFTDLSVYLAMKAWYGYSKTLAEETAWRFAKENGIDLVVMNPGNVIGPVLQPTLNYSVEVIVDLINGKNPSNSFYYRFMDVRDVSLAHIKAFEVPSASGRYILADPDVTMKDIQKLLHELFPDLCRVDKDNENEVGEMAYKVCVDKLKSLGIEFTPIKESLKDTVVSLKERCLLI

SEQ ID NO: 103097 - protein, 280 aa, Arabidopsis thaliana
  peptide (1)..(280): Ceres Seq. ID no. 13611961
MDTKKTNHLLTLEGASERLKLFKSDLLEEGSFDQAIEGCDGVFHTASPVSLTVTDPQTEMIDPAVNGTLNVLRTCAKVSSVKRVIVTSSTAATLSINPNDVVDETVFTDLSVYLAMKAWYGYSKTLAEETAWRFAKENGIDLVVMNPGNVIGPVLQPTLNYSVEVIVDLINGKNPSNSFYYRFMDVRDVSLAHIKAFEVPSASGRYILADPDVTMKDIQKLLHELFPDLCRVDKDNENEVGEMAYKVCVDKLKSLGIEFTPIKESLKDTVVSLKERCLLI

SEQ ID NO: 103098 - DNA, 470 bp, Arabidopsis thaliana
  misc_feature (1)..(470): Ceres Seq. ID no. 13611962
  misc_feature (1)..(470): Ortholog of  Ceres SEQ ID NO 14309158 as cited in SEQ ID NO 0
aatatagaatataaccatattccggacatgaagatcgtgacattggtactcgtcgtcttcgtcatactttcgacatcattcccggctgccatcaaagccgaagacacgggagatacaggaaatgtgggagtgacatgtgacgcaaggcagcttcagccttgccttgccgcgattacgggaggaggacaaccctcaggtgcatgttgtgcaaagcttacagagcaacagtcatgcctctgtggtttcgctaagaaccctgcgttcgcacagtacattagctctccaaacgctcgcaaagtgctccttgcttgcaatgttgcttatcccacttgttgaaacttatctagagattttataaataaataaacgaaaggaaataaattacattatatcaaacgttatgatacaattcaaccgtttgtgttaatgtactggcttacatggttaaataaagtttattttcttggttg

SEQ ID NO: 103099 - protein, 111 aa, Arabidopsis thaliana; identical to SEQ ID NO: 35767
  peptide (1)..(111): Ceres Seq. ID no. 13611963

SEQ ID NO: 103100 - protein, 102 aa, Arabidopsis thaliana; identical to SEQ ID NO: 24515
  peptide (1)..(102): Ceres Seq. ID no. 13611964

SEQ ID NO: 103101 - DNA, 604 bp, Arabidopsis thaliana
  misc_feature (1)..(604): Ceres Seq. ID no. 13611974
  misc_feature (1)..(604): Ortholog of  Ceres SEQ ID NO 13600048 as cited in SEQ ID NO 377
  misc_feature (1)..(604): Ortholog of  Ceres SEQ ID NO 15173379 as cited in SEQ ID NO 63694
gcagagcgagctacaagaagaagcgaaacacacccagaagaagaagaagaacaacaacgaagtaaacaatggagtctgagaaaaagatagctcatgagatcggtggtgtcaaaaacgacgctcttcgatttggtcttcacggcgttaagagcaacatcatcggatctcacccactcgaatcgtcatacgaatctgaaaagaaatcgaaagaggcgttgaagaggacggtcattgcgcatgcctacgggactgcacttccgttgaagatggatatggataggcaaattctctcaaggtttcagagacctcctggaccaattccgtcgtcgatgctcggtttagaagtctacacgggagctgtggatgactttggttttgaggattacttgaatgatcctcgtgattccgagacattcaagccggtagacttccaccacgggatggaagttcgtcttggcatctcaaagggaccgatttacccaagtttcatgtaacccttcatgggtggttttttttatcggttgtttttggatcatgactcatcgtgtatgaacttatttcaaccttagacttgtattctctcttgagttaagtttgaaatcag

SEQ ID NO: 103102 - protein, 141 aa, Arabidopsis thaliana; identical to SEQ ID NO: 20875
  peptide (1)..(141): Ceres Seq. ID no. 13611975

SEQ ID NO: 103103 - protein, 75 aa, Arabidopsis thaliana; identical to SEQ ID NO: 20876
  peptide (1)..(75): Ceres Seq. ID no. 13611976

SEQ ID NO: 103104 - protein, 73 aa, Arabidopsis thaliana; identical to SEQ ID NO: 20877
  peptide (1)..(73): Ceres Seq. ID no. 13611977

SEQ ID NO: 103105 - DNA, 1420 bp, Arabidopsis thaliana
  misc_feature (1)..(1420): Ceres Seq. ID no. 13611978
  misc_feature (1)..(1420): Ortholog of  Ceres SEQ ID NO 15177104 as cited in SEQ ID NO 56048
aatctccgacggaggaaaagtagccaccgcttgacgaatcattcatcaacacacgcagagagctctgaatctcgaggaagaagatggtgaggatcattcctatggctgcttcctccattcgaccttccctcgcctgcttctctgattctcctcgcttccccatctccctcctctccagaaatctctctcgcactctccatgttcctcaatcacagctttttggtttaacttctcataagcttttgagaagaagtgtaaactgtttaggagttgctgaatctggtaaagcagctcaagctactacacaagatgatcttctcacctgggttaagaatgataagagaagaatgcttcatgttgtttatcgtgttggcgatatggaccggacgataaagttttatactgaatgtcttgggatgaagcttctacgtaagcgtgatataccagaagagaagtatactaatgctttccttggttatggaccggaagattcacactttgtgattgagcttacttataattatggagttgacaagtatgacattggggctggttttggtcactttggtattgcggtcgatgatgtggcgaaaactgtagagcttgtgaaagccaaagggggaaaagtaagccgggagcctggtcctgtcaaaggtggcaaaactgtaatagcattcattgaagatcctgatggttacaaatttgaactcttggaaagaggtcctacaccagaacctctttgccaagttatgctccgtgttggtgatctcgatagggccataaagttctatgagaaggcttttggaatggaacttctgcgaacaagagacaacccagagtacaagtacacaatagccatgatgggatatggtccagaagataaatttcctgtcctagagctgacatataactatggtgtcactgaatatgataaaggaaatgcttatgctcagatagcaatagggacggatgatgtgtacaaaactgcagaagctataaaactctttgggggaaaaatcacgagggagcctggtcccttaccaggtattagcacgaagatcaccgcgtgtctggatcctgatggttggaaatcggtatttgtggacaacattgactttctcaaagaactggagtgagaggagaaagcagaagagaggcaacaaatgcacgaaaatggcttatgagggagacaggaggagaggccttgttgtgaattacatcagtttggggtttgatataatctctctcagtgctgaatatttttatcaaagtgaatgatttgtttttcagaatatagtgtagttgtttaatttacagtataaaagcctatgttgcgtctttgtatattagttccacttaacattaattgccaataaataagatgataagtgaatgatattcaagaaaaaatcttatgcct

SEQ ID NO: 103106 - protein, 350 aa, Arabidopsis thaliana; identical to SEQ ID NO: 29221
  peptide (1)..(350): Ceres Seq. ID no. 13611979

SEQ ID NO: 103107 - protein, 344 aa, Arabidopsis thaliana; identical to SEQ ID NO: 29222
  peptide (1)..(344): Ceres Seq. ID no. 13611980

SEQ ID NO: 103108 - protein, 262 aa, Arabidopsis thaliana; identical to SEQ ID NO: 29223
  peptide (1)..(262): Ceres Seq. ID no. 13611981

SEQ ID NO: 103109 - DNA, 1048 bp, Arabidopsis thaliana
  misc_feature (1)..(1048): Ceres Seq. ID no. 13612002
  misc_feature (1)..(1048): Ortholog of  Ceres SEQ ID NO 12473977 as cited in SEQ ID NO 133
  misc_feature (1)..(1048): Ortholog of  Ceres SEQ ID NO 12585294 as cited in SEQ ID NO 63023
ggagtctctcttgtcttcgtttgtgtttggtttttttggactttgaccttccttggcttggacttgagaccaaaaaaaaaaaaaggagaagaagaccatcgttgttctccgatggctattaacagaattgctcatggttctctgtttctgacggtagtcttgttctttctgacggttaattacggcgaagctatatggttgacgattccgacgacgggtggaacgaagtgtgtctccgaggagatacagagcaacgtcgtcgttttggctgattactatgtcgtcgatgagcataatcctgaaaatacacctgctgtttcttctaaggtaacatctccgtatgggaacaatcttcatcaccaagaaaatgtaacacatggtcagtttgcattcacaactcaagaagctgggaactacttggcttgtttctggattgattccagtcatcacttagccaatcctataacccttggggttgattggaagatgggtattgcagctaaagactgggactctgttgctaaaaaggaaaagatcgagggtgttgagcttcagttgaggagacttgaagggttggtgctgtcgattcgtgagaacttaaactatataaaagacagggaagcggagatgcgagaagtgagtgaaacaaccaactcaagagtggcttggttcagtataatgtcactcggggtttgcgttgtggttgtgggttcacagatactgtatctgaagaggtatttccacaagaagaaacttatctagaaacttggcctgaaggatactcttactatatattagtaacatcacacatccctaccttgaaaagagggataagctcaagattgtagagttgaattggttaaaaaatcgaagaacgcgttttcatttatattttctgtgaaactttactactgtcgatagttagagatcattgagtttgtgcacagtcacttttgtgttttgattgatctcttttggagttaaaaaaaaaaatacaggtaatgtgacaatgtaccaaaagttctttctttcacaggcattttggggt

SEQ ID NO: 103110 - protein, 253 aa, Arabidopsis thaliana
  peptide (1)..(253): Ceres Seq. ID no. 13612003
GVSLVFVCVWFFWTLTFLGLDLRPKKKKGEEDHRCSPMAINRIAHGSLFLTVVLFFLTVNYGEAIWLTIPTTGGTKCVSEEIQSNVVVLADYYVVDEHNPENTPAVSSKVTSPYGNNLHHQENVTHGQFAFTTQEAGNYLACFWIDSSHHLANPITLGVDWKMGIAAKDWDSVAKKEKIEGVELQLRRLEGLVLSIRENLNYIKDREAEMREVSETTNSRVAWFSIMSLGVCVVVVGSQILYLKRYFHKKKLI

SEQ ID NO: 103111 - protein, 216 aa, Arabidopsis thaliana; identical to SEQ ID NO: 42255
  peptide (1)..(216): Ceres Seq. ID no. 13612004

SEQ ID NO: 103112 - DNA, 1483 bp, Arabidopsis thaliana
  misc_feature (1)..(1483): Ceres Seq. ID no. 13612013
  misc_feature (1)..(1483): Ortholog of  Ceres SEQ ID NO 15177221 as cited in SEQ ID NO 53046
  misc_feature (1)..(1483): Ortholog of  Ceres SEQ ID NO 14315134 as cited in SEQ ID NO 59476
  misc_feature (1)..(1483): Ortholog of  Ceres SEQ ID NO 12616332 as cited in SEQ ID NO 63449
  misc_feature (1)..(1483): Ortholog of  Ceres SEQ ID NO 13597498 as cited in SEQ ID NO 64648
  misc_feature (1)..(1483): Ortholog of  Ceres SEQ ID NO 14308053 as cited in SEQ ID NO 67790
aaaattatacgtcttaaaagatttcttctctcttctctgatcgtctctctttgtgtgctcacaatgaagcacaacaacaaagtctccaagagacttactatgacatgggttcctcttctttgcatttcttgctttttcctcggagcaatcttcacctccaaattacgatcagcttcgtcggattccggtagccagctcattttacagcaccggcgtgatcaggagcttaagattgttacccaagattatgctcatgagaaaaagaaatcacaagacaatgatgtaatggaagaggttttaaaaactcataaagcaatcgaatcattggataagtcagtttctatgcttcagaagcagctctctgctacacatagccctcaacagattgtgaatgtctcagcaaccaattcttcaacagaaggaaaccaaaagaacaaagtttttatggtgattggtatcaatactgcatttagcagtcgaaaacgtcgcgattcgcttagagagacttggatgcctcaaggggaaaagcttgagaaattggaaaaagagaagggaattgtcgtcaaatttatgattggacacagttcaacgccaaacagtatgttggataaggagattgattcagaagatgctcaatacaacgatttctttaggctggatcatgtcgaaggatattacaatctatctgcaaaaaccaaaagcttcttctctagtgcagttgcaaagtgggatgctgagttttatgtcaagattgatgatgatgttcacgtcaatcttggcacgcttgcttccacattagcaagtcaccgttctaagccaagggtctacattggatgtatgaaatccggtcctgtccttaccaaaaagacggccaagtaccgtgaacccgagttttggaaatttggagaagaaggtaacaaatatttccgacatgctacgggacagatttatgccatatcaaaggatcttgccacatacatatctaacaaccagccaattttgcataagtatgcaaatgaagatgtgacactcgggtcatggtttatcggtcttgaggttgagcaaatcgatgatcgtaatttctgttgtggtactcctccagactgtgaaatgagggcagaggctggcgaaatgtgtgtggctacatttgactggaagtgtagtggagtatgcagatcagtcgatagaatgtggatggttcatgtgatgtgtggtgaaggtagtaaagctgtgtgggacgcaaatttaaaactctcttagatcggagaaagacacaagagaagatgaacattttgttttgtaaagaaccaaaaggtatacaaatgtgagaaaagacgctgaggaagaccttttagttcaatattctcgttttatttgtggaaaaataaaaactaaaaagaaagaatgagactttctatagatacagacgtgacatacttgcttcttataaacattttgctcgatatgaacaattctatttctt

SEQ ID NO: 103113 - protein, 419 aa, Arabidopsis thaliana
  peptide (1)..(419): Ceres Seq. ID no. 13612014
KIIRLKRFLLSSLIVSLCVLTMKHNNKVSKRLTMTWVPLLCISCFFLGAIFTSKLRSASSDSGSQLILQHRRDQELKIVTQDYAHEKKKSQDNDVMEEVLKTHKAIESLDKSVSMLQKQLSATHSPQQIVNVSATNSSTEGNQKNKVFMVIGINTAFSSRKRRDSLRETWMPQGEKLEKLEKEKGIVVKFMIGHSSTPNSMLDKEIDSEDAQYNDFFRLDHVEGYYNLSAKTKSFFSSAVAKWDAEFYVKIDDDVHVNLGTLASTLASHRSKPRVYIGCMKSGPVLTKKTAKYREPEFWKFGEEGNKYFRHATGQIYAISKDLATYISNNQPILHKYANEDVTLGSWFIGLEVEQIDDRNFCCGTPPDCEMRAEAGEMCVATFDWKCSGVCRSVDRMWMVHVMCGEGSKAVWDANLKLS

SEQ ID NO: 103114 - protein, 398 aa, Arabidopsis thaliana
  peptide (1)..(398): Ceres Seq. ID no. 13612015
MKHNNKVSKRLTMTWVPLLCISCFFLGAIFTSKLRSASSDSGSQLILQHRRDQELKIVTQDYAHEKKKSQDNDVMEEVLKTHKAIESLDKSVSMLQKQLSATHSPQQIVNVSATNSSTEGNQKNKVFMVIGINTAFSSRKRRDSLRETWMPQGEKLEKLEKEKGIVVKFMIGHSSTPNSMLDKEIDSEDAQYNDFFRLDHVEGYYNLSAKTKSFFSSAVAKWDAEFYVKIDDDVHVNLGTLASTLASHRSKPRVYIGCMKSGPVLTKKTAKYREPEFWKFGEEGNKYFRHATGQIYAISKDLATYISNNQPILHKYANEDVTLGSWFIGLEVEQIDDRNFCCGTPPDCEMRAEAGEMCVATFDWKCSGVCRSVDRMWMVHVMCGEGSKAVWDANLKLS

SEQ ID NO: 103115 - protein, 386 aa, Arabidopsis thaliana
  peptide (1)..(386): Ceres Seq. ID no. 13612016
MTWVPLLCISCFFLGAIFTSKLRSASSDSGSQLILQHRRDQELKIVTQDYAHEKKKSQDNDVMEEVLKTHKAIESLDKSVSMLQKQLSATHSPQQIVNVSATNSSTEGNQKNKVFMVIGINTAFSSRKRRDSLRETWMPQGEKLEKLEKEKGIVVKFMIGHSSTPNSMLDKEIDSEDAQYNDFFRLDHVEGYYNLSAKTKSFFSSAVAKWDAEFYVKIDDDVHVNLGTLASTLASHRSKPRVYIGCMKSGPVLTKKTAKYREPEFWKFGEEGNKYFRHATGQIYAISKDLATYISNNQPILHKYANEDVTLGSWFIGLEVEQIDDRNFCCGTPPDCEMRAEAGEMCVATFDWKCSGVCRSVDRMWMVHVMCGEGSKAVWDANLKLS

SEQ ID NO: 103116 - DNA, 1261 bp, Arabidopsis thaliana
  misc_feature (1)..(1261): Ceres Seq. ID no. 13612017
  misc_feature (1)..(1261): Ortholog of  Ceres SEQ ID NO 14311493 as cited in SEQ ID NO 51440
  misc_feature (1)..(1261): Ortholog of  Ceres SEQ ID NO 15177312 as cited in SEQ ID NO 52762
acttctctctctctctcttcataatcttttcattgatcatcgaccaaccaaaaacaaaaaaaactcaaaaaatccaaaaaaatcagatctttgaaagcttttcttttgtaacactcgaaaaatggatccgtcctgtgcaaactcagtgaacggattctactcatttctaaacagatcaatggaagatctcgaaagagtttatctttcaaacaatttcatgtccgtacacttcttacagagagctctctgtcttctccgtacctctcactctcatctcactctcttagttcaaaaacttcaacttcccgtcggtgacaaatggctcgatgagtatatggacgaaagctccaaactttgggaagcttgtctcgtcatcaaatccgccgtctcctccgtcgaaaacttctcctccgccggaatttcgatcgcttccaccctcgaccgtcgtctctctcctcagctttctcgtcaggtgataagggcgatatcaggatgtagaagagaagcgatagggatagaggaagaaaacagagcattaatggagaacagagttcaaaggtttccgttttggtcggaacaaacgtcggcgacggcgatggagtcgtcgacgaagttacaaaacgggttcagtggttttcgcggcgtgctttacgcgacgaggaacatgagttcgcttctccttatggttttaatgaacggtctcgtctactgttttcccggagacgcggcaacgcaaacgcagacgcagataacgcaaacgcagagtcaagtcggaggtttcgccggagcaatggggaggttgcagcagagagtggcggctgaggttgggaggatggggataaggaaaggaatattgatgcacgagtatcgccggagcaaagcggcgttggaggagcttaaagcggagctggagcggcggttctgcggtggcggtggtggtgggggagagagggaggaggaggaggaggacgagagggagctgagagagagagttgagaatctgaaagggtattttggtaatttaaggaatgggacagagagtatagtggcgcaaatcgatgatttcttcgatgagattgttgaaggaaggaaaaagcttttggatttctgcagccatagatgatgaaatatcaaaagctgacattttgttttttatgtttacatgaaaaaaaaaaaaaaaagttgggttaggctttaggctctagatgaatcagttggtagggagttgttgtaattttttcttttttactttgttgttatg

SEQ ID NO: 103117 - protein, 333 aa, Arabidopsis thaliana; identical to SEQ ID NO: 24815
  peptide (1)..(333): Ceres Seq. ID no. 13612018

SEQ ID NO: 103118 - protein, 314 aa, Arabidopsis thaliana; identical to SEQ ID NO: 24816
  peptide (1)..(314): Ceres Seq. ID no. 13612019

SEQ ID NO: 103119 - protein, 301 aa, Arabidopsis thaliana; identical to SEQ ID NO: 24817
  peptide (1)..(301): Ceres Seq. ID no. 13612020

SEQ ID NO: 103120 - DNA, 776 bp, Arabidopsis thaliana
  misc_feature (1)..(776): Ceres Seq. ID no. 13612027
  misc_feature (1)..(776): Ortholog of  Ceres SEQ ID NO 15178866 as cited in SEQ ID NO 1133
tttcattctcttcttacaccttttctccagagttccgacaatggcttcagcatcagcgacagctactcttctcaaacccaatcttccgccgcataaaccgaccatcatcgcctcctccgtatctccgcctcttcctcctccacgtcgcaaccacctcctccgccgcgatttcctctccctggcggcaacatccacgcttctaacacaatcgattcagtttctagctccggcgccggtctccgccgctgaagatgaagagtatatcaaagatacgtcggcagtgatcagtaaagtaaggagtacgctttcgatgcagaagacagatccgaatgtggctgatgcggtggcggagctgagagaagcgtcgaattcttgggttgccaagtaccggaaagagaaagctcttctcggaaaagcttctttccgggatatatactcggcgttgaatgctgtttcaggtcattatgtgagttttggtccgacggctccgattccggcgaagaggaaggcgaggattcttgaagagatggaaactgctgagaaagctctcacaagaggaagatgaaaaaactgcagtcaggccttcttctccattttcttgttgatgaaaattttattttcctaaaaatgccaatcgaattatatgagaagagaaacttgaattggctcgcctgcttttttttttcattcctgtaaaatacttaatgttctgcatgataattgcttaattatcattatcagagatacttatataacttatatcgaattccattttc

SEQ ID NO: 103121 - protein, 187 aa, Arabidopsis thaliana
  peptide (1)..(187): Ceres Seq. ID no. 13612028
FILFLHLFSRVPTMASASATATLLKPNLPPHKPTIIASSVSPPLPPPRRNHLLRRDFLSLAATSTLLTQSIQFLAPAPVSAAEDEEYIKDTSAVISKVRSTLSMQKTDPNVADAVAELREASNSWVAKYRKEKALLGKASFRDIYSALNAVSGHYVSFGPTAPIPAKRKARILEEMETAEKALTRGR

SEQ ID NO: 103122 - protein, 174 aa, Arabidopsis thaliana; identical to SEQ ID NO: 39959
  peptide (1)..(174): Ceres Seq. ID no. 13612029

SEQ ID NO: 103123 - DNA, 4071 bp, Arabidopsis thaliana
  misc_feature (1)..(4071): Ceres Seq. ID no. 13612036
  misc_feature (1)..(4071): Ortholog of  Ceres SEQ ID NO 13600310 as cited in SEQ ID NO 5086
aatgagaagaggcaattaaaaatctcccgtgactctcgtctccccatctctctctctccctctgcccaaatttctggggcaaatttgttcatcagatctactacaatctctctttttcttcgggtatggagggccaacgaggcagtaattcttcgttgagctctggcaatggcaccgaagtcgccaccgacgtttcttcttgcttctatgttcccaatccctctggaaccgatttcgatgccgagtcgtcttctcttcctcctctctccccagctcctcaagtggcattgtcaattcctgcggagcttgccgccgccattcccctcatcgatcgcttccaggttgaagcttttctgcggctaatgcagaaacaaatccagtctgctgggaagcgtggcttcttctattccaaaaagtcctctggctccaatgtccgcgagcgcttcacatttgaggatatgctttgctttcaaaaggatccaatccccacatctctcctcaagattaacagcgatctcgtcagccgtgctaccaagttgtttcatctcatcttaaaatatatgggtgttgattcatctgatcgatctacgcctcccagtttagatgaacgcattgacctcgttggaaagctcttcaaaaaaactttgaagcgtgttgaactcagggacgaactttttgcccaaatctccaaacagactagacataatcctgacaggcaatacttgatcaaagcttgggaattgatgtacttatgtgcctcctctatgcctcctagcaaagatatcggtggatatctatctgagtatattcataatgtcgcacacgatgcaactattgaaccggatgctcaggttcttgctgttaacactttgaaagctttaaagcgctctatcaaagctggtcctaggcacaccacacctggtcgtgaagaaattgaagcccttttgaccggtagaaagctcacaaccattgtcttctttctcgatgaaacttttgaagaaatttcatatgacatggctaccacagtgtctgatgctgttgaggagctagctggaacaattaaactatcagctttctctagctttagtttgtttgaatgtcgtaaagttgtttcaagttctaaatcatctgatcccggaaatgaggaatatataggattggatgataacaagtatattggagatctcctcgcagaatttaaagctattaaagatcgaaataaaggagagatactacactgcaaactggtatttaaaaaaaaattattccgagagtctgatgaagctgtaacagatctgatgtttgtgcaactttcgtatgttcaactgcaacatgactatttgctaggaaactatcctgttgggagggacgatgctgcacagctttgtgccttgcaaattcttgttgggattgggtttgtcaatagtccagagtcatgcattgattggacatcacttcttgagcggtttttgccaagacaaatagcaataacccgagcaaagcgtgaatgggaattggatatccttgctcgctaccgttcaatggagaacgtgaccaaagatgatgcaagacaacaatttctacggatactgaaggcactgccatacgggaattcagttttttttagcgtacgcaagatagatgatccgatcggtcttttacctgggcgaatcattttgggtatcaacaaacgtggggttcacttttttcgaccggttcctaaagaatatctgcactctgctgaactacgtgacatcatgcaatttggcagcagtaacactgctgtctttttcaaaatgagagtcgctggtgttcttcacatatttcagttcgagacaaaacagggagaagaaatttgtgttgctttgcaaacacatataaatgatgtcatgttgcgtcgttactccaaagctcgatctgctgccaatagcttggttaatggagatatatcttgtagttctaagccgcaaaattttgaagtgtatgaaaaacgtttgcaagatttgtctaaggcttatgaagagtcccaaaagaagattgagaagttgatggatgaacaacaagagaaaaatcagcaagaagttactctgcgtgaagagttagaagctatacacaatggtttggagcttgaaaggagaaaattgttggaggttactttagaccgagataaacttaggtcattgtgtgacgagaagggaacaactattcaatccttgatgtctgaactgcgaggaatggaagcaaggttggcaaagtcgggcaacacaaaatcaagtaaagagacaaaatcagaattagccgaaatgaataatcagatattatacaagatccaaaaggagttagaagttcgaaataaggaattgcatgtcgcagttgataattcaaagaggttgttgagtgaaaacaagatattggagcaaaatctcaatattgaaaagaagaaaaaagaggaggttgaaattcatcaaaagagatatgaacaagaaaaaaaggtgttaaagcttcgagtttctgaacttgaaaataagcttgaagtacttgctcaagacttggatagtgctgagtctacgattgaaagtaagaattctgacatgctgctgttgcaaaataacttgaaagaacttgaggagttaagagaaatgaaagaggacattgacagaaaaaatgagcaaacagctgccattttgaaaatgcaaggagcccaacttgctgagctagaaatactttataaggaagaacaagttttaaggaaaagatactataataccatagaagatatgaaagggaagattagagtttattgtcgaataagacctctaaatgaaaaagagagttcagagagggaaaaacaaatgctgacaactgtggatgagtttactgttgaacatccatggaaagacgacaaaagaaagcaacacatatatgatcgcgtatttgacatgcgtgctagtcaagatgatatctttgaagacacaaagtatttggtacagtcggctgtagatgggtataacgtttgcatctttgcatatggtcaaactggttctggaaaaactttcactatatatgggcatgagagcaatcctggactcacacctcgagctacaaaggaactgttcaacatattaaagcgagatagcaagagattttcattttctctaaaggcatatatggtggaactttatcaagacacacttgtagaccttttgttaccaaaaagtgcaagacgcttgaaactagagattaaaaaagattcaaagggaatggtctttgtagagaatgtgacaactattcctatatcaactttggaggaactgcgaatgattcttgaacggggatcggaacgacgacatgtttctggaacaaatatgaatgaagaaagctcaagatctcacctcatattatcagttgttattgaaagtattgatcttcaaacccagtctgctgcgaggggcaagctgagttttgtggatcttgctggttctgagagagttaaaaagtcgggctcagctggttgtcaactcaaagaagctcaaagtatcaacaaatcactttctgcattaggtgatgttattggtgctttatcttctggcaaccagcatattccttataggaatcacaagctaacgatgttgatgagcgattcattgggcggcaatgccaagacgttaatgtttgttaatgtgtctccagccgaatcaaatttggacgagacgtacaattctcttctatatgcatcgagagtgagaacgatcgtgaatgatcccagcaaacatatatcatccaaagagatggtgcgattgaagaagttggtagcatactggaaagagcaagccggtaaaaaaggtgaggaagaagacttggtggatattgaggaagatcgtacacgaaaagatgaggcagatagttgaagaaagctgacatgaaattcgtctaggtgaaattgagactatagtatcactggttttcaccattctttttgtaggaagttcctgctttatagtagagtttctatcgaagagtagtcctatatgtctcaaactttctctcttttgatgagatcttcattacaag

SEQ ID NO: 103124 - protein, 1260 aa, Arabidopsis thaliana
  peptide (1)..(1260): Ceres Seq. ID no. 13612037
MEGQRGSNSSLSSGNGTEVATDVSSCFYVPNPSGTDFDAESSSLPPLSPAPQVALSIPAELAAAIPLIDRFQVEAFLRLMQKQIQSAGKRGFFYSKKSSGSNVRERFTFEDMLCFQKDPIPTSLLKINSDLVSRATKLFHLILKYMGVDSSDRSTPPSLDERIDLVGKLFKKTLKRVELRDELFAQISKQTRHNPDRQYLIKAWELMYLCASSMPPSKDIGGYLSEYIHNVAHDATIEPDAQVLAVNTLKALKRSIKAGPRHTTPGREEIEALLTGRKLTTIVFFLDETFEEISYDMATTVSDAVEELAGTIKLSAFSSFSLFECRKVVSSSKSSDPGNEEYIGLDDNKYIGDLLAEFKAIKDRNKGEILHCKLVFKKKLFRESDEAVTDLMFVQLSYVQLQHDYLLGNYPVGRDDAAQLCALQILVGIGFVNSPESCIDWTSLLERFLPRQIAITRAKREWELDILARYRSMENVTKDDARQQFLRILKALPYGNSVFFSVRKIDDPIGLLPGRIILGINKRGVHFFRPVPKEYLHSAELRDIMQFGSSNTAVFFKMRVAGVLHIFQFETKQGEEICVALQTHINDVMLRRYSKARSAANSLVNGDISCSSKPQNFEVYEKRLQDLSKAYEESQKKIEKLMDEQQEKNQQEVTLREELEAIHNGLELERRKLLEVTLDRDKLRSLCDEKGTTIQSLMSELRGMEARLAKSGNTKSSKETKSELAEMNNQILYKIQKELEVRNKELHVAVDNSKRLLSENKILEQNLNIEKKKKEEVEIHQKRYEQEKKVLKLRVSELENKLEVLAQDLDSAESTIESKNSDMLLLQNNLKELEELREMKEDIDRKNEQTAAILKMQGAQLAELEILYKEEQVLRKRYYNTIEDMKGKIRVYCRIRPLNEKESSEREKQMLTTVDEFTVEHPWKDDKRKQHIYDRVFDMRASQDDIFEDTKYLVQSAVDGYNVCIFAYGQTGSGKTFTIYGHESNPGLTPRATKELFNILKRDSKRFSFSLKAYMVELYQDTLVDLLLPKSARRLKLEIKKDSKGMVFVENVTTIPISTLEELRMILERGSERRHVSGTNMNEESSRSHLILSVVIESIDLQTQSAARGKLSFVDLAGSERVKKSGSAGCQLKEAQSINKSLSALGDVIGALSSGNQHIPYRNHKLTMLMSDSLGGNAKTLMFVNVSPAESNLDETYNSLLYASRVRTIVNDPSKHISSKEMVRLKKLVAYWKEQAGKKGEEEDLVDIEEDRTRKDEADS

SEQ ID NO: 103125 - protein, 1181 aa, Arabidopsis thaliana
  peptide (1)..(1181): Ceres Seq. ID no. 13612038
MQKQIQSAGKRGFFYSKKSSGSNVRERFTFEDMLCFQKDPIPTSLLKINSDLVSRATKLFHLILKYMGVDSSDRSTPPSLDERIDLVGKLFKKTLKRVELRDELFAQISKQTRHNPDRQYLIKAWELMYLCASSMPPSKDIGGYLSEYIHNVAHDATIEPDAQVLAVNTLKALKRSIKAGPRHTTPGREEIEALLTGRKLTTIVFFLDETFEEISYDMATTVSDAVEELAGTIKLSAFSSFSLFECRKVVSSSKSSDPGNEEYIGLDDNKYIGDLLAEFKAIKDRNKGEILHCKLVFKKKLFRESDEAVTDLMFVQLSYVQLQHDYLLGNYPVGRDDAAQLCALQILVGIGFVNSPESCIDWTSLLERFLPRQIAITRAKREWELDILARYRSMENVTKDDARQQFLRILKALPYGNSVFFSVRKIDDPIGLLPGRIILGINKRGVHFFRPVPKEYLHSAELRDIMQFGSSNTAVFFKMRVAGVLHIFQFETKQGEEICVALQTHINDVMLRRYSKARSAANSLVNGDISCSSKPQNFEVYEKRLQDLSKAYEESQKKIEKLMDEQQEKNQQEVTLREELEAIHNGLELERRKLLEVTLDRDKLRSLCDEKGTTIQSLMSELRGMEARLAKSGNTKSSKETKSELAEMNNQILYKIQKELEVRNKELHVAVDNSKRLLSENKILEQNLNIEKKKKEEVEIHQKRYEQEKKVLKLRVSELENKLEVLAQDLDSAESTIESKNSDMLLLQNNLKELEELREMKEDIDRKNEQTAAILKMQGAQLAELEILYKEEQVLRKRYYNTIEDMKGKIRVYCRIRPLNEKESSEREKQMLTTVDEFTVEHPWKDDKRKQHIYDRVFDMRASQDDIFEDTKYLVQSAVDGYNVCIFAYGQTGSGKTFTIYGHESNPGLTPRATKELFNILKRDSKRFSFSLKAYMVELYQDTLVDLLLPKSARRLKLEIKKDSKGMVFVENVTTIPISTLEELRMILERGSERRHVSGTNMNEESSRSHLILSVVIESIDLQTQSAARGKLSFVDLAGSERVKKSGSAGCQLKEAQSINKSLSALGDVIGALSSGNQHIPYRNHKLTMLMSDSLGGNAKTLMFVNVSPAESNLDETYNSLLYASRVRTIVNDPSKHISSKEMVRLKKLVAYWKEQAGKKGEEEDLVDIEEDRTRKDEADS

SEQ ID NO: 103126 - protein, 1149 aa, Arabidopsis thaliana
  peptide (1)..(1149): Ceres Seq. ID no. 13612039
MLCFQKDPIPTSLLKINSDLVSRATKLFHLILKYMGVDSSDRSTPPSLDERIDLVGKLFKKTLKRVELRDELFAQISKQTRHNPDRQYLIKAWELMYLCASSMPPSKDIGGYLSEYIHNVAHDATIEPDAQVLAVNTLKALKRSIKAGPRHTTPGREEIEALLTGRKLTTIVFFLDETFEEISYDMATTVSDAVEELAGTIKLSAFSSFSLFECRKVVSSSKSSDPGNEEYIGLDDNKYIGDLLAEFKAIKDRNKGEILHCKLVFKKKLFRESDEAVTDLMFVQLSYVQLQHDYLLGNYPVGRDDAAQLCALQILVGIGFVNSPESCIDWTSLLERFLPRQIAITRAKREWELDILARYRSMENVTKDDARQQFLRILKALPYGNSVFFSVRKIDDPIGLLPGRIILGINKRGVHFFRPVPKEYLHSAELRDIMQFGSSNTAVFFKMRVAGVLHIFQFETKQGEEICVALQTHINDVMLRRYSKARSAANSLVNGDISCSSKPQNFEVYEKRLQDLSKAYEESQKKIEKLMDEQQEKNQQEVTLREELEAIHNGLELERRKLLEVTLDRDKLRSLCDEKGTTIQSLMSELRGMEARLAKSGNTKSSKETKSELAEMNNQILYKIQKELEVRNKELHVAVDNSKRLLSENKILEQNLNIEKKKKEEVEIHQKRYEQEKKVLKLRVSELENKLEVLAQDLDSAESTIESKNSDMLLLQNNLKELEELREMKEDIDRKNEQTAAILKMQGAQLAELEILYKEEQVLRKRYYNTIEDMKGKIRVYCRIRPLNEKESSEREKQMLTTVDEFTVEHPWKDDKRKQHIYDRVFDMRASQDDIFEDTKYLVQSAVDGYNVCIFAYGQTGSGKTFTIYGHESNPGLTPRATKELFNILKRDSKRFSFSLKAYMVELYQDTLVDLLLPKSARRLKLEIKKDSKGMVFVENVTTIPISTLEELRMILERGSERRHVSGTNMNEESSRSHLILSVVIESIDLQTQSAARGKLSFVDLAGSERVKKSGSAGCQLKEAQSINKSLSALGDVIGALSSGNQHIPYRNHKLTMLMSDSLGGNAKTLMFVNVSPAESNLDETYNSLLYASRVRTIVNDPSKHISSKEMVRLKKLVAYWKEQAGKKGEEEDLVDIEEDRTRKDEADS

SEQ ID NO: 103127 - DNA, 1263 bp, Arabidopsis thaliana
  misc_feature (1)..(1263): Ceres Seq. ID no. 13612055
  misc_feature (1)..(1263): Ortholog of  Ceres SEQ ID NO 15178228 as cited in SEQ ID NO 58330
  misc_feature (1)..(1263): Ortholog of  Ceres SEQ ID NO 13596635 as cited in SEQ ID NO 62488
aaatccacagagattttctctctttgatcacaattcaatcatacactctattctcatctcttactcaggtcaaaactctctaaagttggaatcttgatttggtttttaaggtaagattagctcaaaatgagtttaggtgctttgatggaagagaagagaagagcaacaacttcatcttcttcttctcaggtacatatgtcaaatgatatagattggcaaatgcttgataaatcgaggtttttcttcctcggtgctgctcttttctccggtgtatccactgctctttaccctattgtagttctcaaaacaaggcaacaagtctctccgactcgtgtctcatgtgccaacatttctctggctattgctagacttgaaggtcttaaagggttttacaagggttttggaacatctttgcttggaaccatcccggctcgtgctctctatatgactgctctagagattacaaagagtagtgtaggtcaagcaactgttaggttaggattgtctgatactacgtctttggctgttgctaatggtgcagctggtttgacctcggctgtggctgcccagactgtctggactccgattgatattgtgagtcaagggcttatggttcaaggcgatgtctccttgagtaagcatcttcctggagtgatgaactcttgcagatacagaaatgggtttgatgcttttagaaagattctttacacagatggaccaagagggttctacagaggatttgggatctcgatcttgacttacgcaccttccaacgcggtttggtgggcgtcttattctttggctcaaaaatcaatttggtctcgatacaagcactcctacaaccacaaggaagatgctggtggctcagtggtggttcaagcgttgagtgcagctacagcaagcggttgctcggctttagtaactatgccagtagacacaatcaagacgcggttgcaagtcttagacgcagaagagaacgggaggagacgagcaatgacagtgatgcagtcagtgaagagcttgatgaaggaaggaggagttggtgcttgttacagaggattaggaccaagatgggtctcaatgtcgatgtccgcaacaacgatgatcacaacctacgagttcttgaagcgcctagcaacaaagaagcagaaatgatatattgataaaaccttgttgtgttaagactaaccaaaatacttttgattgagtttgaagaatgttaataaacaaacataaaacagagcaaaagatcattacccctaa

SEQ ID NO: 103128 - protein, 342 aa, Arabidopsis thaliana; identical to SEQ ID NO: 27640
  peptide (1)..(342): Ceres Seq. ID no. 13612056

SEQ ID NO: 103129 - protein, 336 aa, Arabidopsis thaliana; identical to SEQ ID NO: 27641
  peptide (1)..(336): Ceres Seq. ID no. 13612057

SEQ ID NO: 103130 - protein, 319 aa, Arabidopsis thaliana; identical to SEQ ID NO: 27642
  peptide (1)..(319): Ceres Seq. ID no. 13612058

SEQ ID NO: 103131 - DNA, 842 bp, Arabidopsis thaliana
  misc_feature (1)..(842): Ceres Seq. ID no. 13612066
  misc_feature (1)..(842): Ortholog of  Ceres SEQ ID NO 13599568 as cited in SEQ ID NO 509
  misc_feature (1)..(842): Ortholog of  Ceres SEQ ID NO 13638595 as cited in SEQ ID NO 52050
  misc_feature (1)..(842): Ortholog of  Ceres SEQ ID NO 13594748 as cited in SEQ ID NO 52114
  misc_feature (1)..(842): Ortholog of  Ceres SEQ ID NO 12623490 as cited in SEQ ID NO 61136
  misc_feature (1)..(842): Ortholog of  Ceres SEQ ID NO 12583993 as cited in SEQ ID NO 68098
  misc_feature (1)..(842): Ortholog of  Ceres SEQ ID NO 13654535 as cited in SEQ ID NO 68227
attgtgaatttattagtaatttataaattcatcaaaaacaaactcttttcagaaaaaaaataacaacaacaacaataatggcgtcttttgcaacccatcttgttgttgttgttacaatgttgtttgtagccatggcctccgcggagatgcttcaagatgtttgtgttgctgatttgtctaatgcggtcaaggtcaacggatacacttgcaaggactcaacacaaataacaccagaagacttctacttcaaaggcttagccaacattgccgccacaaacacctctaccggctcagtcgtgaccggagccaacgtagaaaagctaccgggactcaacactctcggcctctccatgtcccgcatcgactacgccccaaacggcctaaacccaccccatgtccacccacgtgcctccgagatcattttcgtccttgaaggtcagctctatgttggctttgtaacaaccgctggaaaactcatcgccaagaaccttaacaagggagacgttttcaccttccccaagggactcatccatttccagaagaacattgccaacagtccagcatctgtactcgcagccttcgatagccaattgcccggaacacaatcacttgtcgcctctctctttggagctcttcccgatgacattctggccaagtcattccagctcaaacacaaacaggttaagaagatcaaactgagatacgcacccaagaaatgagtttgtttttgtttatattgtaaacactaagcaaagaagaatgaatcaatataaagtttgcaactttaaaactattatgagatgaaactaaagaactgataaaaagctttgttttcattgttt

SEQ ID NO: 103132 - protein, 213 aa, Arabidopsis thaliana; identical to SEQ ID NO: 29517
  peptide (1)..(213): Ceres Seq. ID no. 13612067

SEQ ID NO: 103133 - protein, 200 aa, Arabidopsis thaliana; identical to SEQ ID NO: 29518
  peptide (1)..(200): Ceres Seq. ID no. 13612068

SEQ ID NO: 103134 - protein, 195 aa, Arabidopsis thaliana; identical to SEQ ID NO: 29519
  peptide (1)..(195): Ceres Seq. ID no. 13612069

SEQ ID NO: 103135 - DNA, 1190 bp, Arabidopsis thaliana
  misc_feature (1)..(1190): Ceres Seq. ID no. 13612077
  misc_feature (1)..(1190): Ortholog of  Ceres SEQ ID NO 14305963 as cited in SEQ ID NO 52290
  misc_feature (1)..(1190): Ortholog of  Ceres SEQ ID NO 14307492 as cited in SEQ ID NO 59504
  misc_feature (1)..(1190): Ortholog of  Ceres SEQ ID NO 13597255 as cited in SEQ ID NO 63874
atccaaagaattaaaaaccataataaaaaaagaagataaaaagacgaattccagaaaaaaaagacgcaaaatcgtcgtcgtcgtcttcgtctttgcatttcgtcggaatcttttgattcttgaatcggaatatctctgtttttgttttatccggactcaagatcaattcggattcttggaatttatttgattttttgttgttgttgttgaaaaagtggattctttggtttcgatttgtaataatcttcgtagaaaaaatggattctgattcttggagtgatcgtctcgcatcggcttcaagaagatatcagctcgatttcttgtctcgatctgacaatttcttggggtttgaggagatagaaggagaagatgacttcagggaggagtatgcttgcccgttctgttcagactattttgatatcgtctctctatgctgtcacattgatgaagatcatcctatggatgcaaaaaatggggtatgtcccatttgtgcggtgaaagtgagctctgatatgattgctcatataaccctacaacatgcaaatatgttcaaggtgacgcggaaaaggaaatcaagaagaggcggggctcaatccatgctatcgatcttgaagagagagtttcctgatggaaattttcagagcctatttgaaggaacatcacgtgctgtatcctcttcttctgccagtatagctgctgatcctttactgtcttcattcatttcaccaatggctgatgactttttcatttctgagtcaagtctatgtgcagacacaagttctgccaagaaaacattgaatcagagtttgcctgaaaggaatgttgagaagcagtctctttcagcagaggatcacagagaaaagttgaaacagagcgagttcgttcaagggatattgagctctatgattcttgaagacggcttataaaggagaaacatattccggtaacttgtctacggttagatgattcagcgattggaaaatgtaacggctttgttgtgttaaacgcaacaattgatttgggaaagggtttgggaataagcagaataatgtaaaagagagacatgataatgagtattatttttaacttatgaactacatatttgctttaatgaacactcgaattgtctgtacaccgtaggtcttacaaaaagaaaccaaaaaaaggtatgtatttgatcatatatttgc

SEQ ID NO: 103136 - protein, 222 aa, Arabidopsis thaliana
  peptide (1)..(222): Ceres Seq. ID no. 13612078
MDSDSWSDRLASASRRYQLDFLSRSDNFLGFEEIEGEDDFREEYACPFCSDYFDIVSLCCHIDEDHPMDAKNGVCPICAVKVSSDMIAHITLQHANMFKVTRKRKSRRGGAQSMLSILKREFPDGNFQSLFEGTSRAVSSSSASIAADPLLSSFISPMADDFFISESSLCADTSSAKKTLNQSLPERNVEKQSLSAEDHREKLKQSEFVQGILSSMILEDGL

SEQ ID NO: 103137 - protein, 155 aa, Arabidopsis thaliana
  peptide (1)..(155): Ceres Seq. ID no. 13612079
MDAKNGVCPICAVKVSSDMIAHITLQHANMFKVTRKRKSRRGGAQSMLSILKREFPDGNFQSLFEGTSRAVSSSSASIAADPLLSSFISPMADDFFISESSLCADTSSAKKTLNQSLPERNVEKQSLSAEDHREKLKQSEFVQGILSSMILEDGL

SEQ ID NO: 103138 - protein, 137 aa, Arabidopsis thaliana; identical to SEQ ID NO: 26320
  peptide (1)..(137): Ceres Seq. ID no. 13612080

SEQ ID NO: 103139 - DNA, 1286 bp, Arabidopsis thaliana
  misc_feature (1)..(1286): Ceres Seq. ID no. 13612081
  misc_feature (1)..(1286): Ortholog of  Ceres SEQ ID NO 13582350 as cited in SEQ ID NO 56734
  misc_feature (1)..(1286): Ortholog of  Ceres SEQ ID NO 13598527 as cited in SEQ ID NO 64914
ttcggtcaaaaacaaaagaatctaaaaatagcaagttcatcgtttgatattttagagtttaacaagaagaatcttgaaagccgtcacctacagatctgaagaatattctcaaggatagagagagaaatggcgacggacttcaagtctttaccagtcatcgacatctctcgtttactcctcaagtgtgatgatcccgacatggcagaggatgtcggtgtggccgaggttgtccagcaactggataaagcttgtcgggacgccggattcttctacgtgataggccatggaatatcagaggatgttattaacaaggttagagagatcactcgtgagttctttaagcttccttatgaagagaaacttaaaatcaaaatgactccagctgctggatacagaggatatcagagaattggagaaaatgtgaccaaaggaataccagatattcatgaagccattgattgttacagagagattaagcaggggaagtatggggatataggcaaagttatggaagggccaaaccagtggccagagaatcctcaggagtttaaagagttgatggaggagtatattaagctatgtacagatctttctagaaagattttgagaggaatctccttagctcttgctggatcaccttatgagttcgagggaaagatggctggtgatcctttttgggtgatgcgtcttattggttatccaggtgctgagttcacaaatggccaacctgaaaatgatattggatgtggagctcacactgactatggcttgttaactcttgtgaatcaagatgatgacaaaactgctcttcaggtgagaaacttgggcggtgagtggatatcagccattccaatccctggatcgtttgtttgcaacatcggtgacatgttaaagatactttcaaacggagtatacgaatccacacttcatagagtgatcaataactctcctcaataccgtgtttgtgtcgcattcttctatgagactaacttcgacgcggtggtggagccattggatatatgtaaacagaagtacccgggagggagaggaggatgccaagttttcaaaagagctgtgtatggagagcatctcgtaagtaaagtccagaccaactttgctatgtaatggaaggcagatctctctctccttctttgtacacaatacaccaacttatcttaaagtttgatttgtaataatagtaaggtacttctttacttctgtgttatcattggatatacatgtatttgcttcaaaaaacaaaatgaaaaaggtaatttagtttgttg

SEQ ID NO: 103140 - protein, 332 aa, Arabidopsis thaliana
  peptide (1)..(332): Ceres Seq. ID no. 13612082
MATDFKSLPVIDISRLLLKCDDPDMAEDVGVAEVVQQLDKACRDAGFFYVIGHGISEDVINKVREITREFFKLPYEEKLKIKMTPAAGYRGYQRIGENVTKGIPDIHEAIDCYREIKQGKYGDIGKVMEGPNQWPENPQEFKELMEEYIKLCTDLSRKILRGISLALAGSPYEFEGKMAGDPFWVMRLIGYPGAEFTNGQPENDIGCGAHTDYGLLTLVNQDDDKTALQVRNLGGEWISAIPIPGSFVCNIGDMLKILSNGVYESTLHRVINNSPQYRVCVAFFYETNFDAVVEPLDICKQKYPGGRGGCQVFKRAVYGEHLVSKVQTNFAM

SEQ ID NO: 103141 - protein, 308 aa, Arabidopsis thaliana
  peptide (1)..(308): Ceres Seq. ID no. 13612083
MAEDVGVAEVVQQLDKACRDAGFFYVIGHGISEDVINKVREITREFFKLPYEEKLKIKMTPAAGYRGYQRIGENVTKGIPDIHEAIDCYREIKQGKYGDIGKVMEGPNQWPENPQEFKELMEEYIKLCTDLSRKILRGISLALAGSPYEFEGKMAGDPFWVMRLIGYPGAEFTNGQPENDIGCGAHTDYGLLTLVNQDDDKTALQVRNLGGEWISAIPIPGSFVCNIGDMLKILSNGVYESTLHRVINNSPQYRVCVAFFYETNFDAVVEPLDICKQKYPGGRGGCQVFKRAVYGEHLVSKVQTNFAM

SEQ ID NO: 103142 - protein, 250 aa, Arabidopsis thaliana
  peptide (1)..(250): Ceres Seq. ID no. 13612084
MTPAAGYRGYQRIGENVTKGIPDIHEAIDCYREIKQGKYGDIGKVMEGPNQWPENPQEFKELMEEYIKLCTDLSRKILRGISLALAGSPYEFEGKMAGDPFWVMRLIGYPGAEFTNGQPENDIGCGAHTDYGLLTLVNQDDDKTALQVRNLGGEWISAIPIPGSFVCNIGDMLKILSNGVYESTLHRVINNSPQYRVCVAFFYETNFDAVVEPLDICKQKYPGGRGGCQVFKRAVYGEHLVSKVQTNFAM

SEQ ID NO: 103143 - DNA, 1473 bp, Arabidopsis thaliana
  misc_feature (1)..(1473): Ceres Seq. ID no. 13612088
  misc_feature (1)..(1473): Ortholog of  Ceres SEQ ID NO 15177012 as cited in SEQ ID NO 56256
  misc_feature (1)..(1473): Ortholog of  Ceres SEQ ID NO 13596509 as cited in SEQ ID NO 62004
  misc_feature (1)..(1473): Ortholog of  Ceres SEQ ID NO 13500385 as cited in SEQ ID NO 67583
ctttgtctttctcattcgtcgttgatccatctttttcccccaaattcatatccttccttagatatttttctccttcttcttcttctagattccagctactccagaagattcttcgacttaatctgatgtgattaggaagagcaatagaggaagagaagaatcagaaaaaatggatccggcgactaattcaccgattatgccgattgatttaccgattatgcacgacagtgatcgttacgacttcgttaaagatattggctctggtaatttcggcgttgctcgtctcatgaccgatagagtcaccaaggagcttgttgctgttaaatacatcgagagaggagaaaagattgatgaaaatgttcagagggagattatcaatcatagatcattgagacatcctaatattgttaggtttaaagaggtgattttgacgccttcccatttggctattgttatggaatatgctgctggtggagaactttatgagcggatttgtaatgccggacggtttagtgaagatgaggctcggttcttctttcagcagcttatatctggagttagctattgtcatgcaatgcaaatatgccatcgggatctgaagctggaaaatacattgttagatggaagtccggcacctcgtttgaaaatatgtgattttggttattccaagtcttctgttcttcattcccaaccaaagtcaactgttggtactcctgcatacattgcaccagagattcttcttcgacaggaatatgatggcaagcttgcagatgtatggtcttgcggtgtaacattatatgtaatgttggttggagcttatccattcgaggatccacaggagccacgagattatcgaaagacaatacaaagaatccttagtgtcacatactcgatcccagaggacttacacctctcaccagaatgtcgccatctaatatcgaggatcttcgtggctgatccggcaacaagaatcactattccggagatcacatccgataaatggttcttgaagaatctaccaggtgatttgatggatgagaaccgaatgggaagtcagtttcaagagcctgagcagccaatgcagagccttgacacgattatgcagataatatcggaggctacgattccgactgttcgtaatcgttgcctcgatgatttcatggcggataatcttgatctagacgatgacatggatgactttgattccgaatctgagattgatgttgacagtagtggagagatagtttatgctctctgagattcctgaggacaaagtctgttttgtccgtactgttgagacacaccactggagttttgtcttagctccacgcactccatcgttcatttttggatcgtttgttgttttttactctacaagctttggattcacatacatatatatgtattgtaatgtaatatgtaatatattctatgtatttctctttgtttaataactattggcacattttatac

SEQ ID NO: 103144 - protein, 362 aa, Arabidopsis thaliana
  peptide (1)..(362): Ceres Seq. ID no. 13612089
MDPATNSPIMPIDLPIMHDSDRYDFVKDIGSGNFGVARLMTDRVTKELVAVKYIERGEKIDENVQREIINHRSLRHPNIVRFKEVILTPSHLAIVMEYAAGGELYERICNAGRFSEDEARFFFQQLISGVSYCHAMQICHRDLKLENTLLDGSPAPRLKICDFGYSKSSVLHSQPKSTVGTPAYIAPEILLRQEYDGKLADVWSCGVTLYVMLVGAYPFEDPQEPRDYRKTIQRILSVTYSIPEDLHLSPECRHLISRIFVADPATRITIPEITSDKWFLKNLPGDLMDENRMGSQFQEPEQPMQSLDTIMQIISEATIPTVRNRCLDDFMADNLDLDDDMDDFDSESEIDVDSSGEIVYAL

SEQ ID NO: 103145 - protein, 353 aa, Arabidopsis thaliana
  peptide (1)..(353): Ceres Seq. ID no. 13612090
MPIDLPIMHDSDRYDFVKDIGSGNFGVARLMTDRVTKELVAVKYIERGEKIDENVQREIINHRSLRHPNIVRFKEVILTPSHLAIVMEYAAGGELYERICNAGRFSEDEARFFFQQLISGVSYCHAMQICHRDLKLENTLLDGSPAPRLKICDFGYSKSSVLHSQPKSTVGTPAYIAPEILLRQEYDGKLADVWSCGVTLYVMLVGAYPFEDPQEPRDYRKTIQRILSVTYSIPEDLHLSPECRHLISRIFVADPATRITIPEITSDKWFLKNLPGDLMDENRMGSQFQEPEQPMQSLDTIMQIISEATIPTVRNRCLDDFMADNLDLDDDMDDFDSESEIDVDSSGEIVYAL

SEQ ID NO: 103146 - protein, 346 aa, Arabidopsis thaliana
  peptide (1)..(346): Ceres Seq. ID no. 13612091
MHDSDRYDFVKDIGSGNFGVARLMTDRVTKELVAVKYIERGEKIDENVQREIINHRSLRHPNIVRFKEVILTPSHLAIVMEYAAGGELYERICNAGRFSEDEARFFFQQLISGVSYCHAMQICHRDLKLENTLLDGSPAPRLKICDFGYSKSSVLHSQPKSTVGTPAYIAPEILLRQEYDGKLADVWSCGVTLYVMLVGAYPFEDPQEPRDYRKTIQRILSVTYSIPEDLHLSPECRHLISRIFVADPATRITIPEITSDKWFLKNLPGDLMDENRMGSQFQEPEQPMQSLDTIMQIISEATIPTVRNRCLDDFMADNLDLDDDMDDFDSESEIDVDSSGEIVYAL

SEQ ID NO: 103147 - DNA, 1191 bp, Arabidopsis thaliana
  misc_feature (1)..(1191): Ceres Seq. ID no. 13612109
  misc_feature (1)..(1191): Ortholog of  Ceres SEQ ID NO 13587149 as cited in SEQ ID NO 0
acacttcactccaacgtgaaacctgcaaactgaacttatctcttcatattttctttagcttctcttaattttacacttagggttttcaaaccagtagagagagagagaagtgtgtaagagcgatgatgcagactccgtacactacttcaacgcaggggcaatattgtcattcttgtggaatgttccaccaccatagccaaagctgctgctacaacaacaacaacaactccaacgccggttcttactcgatggtcttctccatgcaaaacggtggcgttttcgagcagaacggtgaggactatcatcactcttcctccctcgttgactgcactctctctcttggaactccttctacgaggctttgtgaggaagatgagaaacgtagacgctctacttcatctggtgcttcttcttgcatctccaacttttgggacttgattcacaccaaaaacaacaactccaaaacggcaccgtacaataacgttccttctttctccgctaacaagccaagtcgcggttgttccggtggtggtggtggcggaggaggcggtggcggaggtgactctcttctcgctagacgctgtgccaactgtgacactacttctactccactatggaggaatggtcctagaggccctaagtccctatgcaacgcatgcggcattcgtttcaagaaggaagagagaagaactactgcggctacaggaaacaccgtcgtcggagctgcaccggttcaaaccgaccagtacgggcatcacaactctggctacaataattaccatgctgccactaataacaacaataataatggtactccgtgggctcatcaccactcgacgcagagggttccgtgtaattatccggcaaatgagatcaggttcatggatgattacggcagtggagtagcaaacaacgttgaatccgacggtgctcacggcggtgttccgttcctttcttggaggcttaatgtagcggatagggcaagtcttgtccatgactttaccagatgaaaggagaatagaaaacgacgttagattctcttaaaatttccatgtggtttaattatgtctaattaaaaaaaaaccaagaaaatatttctgaaaaaaatagaagtgtatatcgagagacgatgttgatgtttattgatagtgacggtctaacttatggtttatctataaagtaccgttctgg

SEQ ID NO: 103148 - protein, 295 aa, Arabidopsis thaliana
  peptide (1)..(295): Ceres Seq. ID no. 13612110
MMQTPYTTSTQGQYCHSCGMFHHHSQSCCYNNNNNSNAGSYSMVFSMQNGGVFEQNGEDYHHSSSLVDCTLSLGTPSTRLCEEDEKRRRSTSSGASSCISNFWDLIHTKNNNSKTAPYNNVPSFSANKPSRGCSGGGGGGGGGGGGDSLLARRCANCDTTSTPLWRNGPRGPKSLCNACGIRFKKEERRTTAATGNTVVGAAPVQTDQYGHHNSGYNNYHAATNNNNNNGTPWAHHHSTQRVPCNYPANEIRFMDDYGSGVANNVESDGAHGGVPFLSWRLNVADRASLVHDFTR

SEQ ID NO: 103149 - protein, 294 aa, Arabidopsis thaliana
  peptide (1)..(294): Ceres Seq. ID no. 13612111
MQTPYTTSTQGQYCHSCGMFHHHSQSCCYNNNNNSNAGSYSMVFSMQNGGVFEQNGEDYHHSSSLVDCTLSLGTPSTRLCEEDEKRRRSTSSGASSCISNFWDLIHTKNNNSKTAPYNNVPSFSANKPSRGCSGGGGGGGGGGGGDSLLARRCANCDTTSTPLWRNGPRGPKSLCNACGIRFKKEERRTTAATGNTVVGAAPVQTDQYGHHNSGYNNYHAATNNNNNNGTPWAHHHSTQRVPCNYPANEIRFMDDYGSGVANNVESDGAHGGVPFLSWRLNVADRASLVHDFTR

SEQ ID NO: 103150 - protein, 276 aa, Arabidopsis thaliana
  peptide (1)..(276): Ceres Seq. ID no. 13612112
MFHHHSQSCCYNNNNNSNAGSYSMVFSMQNGGVFEQNGEDYHHSSSLVDCTLSLGTPSTRLCEEDEKRRRSTSSGASSCISNFWDLIHTKNNNSKTAPYNNVPSFSANKPSRGCSGGGGGGGGGGGGDSLLARRCANCDTTSTPLWRNGPRGPKSLCNACGIRFKKEERRTTAATGNTVVGAAPVQTDQYGHHNSGYNNYHAATNNNNNNGTPWAHHHSTQRVPCNYPANEIRFMDDYGSGVANNVESDGAHGGVPFLSWRLNVADRASLVHDFTR

SEQ ID NO: 103151 - DNA, 852 bp, Arabidopsis thaliana
  misc_feature (1)..(852): Ceres Seq. ID no. 13612113
  misc_feature (1)..(852): Ortholog of  Ceres SEQ ID NO 13594465 as cited in SEQ ID NO 51233
  misc_feature (1)..(852): Ortholog of  Ceres SEQ ID NO 13585110 as cited in SEQ ID NO 60647
tttcaagtctcgaactttgttggaatcggctaagtgataatttcgaagcttgatcggtaaatccaggagcttttggatcggaatctgttcgctgatgctttggtgaaaatgggtttcggtgcaattagatcgattttgcgtccattgtcgagaaccttagtttcgcgtgccgtcgttaactactcgtctgcgccgttcaatgcgacgattccggctgctaaacccgagttatgttccttcttcggtggatcgatgactcatttgaggttaccatggattccaatggctaaccattttcatagcttaagcttgactgatactcggctcccgaagagacgacccatgactcatcccaagaggaaaagatccaaattgaaacctccagggccttatgcatacgttcaatatacacctggccagccaatttcttcaaacaatcctaatgagggaagtgtgaagagaagaaatgcgaagaagcgcatagggcagcgtcgtgcttttatactgtctgagaagaagaagaggcaagcgctggtgcaagaggcgaagaggaagaagagaattaagcaagtggaacgtaagatggctgctgtcgctagggaccgagcatgggctgaaagactgattgagcttcaacagctggaagaagagaagaagaaatcaatgtcttcttgagatcaaacatagaaataatcctaaatgacaatctcttttcttgtcttgagttagagaattactcttctttgttgtgtttggcatgttctcttgagagttaactcgctatgttgtctgaagaactgagagttacttgacgtttgtgttctttatatccagtcatgtgtttcttgtttc

SEQ ID NO: 103152 - protein, 188 aa, Arabidopsis thaliana
  peptide (1)..(188): Ceres Seq. ID no. 13612114
MGFGAIRSILRPLSRTLVSRAVVNYSSAPFNATIPAAKPELCSFFGGSMTHLRLPWIPMANHFHSLSLTDTRLPKRRPMTHPKRKRSKLKPPGPYAYVQYTPGQPISSNNPNEGSVKRRNAKKRIGQRRAFILSEKKKRQALVQEAKRKKRIKQVERKMAAVARDRAWAERLIELQQLEEEKKKSMSS

SEQ ID NO: 103153 - protein, 140 aa, Arabidopsis thaliana
  peptide (1)..(140): Ceres Seq. ID no. 13612115
MTHLRLPWIPMANHFHSLSLTDTRLPKRRPMTHPKRKRSKLKPPGPYAYVQYTPGQPISSNNPNEGSVKRRNAKKRIGQRRAFILSEKKKRQALVQEAKRKKRIKQVERKMAAVARDRAWAERLIELQQLEEEKKKSMSS

SEQ ID NO: 103154 - protein, 130 aa, Arabidopsis thaliana; identical to SEQ ID NO: 29556
  peptide (1)..(130): Ceres Seq. ID no. 13612116

SEQ ID NO: 103155 - DNA, 904 bp, Arabidopsis thaliana
  misc_feature (1)..(904): Ceres Seq. ID no. 13612117
  misc_feature (1)..(904): Ortholog of  Ceres SEQ ID NO 13662725 as cited in SEQ ID NO 64628
atcgttcgtaaaattggggccgagagagaaacaaaaatttcccaggaaaaaggcagtgattgaagattgtattagatccgattaatcgtcttcctggtcgcttgaactgagaatcaaataattgagctcaactggatttggatatgggagagacagcaacagattcagaacatcgcatgatgatcggattatcggatcctatgaaaattgatcccaaaagagaccggtttccatgctgcattgtttggacacctcttcccttcatttcatggctggttcccttcatcggccacgtcggtatctgcagagaagacggtgtcatcctcgactttgcaggacctaattttgtctgtgttgataattttgcatttggagctgtttctcgatatattcaaatcaacaaagaaatggagtcatctcgttcttccagttctggtatgttcaatggtgagaggagatatgagcaagaagaagatagtcatgagaaagagccaacatgggatgatgcactgagaaaaagcacgcaagagtaccaacatcactcatataacatactcacatgcaactgtcattcctttgtagccaacaacctgaaccgtctatctataaagtcaggcggatggaacgtggtgaatctcgcgacactagtgcttttcaagggacgttgggtgaacaaaacggctatagtaaagtccttgttgcctccactcatagtctacactataggaatcttactcggtggttggactttcattgcctcctgctcgattctagtggttttgcttaccgggtggttcatcattggaacgtattgtttcaagaaactgattcagctgtagatttgaatcataatgtacaaatgatgtctacaaaatgttttttactttttacgatggatatttac

SEQ ID NO: 103156 - protein, 231 aa, Arabidopsis thaliana; identical to SEQ ID NO: 21948
  peptide (1)..(231): Ceres Seq. ID no. 13612118

SEQ ID NO: 103157 - protein, 220 aa, Arabidopsis thaliana; identical to SEQ ID NO: 21949
  peptide (1)..(220): Ceres Seq. ID no. 13612119

SEQ ID NO: 103158 - protein, 219 aa, Arabidopsis thaliana; identical to SEQ ID NO: 21950
  peptide (1)..(219): Ceres Seq. ID no. 13612120

SEQ ID NO: 103159 - DNA, 1416 bp, Arabidopsis thaliana
  misc_feature (1)..(1416): Ceres Seq. ID no. 13612121
  misc_feature (1)..(1416): Ortholog of  Ceres SEQ ID NO 12617323 as cited in SEQ ID NO 64129
aattcaacacggattttcaacacagagctgacgttagcatttgtctctgaaatcccagatccgaaaacccaacaatggcgtcagagaacaacggatccagatccgattccgaatccatcaccgctcccaaagctgattccaccgtcgttgaaccgaggaagatagctctgatcaccggaatcaccggccaggacggatcatacctgacggagttccttctcggaaaaggctacgaagttcatggtctgatccgtcgatcatcgaatttcaacacccagcgaatcaaccatatctacatcgatccacacaatgtcaacaaagctctgatgaaactccactacgccgatctcaccgacgcttcctctctccgtcgttggatcgatgtgatcaaacctgacgaagtttataacctagctgctcaatctcacgtcgctgtctccttcgagatccctgattacacagccgatgtagtcgcaaccggtgctctccgtctccttgaagccgtcagatctcacaccatcgacagtggccgtaccgtcaagtattaccaagccggatcttcggagatgtttggatcaactcctcctccacaatcggagacgacgccgattcacctcagatctccttacgcagcttccaaatgcgctgctcattggtacacagtgaattacagagaggcgtacggtctcttcgcttgtaacggaatcttgttcaatcacgagtcacctcgccgtggtgagaatttcgtgacgaggaagatcacaagagcattgggaaggatcaaggttggtttgcagacgaagctattccttgggaatttgcaagcgtcaagagattggggatttgcaggagattatgtggaagcaatgtggttgatgttgcagcaagagaagccagatgattacgttgtggcaacagaggaaggacacacagtggaagagtttcttgatgtgtcatttgggtatttgggactcaattggaaagattatgttgagattgaccagaggtactttaggcctgctgaagtagataaccttcaaggagatgcaagcaaggcaaaggaagtgttggggtggaaaccacaagtagggtttgagaagcttgtgaagatgatggttgatgaagatcttgagcttgctaagagggagaaagtgcttgttgatgctggatacatggatgctaagcagcaaccttgatttgatcaattatacaaagatggagtttcttacatttatctgcttttatagagttttaaatttcgtttttttttctttctctttttgttgctttggtggttgtttgttgtctttttatgttttagtttctttgttgctttttaagttatctaaattgtttccctccaatgagttgaggatgaaagcgcagtgaattttgaatgaaggagcaaaaagaatc

SEQ ID NO: 103160 - protein, 373 aa, Arabidopsis thaliana
  peptide (1)..(373): Ceres Seq. ID no. 13612122
MASENNGSRSDSESITAPKADSTVVEPRKIALITGITGQDGSYLTEFLLGKGYEVHGLIRRSSNFNTQRINHIYIDPHNVNKALMKLHYADLTDASSLRRWIDVIKPDEVYNLAAQSHVAVSFEIPDYTADVVATGALRLLEAVRSHTIDSGRTVKYYQAGSSEMFGSTPPPQSETTPIHLRSPYAASKCAAHWYTVNYREAYGLFACNGILFNHESPRRGENFVTRKITRALGRIKVGLQTKLFLGNLQASRDWGFAGDYVEAMWLMLQQEKPDDYVVATEEGHTVEEFLDVSFGYLGLNWKDYVEIDQRYFRPAEVDNLQGDASKAKEVLGWKPQVGFEKLVKMMVDEDLELAKREKVLVDAGYMDAKQQP

SEQ ID NO: 103161 - protein, 289 aa, Arabidopsis thaliana
  peptide (1)..(289): Ceres Seq. ID no. 13612123
MKLHYADLTDASSLRRWIDVIKPDEVYNLAAQSHVAVSFEIPDYTADVVATGALRLLEAVRSHTIDSGRTVKYYQAGSSEMFGSTPPPQSETTPIHLRSPYAASKCAAHWYTVNYREAYGLFACNGILFNHESPRRGENFVTRKITRALGRIKVGLQTKLFLGNLQASRDWGFAGDYVEAMWLMLQQEKPDDYVVATEEGHTVEEFLDVSFGYLGLNWKDYVEIDQRYFRPAEVDNLQGDASKAKEVLGWKPQVGFEKLVKMMVDEDLELAKREKVLVDAGYMDAKQQP

SEQ ID NO: 103162 - protein, 209 aa, Arabidopsis thaliana
  peptide (1)..(209): Ceres Seq. ID no. 13612124
MFGSTPPPQSETTPIHLRSPYAASKCAAHWYTVNYREAYGLFACNGILFNHESPRRGENFVTRKITRALGRIKVGLQTKLFLGNLQASRDWGFAGDYVEAMWLMLQQEKPDDYVVATEEGHTVEEFLDVSFGYLGLNWKDYVEIDQRYFRPAEVDNLQGDASKAKEVLGWKPQVGFEKLVKMMVDEDLELAKREKVLVDAGYMDAKQQP

SEQ ID NO: 103163 - DNA, 1644 bp, Arabidopsis thaliana
  misc_feature (1)..(1644): Ceres Seq. ID no. 13612125
  misc_feature (1)..(1644): Ortholog of  Ceres SEQ ID NO 15176219 as cited in SEQ ID NO 58640
  misc_feature (1)..(1644): Ortholog of  Ceres SEQ ID NO 14303413 as cited in SEQ ID NO 59769
aacgacaacacgacgaagatgaatccttctcacggtggcgacgacaagcaacgaccggcgatgtatccccaagttgatcaatccattcctgataatccttttgcttctacaaatccttacgtcgcttcttcaccttatctatatccttctctatcctctcataatctcggacctaatctcttcccagaccacggagatgcatccaacgaccaatcaccatctgctcctcctcaggcgacggaggaggttctcatccgtgttcccggcgctattctcaaccttatcgacaaatcctacagcgttgaactcgcgtgcggtgatttcaccatcgttcgaattatccaggggcaaaacattgtagcggttctagccaatgttggaaatgagattcaatggccgttgacgaagaacgaggttgcagctaaggttgatggatctcactatttcttttcgattcatccgccaaaggagaaaggtcaaggatctgggtctgattcagatgatgaacaagggcaaaagagtaaatcgaaatcggatgatgagattcttaattacggattgaccattgcttcgaaagggcaagagaatgtattacttgtgcttgatcaggttttacgagactacagttgtttcacagagcagagaatgtctgaaaaagccaaggagactggagaagaggtgctgggaaattcagtggtggcggacacttcgccggaggagcttaagggtgagagaaaggatgttgtggaaggtcaatgtgcggcgtattggacaacacttgcaccgaatgtcgaggattatactcacagtactgctaaaatgatagcttccgggtcaggtaagctgatcagagggatactgtggtgtggggatgtaactgtggagagactcaagaagggaaacgaggttatgaagaataggcttagtcgtgctgagaaggagaaagatgttagccctgagacactgaggagaatcaagagggttaagagagtgacacaaatgacagagaaagttgccactggtgttctttctggtgttgtcaaagtctcgggattcatcactggttcaatggcaaactcaaaagctggaaagaagctttttggtctcttgcctggagagattgttctcgcatccctcgatggatttagcaagatctgtgatgctgttgaagttgctgggaaaaacgtaatgtcgacttcatcaactgtcacaacagaattagtcaatcacaggtacggcacaaaagcagcagaggctactaacgaagggctagacgcagcgggacatgcatttggaacggcatgggttgctttcaagattcgaaaggcatttaaccccaaaaatgtcataaagccttcatcattggccaagtctgtttcggaactaaaggctaagaaaggctccaagtaaacactaaacagccttcaactgttctgtgttcatctaaacttgcatttagtttttcattttggaaaagtatatgaagattgattgatgtaactctatatttagttttctgtgtatattgtgattctatgtaaactatataaacagtttcttccaatcttctcccatttatgggtttgatttgtaacttcttaatgcatcgagaagcagtattagtactctttatctttcttttgt

SEQ ID NO: 103164 - protein, 469 aa, Arabidopsis thaliana; identical to SEQ ID NO: 39627
  peptide (1)..(469): Ceres Seq. ID no. 13612126

SEQ ID NO: 103165 - protein, 463 aa, Arabidopsis thaliana; identical to SEQ ID NO: 39628
  peptide (1)..(463): Ceres Seq. ID no. 13612127

SEQ ID NO: 103166 - protein, 449 aa, Arabidopsis thaliana; identical to SEQ ID NO: 39629
  peptide (1)..(449): Ceres Seq. ID no. 13612128

SEQ ID NO: 103167 - DNA, 1162 bp, Arabidopsis thaliana
  misc_feature (1)..(1162): Ceres Seq. ID no. 13612129
  misc_feature (1)..(1162): Ortholog of  Ceres SEQ ID NO 15224319 as cited in SEQ ID NO 66044
  misc_feature (1)..(1162): Ortholog of  Ceres SEQ ID NO 13598045 as cited in SEQ ID NO 66822
aagtcgggaatcgtttactgtgaaataaaaacgagagagagtttttgaagaagaagaaagaacactcacaagatccagaaaaaggtaaaagatggcgagatacgatcgagcaatcactgtattctcccccgatggtcacctcttccaagtagagtatgccctagaagccgtccgaaagggtaacgccgccgtcggagtccgcggcacagatactgtcgtcctcgccgtcgaaaagaaatccacccctaagctccaggattccagatcagcaaggaagatagtgagccttgataatcacattgcattggcctgtgctggactgaaagcagatgctcgtgtcttgataaacaaggcgaggatagagtgtcaaagccacaggcttacgttggaggacccagttactgttgagtacattactcggtacatagcagggcttcaacagaagtatactcaaagtggtggtgtgaggccttttggtctttccactcttattgttgggtttgatccctacactcgtatacccgcgctttatcagaccgatccatctggtacattctctgcttggaaagctaatgcaactgggagaaactctaactcaattagggagtttctggagaaaaactacaaagaaagcgctggccaagaaactgttaagcttgctatccgtgctctgcttgaggttgttgagagtgggggaaagaacattgaggttgctgtaatgacacgagaggaaggtgttctgaagcaactagaagaagaagaaattgatatcattgtggctgagatcgaagcagagaaggctgcagctgaagcagccaagaaaggccctgcgaaggaaacatgaaccagatcttaaagtagcggtctcagattatgagttgtaatgctggttcaaagtcagggatattcaagggttgaatagaaaatctagaccgcatgaaatggtttgttggattactagcctatttgacactgttgctttaaatcttaaatgacattttagcggagtttcgatacttgtcagttggaactatggcatgttcagtattctagatgactttgcatttgcgctcaagagttgtagattttgattttggaaacgttgtttcttactaaacatgtctctcttcttattatctccattgtgtaacttaccgttttt

SEQ ID NO: 103168 - protein, 250 aa, Arabidopsis thaliana; identical to SEQ ID NO: 23104
  peptide (1)..(250): Ceres Seq. ID no. 13612130

SEQ ID NO: 103169 - DNA, 926 bp, Arabidopsis thaliana
  misc_feature (1)..(926): Ceres Seq. ID no. 13612152
  misc_feature (1)..(926): Ortholog of  Ceres SEQ ID NO 15172991 as cited in SEQ ID NO 51333
  misc_feature (1)..(926): Ortholog of  Ceres SEQ ID NO 13594870 as cited in SEQ ID NO 51929
  misc_feature (1)..(926): Ortholog of  Ceres SEQ ID NO 12635481 as cited in SEQ ID NO 0
aggtaaccggtaataagcatctctttctcttttcctcctccttcaggcctcatctcttactctctctctgatcgtcgtctttttcttttgattctgcttttttccgctaggtttctgagatcttccattcgtctcgaattaagttgctacgatgaaaacagcaaaggggaaagataaagttaagaccacaaaggaagccttgaagccagttgatgacagaaaggtgggaaagaggaaggcaccggctgagaagcctactaaacgagagactcgtaaagagaagaaggctaaaaaggacccaaacaaaccaaaaagagctcctagtgccttctttgtctttctagaagattttagggtcacgttcaagaaagaaaatccaaatgtgaaggccgtctctgctgttgggaaagctggagggcagaaatggaagtcaatgtctcaagctgaaaaagctccatatgaagagaaagctgcaaaaaggaaagctgaatatgagaagcaaatggatgcatacaacaaaaacttggaggaagggagtgatgaatctgaaaagtctagatctgagataaatgatgaagatgaagccagtggggaggaagaactattagagaaggaagcggcaggtgatgatgaagaagaagaagaggaagaagatgacgatgatgatgacgacgaggaagaagactaaatcagggatagaaatcagattttgtatctcaagcttaactgcagatccttaagcagaagtaagtattttgtaatttgtgtgtggacgagaactatagatctaaaatcgtgtgtttttttgtttttcttttcctaagaaagcgaaacagttgttagcatctctcaggatgtctgtttcagctttttgccacaacaaacaatgtaccaatgtctgcgttagtgatcatccaaaccaaaac

SEQ ID NO: 103170 - protein, 178 aa, Arabidopsis thaliana; identical to SEQ ID NO: 39493
  peptide (1)..(178): Ceres Seq. ID no. 13612153

SEQ ID NO: 103171 - DNA, 2421 bp, Arabidopsis thaliana
  misc_feature (1)..(2421): Ceres Seq. ID no. 13612154
  misc_feature (1)..(2421): Ortholog of  Ceres SEQ ID NO 15175681 as cited in SEQ ID NO 55458
  misc_feature (1)..(2421): Ortholog of  Ceres SEQ ID NO 15180188 as cited in SEQ ID NO 0
atctctctctttcttcttccactcgtgaaagaaagaccagagagttttctcctgatccacacaacaacaacaacacagagatcccaaatccggaagatatcttcttctctcataactcagtttactcagattcactgaaacatacaattaagttaaccgtcagtctctcacctgcagcaaaattcactcttctgctaataatgttctccacagagattcatctattgatcattttgactttttcaggaaccagagatgaaaaattatagttaaggttagtagtagtagataggtttaataaatttgtagttaagtaacccaaaaaaataacattaaactaaaatccaacactagaaaccagagagaccctcttaacgacaacaacctctctgtacacaagacaacaaacactctctacaaaaacactactctttccttcttcttctctctactctattctaattctaaagagagagagaaaagctatggatggatatgaagctactaggattgtgctctctagaatccaaagcttagaccctgaaaacgcatcaaagatcatgggtcttctccttcttcaagatcacggtgaaaaagagatgataaggctagcttttggtccagagactcttgttcactctgttatagtgaaagccaagaaagagttaggtctcatgaactgttcaaggtctccgtggagtcatcaagatgagttgattagccctaagaacaaccgtggctcttcactcaatccagcttctttgcccttttacgctaatggaggaagatcttctagggatttaaccaacgatttcgagctcatggatgatatgaactccagaagtactgattttttgggctctgtgcatgcgagaagcggtagctgcgttttggacggtttagggtatggtggtgattctgatttagggtttggaggtgtgccctgttcttacttcgctagaggcttctgcaaaaacggagctagctgcagattcgtccacagtgatggaggagctgatttggttggctccccaagcagaatcgagcttcttaggtctaactcggtacccccaagacttgctcaccacttcatgactcgctcttctctcccttctttttcaactaaaggtgttaacttgcagcaaaacgatgttcaaagagctgctgctgctttgatgataggagatgaattgcagaagcttggaagatggagacctgaaaggattgatctttctgctatggcttgtccagcttcaagacagatctatctgacattccctgccgacagtaggttcagggaggaagatgtgtccaattacttcagtacttttggaccagttcaagatgtgaggataccatatcagcaaaagagaatgtttggttttgtgacatttgtgtaccctgagactgttaagagcattctcgccaaagggaatcctcactttgtgtgtgattccagagttcttgtcaagccttacaaggagaaaggcaaagtccctgacaaatacagaactaaccaaacaacagagcgagaactgtccccaacaggccttgattctagccctagggacgttctaggagggagagggttttataacaacactcaagatgtgttgtggaggagtaagtttgaagaagagattcttgaacttcagagcagaaggctgatgaatctgcagcttcttgacgtcaagaagcatttccaactcaattcccctaccaacattcactctccgaatcctttcagccaatcacttatatctccacgcccattgtccgtgatcaagagagagtatgatggaggagagaaagggaaaggaagttctaaagaaggatctgatgatgatacaatgaatctaccagagaggttggaggatagcttgccagatagtccgtttgcatcgcccgctcatcatttgcttctgtttgctgattctgctgacaataacggatcggatctgtggtcgccttcttctgataatgatgataattctactccttctacactctccgactccttcaactctttcaactaccaaatgccaaggttaccggcgattggaatgttacccggtaggggtggaccaacctgtcgtgttgggatataaacaggaagtgaagtaagaaaagaaaaaaactgataaaatagagagacccttaataaccaaaaagatgcagaggtgtaaaaaataaaaagcaggaaatttgatgtaagagataggagaagagaaagaaggaagattgttgtaccatttctctagttttaatgtgttatgtgatgatggaccacacaagatgatgtaatatgatatgatatgatatatataatataggacaagaagtgtaatctctctaaagatatacaaaagaaaagagagattatcatttgagtttgaaaagtcaatatgttcttgtccgtgc

SEQ ID NO: 103172 - protein, 540 aa, Arabidopsis thaliana; identical to SEQ ID NO: 37383
  peptide (1)..(540): Ceres Seq. ID no. 13612155

SEQ ID NO: 103173 - protein, 515 aa, Arabidopsis thaliana; identical to SEQ ID NO: 37384
  peptide (1)..(515): Ceres Seq. ID no. 13612156

SEQ ID NO: 103174 - protein, 502 aa, Arabidopsis thaliana; identical to SEQ ID NO: 37385
  peptide (1)..(502): Ceres Seq. ID no. 13612157

SEQ ID NO: 103175 - DNA, 1451 bp, Arabidopsis thaliana
  misc_feature (1)..(1451): Ceres Seq. ID no. 13612158
  misc_feature (1)..(1451): Ortholog of  Ceres SEQ ID NO 13654989 as cited in SEQ ID NO 63117
  misc_feature (1)..(1451): Ortholog of  Ceres SEQ ID NO 13655640 as cited in SEQ ID NO 63844
gagtctaatcaaatgtgccttaatttacaaaaatgacttctcacgactcacgccattaaactccacgtacacctttccctttcactttcatcttcttcttccctcgattcaatgggttatctctcctgcaaagctggatccgccgtcgcaatcgccgtttcatctgccgcatcaacctccggatccacctccagcaaagcttctgctcctcccgaatctcccattgaagaccgtcctagacttcgtcgtttcctccatcgcgatctcgaatcagccacaggaggtttcgacatcaacaatctcctcggacgtggaagccatggaagcgtttacaaagctgtcatcggttcacgtcacatcgcggtcaagagaccttcgaaatctcgagaaatcagccgtgagttccacaacgaattcgagattctctccagaatccgtagccctaggtttgtgaatctcttaggttttagcgccgataactccaaagaaccacttctcgttgttgaattcatgggaaacggaagcttatacgacgtgattcactcagataccgttttaaactccggtgcgatttcgagctggagtaagagaatcaaaatcgctcttcagattgcaaaagccgtacatcttctacattctcaagagacaccgatcatacacagagatataaaatcagcaaacgtattgatggataagaatctaaacgcgaagctaggcgatttcggattagcgatcagatgcaatgttgatgatcaaaaagtgaaatcaacaccacctgcaggaacaatgggttacttagatccagattacgtaacggctgatagattaagcacgaaaactgatgtgtttagcttcgggatcttgttgttagagataatcagcggaagaaaagcaatcgacgttagatattcgccgtcgtttatagtagattgggcgattccgatgataaaaagaggcaaaatcggtgggatttatgatccgagaatcggaccaccgattgatgtaagtgtgaggaatcatttggggttagtggcggctaagtgtgtgagaacgtgtagagagaaacggccggggatggaggaagtggttgggtggctcacggggttgactaagtcggttaggtcacgacggtgggatgagttaagcattggaaacccgtgtatgatggtcgagacggtgggtggtcgacccgtggaatgattttttatttgtttaaaatcaagtgcttcgctttgaagccattgttttttctcttatgggttggtcaatttattcatttaacataataaagcatatactgtaacatcatggttgcatatggtatttgactggatcatcatattcataactaccgcttgttctaaaaacatgccatgtaaagccttttgcactagtgcataactttctcatatcacaagttttttagcatctctttgtagagttggaacttt

SEQ ID NO: 103176 - protein, 362 aa, Arabidopsis thaliana; identical to SEQ ID NO: 43811
  peptide (1)..(362): Ceres Seq. ID no. 13612159

SEQ ID NO: 103177 - protein, 229 aa, Arabidopsis thaliana; identical to SEQ ID NO: 43812
  peptide (1)..(229): Ceres Seq. ID no. 13612160

SEQ ID NO: 103178 - DNA, 1557 bp, Arabidopsis thaliana
  misc_feature (1)..(1557): Ceres Seq. ID no. 13612169
  misc_feature (1)..(1557): Ortholog of  Ceres SEQ ID NO 14313155 as cited in SEQ ID NO 54706
  misc_feature (1)..(1557): Ortholog of  Ceres SEQ ID NO 13639022 as cited in SEQ ID NO 59811
ggggaagacaattccgagaaaatagagagtagagagatcctaaagagtcaaaagaggtcaggtgattgattaacccgttgaataatctccttctcccgttgaatcgggtcgaaatagttgaactttaagccaaaccctagcttgaggaggaagaggaatggtcggcgtgatgaacagattgaggaatctggacgcttaccctaaaatcaatgaagatttctacaggcgtactctttctggtggtgttatcaccctcgcctcttctattgtcatgctaattctcttcttctccgagcttcagctgtacattcacccggttactgagactcagcttcgtgttgatacatcaagaggagagaagctacggattaattttgatgttacattccctgcgcttcaatgttcgattattagtcttgattccatggatatcagtggggagaggcaccttgatgtgcgacatgacattattaaaaggagattagactcttctggcaatgtcatcgaggcaaaacaagacggaattggtcatactaagattgaaaaacctttacaaaaacatggtggaaggttggaacacaatgaaacatactgtggttcctgttttggagcagaagcgtcagatgatgcttgttgtaattcatgtgaggaagttcgcgaagcttaccgaaagaaaggttgggccctctcggaccctgaatcaatcgaccagtgtaaaagagaaggctttgtgcaaaaggtaaaagatgaagaaggtgaaggttgtaatgttcacggtttcttggaagttaacaaagttgctgggaactttcatttcattcctgggcaaagctttcatcaatccggttttcaatttcatgatatgttattgttccagcaaggcaactacaatattagccacaaggtcaacaggttggcctttggagactttttccccggtgtagtgaaccctcttgatggtgtgcagtggaatcaggggaaacagagtggcgtctatcaatacttcatcaaggtggtaccaagcatatacaccgatgttcaccagaatacaatacagtcaaaccagttctctgtgacagaacatttccagaacatggaagcaggtcgcatgcaatctccgcctggtgttttcttctactatgatctatcgccaattaaggtgatatttgaggagcaacatgtggagttcttgcacttcctaacaaatgtttgcgctatagtaggaggtatcttcacggtatcgggaatagtagattcgttcatataccatggacaacgagcaattaagaagaaaatggagattggtaaattcaactgagttgtttgatattctccacactttcttgatcagctactggagaatcatctctacgggttttacagttagacattaggtttgaatttgtgacaatgcgatgatttaaagaattttgtagtactgtaagatattccaggatctgaactttgcctttcactattcactatctcttcataggcaacatacaaagtgtaaaatgttgttatcaccgattgaaacgaatgttaatttttcctatt

SEQ ID NO: 103179 - protein, 386 aa, Arabidopsis thaliana; identical to SEQ ID NO: 30033
  peptide (1)..(386): Ceres Seq. ID no. 13612170

SEQ ID NO: 103180 - protein, 382 aa, Arabidopsis thaliana; identical to SEQ ID NO: 30034
  peptide (1)..(382): Ceres Seq. ID no. 13612171

SEQ ID NO: 103181 - protein, 348 aa, Arabidopsis thaliana; identical to SEQ ID NO: 30035
  peptide (1)..(348): Ceres Seq. ID no. 13612172

SEQ ID NO: 103182 - DNA, 1862 bp, Arabidopsis thaliana
  misc_feature (1)..(1862): Ceres Seq. ID no. 13612173
  misc_feature (1)..(1862): Ortholog of  Ceres SEQ ID NO 15174547 as cited in SEQ ID NO 59586
  misc_feature (1)..(1862): Ortholog of  Ceres SEQ ID NO 15169470 as cited in SEQ ID NO 66036
aggtttcgtgtaacatttcacacacacatttgtcgaaatcttaacaccaatcccaaatcagaaaaatcaaaactttttattttattttatcaaaatggcgcttatgaatggaagcatgaatctatcatcggtcaaatcatcgatgatcaaccaccgtcaaccaaacttctcctccgccgtctccagacccacttctttccggatctccgccgtgcaaaccgacccaaaaacaccagctgcttcatcggcgtcggcggcgacgacgactccggcaacgttgacgaagcccgttggagttaatgtgggtaaaggaaaatgggcaccagagagttggaggacgaagaaagctttacagcaaccggactatccagatttagctgcgcttgaagctgtgctagagacgatcgaagcttttcctccgatcgtgttcgccggagaagctagattgcttgaggaacgattaggacaagcagcgatgggtgaagcgtttctgttacaaggaggagattgtgcagagagtttcaaagagtttaatgcgaataacattcgtgatactttcaggattcttcttcagatgggtgctgtgttgatgttcggaggtcaagtccctgttgttaaggttgggagaatggcgggtcaatttgcgaaaccaagatcggattcgtttgaggagaaagatggagtgaaattgcctagttacagaggagataacattaatggagatgcgtttgattcgaaatctaggattcctgatccacagaggatgattagagcttattgtcaatctgcagctactttgaatcttttgagagcttttgctactggtggttatgctgctatgcagagagttactcaatggaatcttgatttcactgaacgtagtgagcaaggagacaggtaccgtgaactagctaaccgtgttgatgaagcgcttggtttcatgcacgctgctggattaacgctcgatcatcccataatgcaaacaaccgacttctggacttctcatgaatgtttgctcttgccttatgaacaatcactaacaaggcttgactcaacctctggtctctactacgattgttctgcccatatgatttgggtcggtgagcgaaccagacagctagatggtgcccatgtcgagttcttaagaggtgttgctaatcctcttggaatcaaggtgagtgataaaatggatccaaaggagctagtgaagttgattgagatcttgaatgctgacaataagcctggaaggattacaataatcacaagaatgggagctgagaatatgagagtgaagcttcctcatttgatcagagaagtgcgacgtgctggacagattgtgacttgggtcagtgatccaatgcacggaaacaccattaaggctccttgtggtctcaagactcgtccctttgacgccatcttggctgaagtgagagctttcttcgacgtgcacgagcaagaaggtagccaccccggaggaattcacctagaaatgactggtcagaacgtgaccgagtgcatcggtggttcacgcacagtcacattcgacgacttgggttcacgttaccacacgcactgtgatcctcgccttaatgcttcacagtctcttgagctctccttcatcatcgccgaacgtcttagaaagagacgcatcaagtctcaaaaggcttttgccctctaatcaaataaacattgcttataataatatctatctatataaatgtgtgtgtgtgtgaacttaatacaatctcatttatctttgattcaaatcttgagtcaaaagaacgcttaaggtttctgttttaatgttgttagtgagtattatttccattttggatttaatataatcatggatggttgggttt

SEQ ID NO: 103183 - protein, 527 aa, Arabidopsis thaliana; identical to SEQ ID NO: 22234
  peptide (1)..(527): Ceres Seq. ID no. 13612174

SEQ ID NO: 103184 - protein, 524 aa, Arabidopsis thaliana; identical to SEQ ID NO: 22235
  peptide (1)..(524): Ceres Seq. ID no. 13612175

SEQ ID NO: 103185 - protein, 520 aa, Arabidopsis thaliana; identical to SEQ ID NO: 22236
  peptide (1)..(520): Ceres Seq. ID no. 13612176

SEQ ID NO: 103186 - DNA, 1479 bp, Arabidopsis thaliana
  misc_feature (1)..(1479): Ceres Seq. ID no. 13612177
  misc_feature (1)..(1479): Ortholog of  Ceres SEQ ID NO 13596581 as cited in SEQ ID NO 62420
  misc_feature (1)..(1479): Ortholog of  Ceres SEQ ID NO 13591273 as cited in SEQ ID NO 65904
  misc_feature (1)..(1479): Ortholog of  Ceres SEQ ID NO 13623086 as cited in SEQ ID NO 0
aaaagataagatacgaagaacaagagccccctctctctctctcgtccactcacctattgtgtatctcatcatcaccatggacaagacatttttctctagcaacgaagggaaaccaattacatgcaaagcagcaatatgtagaaaagcaggagaagcattggtgattgaagacatccacgtggatccaccccaagcttatgaagttaggattaagattttatgtacttctctatgtcacactgatcttactttctggaaactaagctttggaccaatttcaaggtttcctaggattcttggacacgaagcagtcggtgtggtcgagagcattggtgaaaacgtggacggatttaaacaaggtgacgtcgttttgccagtttttcatccttattgtgaagaatgcaaagactgcaaatcttcaaaaaccaactggtgtgacagatatgccgaagatttcatatcaaacacaagacgatatggaatggcttcaagattcaaagattcttcaggagaagtgattcatcattttctctttgtctcaagtttttccgaatacaccgtcgtggatattgcacatcttgtcaaaatatctcctgaaatccccgttgataaagcggctttgctcagctgcggtgtctccacaggaattggagcagcttggaaggtggctaacgtggaagaaggctccaccattgcaatttttggccttggtgctgttggacttgcggttgcagaaggagccaggctacgaggagccgcaaagattattggtattgataccaattctgataaattcgagctaggtaagaaatttggttttacggatttcatcaatccgaccttatgcggagaaaagaagattagtgaggtcattaaagaaatgacagaaggaggagttgactatagtttcgaatgcgttggcttagcttctttacttaacgaggctttcatcagtacccgcacgggaacaggtaaaactgtaatgttggggatggagaagcatgcagcgccaattagtttgggtagttttgatcttttaagaggcagagttatttgcggaagcttgttcggtggtctgaaatccaaacttgatattcccattctagtggatcattacctaaaaaaggagctcaatctggatagtttcattacacacgaactgaatttcaaagaaattaataaggctttcgctttattagaggaaggaaagtctctccgctgcattctatggatggataagtaactatccagcttcatatttgcactttataatcttctcgtggatcttgtttagattatcttcctttgtctttcaagatgctttgtcttgttaccttgcaatttttgttctttccacacgagctacaaacttatcatttggtagtccaaaccccttaacattgtgttttctgatggttacaaatattatgacaccttgtatttgttgatcaatgatcattatagtactaattgcttcta

SEQ ID NO: 103187 - protein, 413 aa, Arabidopsis thaliana; identical to SEQ ID NO: 25700
  peptide (1)..(413): Ceres Seq. ID no. 13612178

SEQ ID NO: 103188 - protein, 388 aa, Arabidopsis thaliana; identical to SEQ ID NO: 25701
  peptide (1)..(388): Ceres Seq. ID no. 13612179

SEQ ID NO: 103189 - protein, 253 aa, Arabidopsis thaliana; identical to SEQ ID NO: 25702
  peptide (1)..(253): Ceres Seq. ID no. 13612180

SEQ ID NO: 103190 - DNA, 1215 bp, Arabidopsis thaliana
  misc_feature (1)..(1215): Ceres Seq. ID no. 13612181
  misc_feature (1)..(1215): Ortholog of  Ceres SEQ ID NO 13597019 as cited in SEQ ID NO 64303
  misc_feature (1)..(1215): Ortholog of  Ceres SEQ ID NO 13654191 as cited in SEQ ID NO 68235
  misc_feature (1)..(1215): Ortholog of  Ceres SEQ ID NO 15179513 as cited in SEQ ID NO 0
aaattttgttttctctccttctctctccctctctcggtttctcaatctttcttattttttccataattctgaatttttcttttcaacaatctccggctaaaaaatgcccttagaggctgtcgtatacccgcaagatccattcggatatctctccaattgcaaagattttatgttccacgacttatactctcaagaagagttcgtagctcaagatacgaagaacaacattgataagttagggcatgaacagagctttgtggaacaaggtaaggaggacgatcatcaatggcgagactatcatcagtatcctttgttgatcccttcgttgggagaagagcttggtcttaccgccattgatgtggagagtcatcctcctccacagcaccggaggaagaggaggagaacgagaaactgcaagaacaaggaagagatcgagaaccagagaatgactcacatcgccgtcgagagaaatcgccggaaacagatgaacgagtatctggctgtgctccgttctctaatgccgtcgtcgtatgctcaaagaggagatcaagcgtcgatagtaggaggagctataaactacgtgaaggagttagagcatattttacaatctatggagccgaagagaactaggactcatgatcccaaaggagacaagactagcactagctcgttagtgggtccattcacagattttttcagcttcccacaatattctacaaagtcatcatcagatgtaccggaaagctcatcttcaccggcggagatagaggttacggtggcagaaagccatgcgaacatcaagataatgacgaagaagaaaccgaggcagcttcttaagctcataacttctttacaaagcctaaggctcactcttcttcatctcaatgtcaccactctccacaactccattctctactccatcagcgtcagggttgaagaaggaagccaactgaataccgtggacgacattgcaacagctttgaatcaaaccataaggaggattcaagaagagacataattcagcaaatagattataattaacttgttttatttttattttattttgaaataactgaaatcagttttctaattttttttttttttcactattcctctaatcctccctatgtaagttgcatttttgtctcttgtaatgaatcaatggtcataaagatctgaacaaaaaaattgaataaaagaaaatggtttaagtcg

SEQ ID NO: 103191 - protein, 304 aa, Arabidopsis thaliana; identical to SEQ ID NO: 26945
  peptide (1)..(304): Ceres Seq. ID no. 13612182

SEQ ID NO: 103192 - protein, 282 aa, Arabidopsis thaliana; identical to SEQ ID NO: 26946
  peptide (1)..(282): Ceres Seq. ID no. 13612183

SEQ ID NO: 103193 - protein, 190 aa, Arabidopsis thaliana; identical to SEQ ID NO: 26947
  peptide (1)..(190): Ceres Seq. ID no. 13612184

SEQ ID NO: 103194 - DNA, 815 bp, Arabidopsis thaliana
  misc_feature (1)..(815): Ceres Seq. ID no. 13612185
  misc_feature (1)..(815): Ortholog of  Ceres SEQ ID NO 13594418 as cited in SEQ ID NO 60153
actctatagagcttccgaagaacgacgctgcgacgagagagactaatagcagaggaggaagacgaagacgacaatgaatgcgccaccggagaacgaactttgttcgatatgccatggccacttcaacgctccttgccaatccaattgctctcactggttctgcgggaactgcattatgctagtttggaggcatggatctacattacggccatgcaaatgtcccttgtgtcgtcgtccgataagtttgttagttccttctgaggaaacagtgagaagtcggaatgatgctacagtttctgaggttcttcatgatgttgaaacttacaaccgtgtctttggtggacagtcaagtggccttattcagaggatgcaagaccttcccttcttactccgaaggttgttgcgagaaatgatggatccacaaagaacgcttccactcgtcatcagagctcgtgtttatattgcgttgatactcagtgcgatttacataatcagcccaatagatatcattccggaaggagtcttgggggttatcggtttactagatgatcttctcatagccctgatttgtttcctccatgtcgctgctctctaccgatccgttctctattcccgtcatggtggttcgtgaacctctttgaagttttcacatcattaatcatcacagttgaagtaccatggtttacttgtttgaccctatctttttgactgttagacttaggaaacttgatttggatgataaaacgaaatggtcctttcctttattactatttcagtaacagatgcattatattggtgaaggaattgaatttctc

SEQ ID NO: 103195 - protein, 185 aa, Arabidopsis thaliana
  peptide (1)..(185): Ceres Seq. ID no. 13612186
MNAPPENELCSICHGHFNAPCQSNCSHWFCGNCIMLVWRHGSTLRPCKCPLCRRPISLLVPSEETVRSRNDATVSEVLHDVETYNRVFGGQSSGLIQRMQDLPFLLRRLLREMMDPQRTLPLVIRARVYIALILSAIYIISPIDIIPEGVLGVIGLLDDLLIALICFLHVAALYRSVLYSRHGGS

SEQ ID NO: 103196 - protein, 151 aa, Arabidopsis thaliana; identical to SEQ ID NO: 26156
  peptide (1)..(151): Ceres Seq. ID no. 13612187

SEQ ID NO: 103197 - DNA, 1767 bp, Arabidopsis thaliana
  misc_feature (1)..(1767): Ceres Seq. ID no. 13612188
  misc_feature (1)..(1767): Ortholog of  Ceres SEQ ID NO 12623695 as cited in SEQ ID NO 61286
atatttatcacatttttcttcaccggctgatttgtttgcccggagattatctctccgtcgtaattaagatctatacacacagaaacacaaagttaaagaatcctcatggaaggagtaaactcttcaagctctatatccgacctagacgaattggctcggttacttgaccggccgagggtaaatattgaacggaaaagatcgtttgacgagaggtccttcagcgaaatgggaatcttcgacaacgttaattctcccggaggatgggaaactccggtgtcttcggctagaaactcgtttgagccacatcctatggttgcagaggcttgggatgctttgagacgatcattggtttactttcgtggccaaccggttggtactatcgctgcttatgaccatgctactgaggaagtcttgaattatgatcaggttttcgtaagagactttgttccaagtgcactagcttttctcatgaacggagaaccagacatagttaaaaactttctcctcaagacaattcaaatccaaggaagggagaaaagaatagaccgattcaagctcggtgaaggcgcaatgccggctagtttcaaggtcattcacgacccgatcaaggaaaccgactctatcaatgctgactttggcgagagcgcgattggaagagtggctccggtggactcaggtttctggtggatcattctccttagagcctacacaaaatccaccggagacacttctctagctgaaacatctgaatgtcaaaagggaatgagactcattctctctctttgtctctccgaaggtttcgatactttccctaccttactttgtgctgatggctgctccatgatcgatcgaagaatgggggtttacgggtatccgatagagatccaagctctcttcttcatggctcttagatcagcaatgtcgatgctaaagcacgacgcggaaggtaaagagttcatggagaggatagtgaagcggctacacgcgcttagcttccacatgagaagttatttctggctcgattttcagcagctcaacgacatttaccgttacaaaacagaagagtactcgcacacagcggttaacaagttcaacgttatccctgactcgatccctgagtgggtcttcgatttcatgcctctacgtggcggttactttataggaaacgttagtccagctcgtatggattttaggtggttcgctctaggcaactgcgtagcgatccttgcttctttagccacgcctgagcagtcggcttcaatcatggacttgatagaggaacggtgggaggagttggtcggagagatgccggttaaaatttgtcatccggcaatcgagagccatgagtggaggattgttaccggttgcgaccctaagaatactcgttggagttaccataacggtggttcttggccagtattgttgtggctattaacagctgcatgcataaagacgggacggccacaaatagcaagacgggccatagacctggcggaagcacggctgttgaaggatggttggccggagtactacgacgggaaatcaggaaggttcatcggaaaacaggcgaggaagtttcagacatggtctatcgccggttacttggtcgccaagatgttgttggaagatccttctcatcttggaatgatctcattggaagaagacaaacagactaaacctgtcattaagagatcttattcttggacttgataatttgttgtcaattcttttgagaagagcaggctaaaatttgatctaaattttgtt

SEQ ID NO: 103198 - protein, 534 aa, Arabidopsis thaliana
  peptide (1)..(534): Ceres Seq. ID no. 13612189
MEGVNSSSSISDLDELARLLDRPRVNIERKRSFDERSFSEMGIFDNVNSPGGWETPVSSARNSFEPHPMVAEAWDALRRSLVYFRGQPVGTIAAYDHATEEVLNYDQVFVRDFVPSALAFLMNGEPDIVKNFLLKTIQIQGREKRIDRFKLGEGAMPASFKVIHDPIKETDSINADFGESAIGRVAPVDSGFWWIILLRAYTKSTGDTSLAETSECQKGMRLILSLCLSEGFDTFPTLLCADGCSMIDRRMGVYGYPIEIQALFFMALRSAMSMLKHDAEGKEFMERIVKRLHALSFHMRSYFWLDFQQLNDIYRYKTEEYSHTAVNKFNVIPDSIPEWVFDFMPLRGGYFIGNVSPARMDFRWFALGNCVAILASLATPEQSASIMDLIEERWEELVGEMPVKICHPAIESHEWRIVTGCDPKNTRWSYHNGGSWPVLLWLLTAACIKTGRPQIARRAIDLAEARLLKDGWPEYYDGKSGRFIGKQARKFQTWSIAGYLVAKMLLEDPSHLGMISLEEDKQTKPVIKRSYSWT

SEQ ID NO: 103199 - protein, 494 aa, Arabidopsis thaliana
  peptide (1)..(494): Ceres Seq. ID no. 13612190
MGIFDNVNSPGGWETPVSSARNSFEPHPMVAEAWDALRRSLVYFRGQPVGTIAAYDHATEEVLNYDQVFVRDFVPSALAFLMNGEPDIVKNFLLKTIQIQGREKRIDRFKLGEGAMPASFKVIHDPIKETDSINADFGESAIGRVAPVDSGFWWIILLRAYTKSTGDTSLAETSECQKGMRLILSLCLSEGFDTFPTLLCADGCSMIDRRMGVYGYPIEIQALFFMALRSAMSMLKHDAEGKEFMERIVKRLHALSFHMRSYFWLDFQQLNDIYRYKTEEYSHTAVNKFNVIPDSIPEWVFDFMPLRGGYFIGNVSPARMDFRWFALGNCVAILASLATPEQSASIMDLIEERWEELVGEMPVKICHPAIESHEWRIVTGCDPKNTRWSYHNGGSWPVLLWLLTAACIKTGRPQIARRAIDLAEARLLKDGWPEYYDGKSGRFIGKQARKFQTWSIAGYLVAKMLLEDPSHLGMISLEEDKQTKPVIKRSYSWT

SEQ ID NO: 103200 - protein, 466 aa, Arabidopsis thaliana
  peptide (1)..(466): Ceres Seq. ID no. 13612191
MVAEAWDALRRSLVYFRGQPVGTIAAYDHATEEVLNYDQVFVRDFVPSALAFLMNGEPDIVKNFLLKTIQIQGREKRIDRFKLGEGAMPASFKVIHDPIKETDSINADFGESAIGRVAPVDSGFWWIILLRAYTKSTGDTSLAETSECQKGMRLILSLCLSEGFDTFPTLLCADGCSMIDRRMGVYGYPIEIQALFFMALRSAMSMLKHDAEGKEFMERIVKRLHALSFHMRSYFWLDFQQLNDIYRYKTEEYSHTAVNKFNVIPDSIPEWVFDFMPLRGGYFIGNVSPARMDFRWFALGNCVAILASLATPEQSASIMDLIEERWEELVGEMPVKICHPAIESHEWRIVTGCDPKNTRWSYHNGGSWPVLLWLLTAACIKTGRPQIARRAIDLAEARLLKDGWPEYYDGKSGRFIGKQARKFQTWSIAGYLVAKMLLEDPSHLGMISLEEDKQTKPVIKRSYSWT

SEQ ID NO: 103201 - DNA, 1131 bp, Arabidopsis thaliana
  misc_feature (1)..(1131): Ceres Seq. ID no. 13612192
  misc_feature (1)..(1131): Ortholog of  Ceres SEQ ID NO 14315662 as cited in SEQ ID NO 53109
  misc_feature (1)..(1131): Ortholog of  Ceres SEQ ID NO 12620168 as cited in SEQ ID NO 66161
acacatacaagactctcctcacagaacgatttagatttaatcgggaaaaagttcagtcagtgacactaatgttcgaatcgaacatggttcttcaaacactatcttcttcttctcctccaattcaccgtctctatcttcaccattctcagattctcccttcttctgggtcacccagcaagatttctcttcagatacatggaaggactttggccattcgatcttttcatgattatgtctttgcagaaatttctgctagaggtttaccggctttgaacaaagcttccttgaagaagctaccaatcaaaggatctacctttctgctggggcagagcttgttgatggtttctgctcacccacagttggcagcagcagcagaaatcataaagcctgaaccgatttacgaagttggagagttatttgaacttagtattcagctttcttacttgctgttactactggggttgcttggagttggtactttctatgtgatccgtcaagtacttgtacgcagagaactagacctctccgctaaagaattgcaggagcaagtaaggagcggagatgcaagtgcaacagagctctttgagcttggtgcagtgatgttgagaaggaagttttatcctgcagccaacaagtttttgcaacaagctatccagaaatgggacggtgatgatcaagatcttgctcaggtctataacgctcttggagtgagttatgtacgagaggataaacttgacaaaggaattgctcagtttgaaatggcggtgaagctgcaacccggttatgtaacagcttggaacaaccttggggatgcttatgagaagaagaaggagttgcctttggcattgaatgcgtttgaagaagttttgttgtttgatccaaacaataaggtggctcggcctcggcgagatgcgttgaaggatcgcgtgaagctttataaaggtgttgtggctgttaagtctaagaaacggtgacggctcaaacaagatgcaaactctgaaccaagaaccgttggtctctctcccccttgtgtatttttttggtttggtaatatgtatggagattttgtgttaatatgaaaatgaaactttgttgttttttgtaaccaataaaatcagatgtttaaaactt

SEQ ID NO: 103202 - protein, 323 aa, Arabidopsis thaliana
  peptide (1)..(323): Ceres Seq. ID no. 13612193
TYKTLLTERFRFNREKVQSVTLMFESNMVLQTLSSSSPPIHRLYLHHSQILPSSGSPSKISLQIHGRTLAIRSFHDYVFAEISARGLPALNKASLKKLPIKGSTFLLGQSLLMVSAHPQLAAAAEIIKPEPIYEVGELFELSIQLSYLLLLLGLLGVGTFYVIRQVLVRRELDLSAKELQEQVRSGDASATELFELGAVMLRRKFYPAANKFLQQAIQKWDGDDQDLAQVYNALGVSYVREDKLDKGIAQFEMAVKLQPGYVTAWNNLGDAYEKKKELPLALNAFEEVLLFDPNNKVARPRRDALKDRVKLYKGVVAVKSKKR

SEQ ID NO: 103203 - protein, 301 aa, Arabidopsis thaliana
  peptide (1)..(301): Ceres Seq. ID no. 13612194
MFESNMVLQTLSSSSPPIHRLYLHHSQILPSSGSPSKISLQIHGRTLAIRSFHDYVFAEISARGLPALNKASLKKLPIKGSTFLLGQSLLMVSAHPQLAAAAEIIKPEPIYEVGELFELSIQLSYLLLLLGLLGVGTFYVIRQVLVRRELDLSAKELQEQVRSGDASATELFELGAVMLRRKFYPAANKFLQQAIQKWDGDDQDLAQVYNALGVSYVREDKLDKGIAQFEMAVKLQPGYVTAWNNLGDAYEKKKELPLALNAFEEVLLFDPNNKVARPRRDALKDRVKLYKGVVAVKSKKR

SEQ ID NO: 103204 - protein, 296 aa, Arabidopsis thaliana
  peptide (1)..(296): Ceres Seq. ID no. 13612195
MVLQTLSSSSPPIHRLYLHHSQILPSSGSPSKISLQIHGRTLAIRSFHDYVFAEISARGLPALNKASLKKLPIKGSTFLLGQSLLMVSAHPQLAAAAEIIKPEPIYEVGELFELSIQLSYLLLLLGLLGVGTFYVIRQVLVRRELDLSAKELQEQVRSGDASATELFELGAVMLRRKFYPAANKFLQQAIQKWDGDDQDLAQVYNALGVSYVREDKLDKGIAQFEMAVKLQPGYVTAWNNLGDAYEKKKELPLALNAFEEVLLFDPNNKVARPRRDALKDRVKLYKGVVAVKSKKR

SEQ ID NO: 103205 - DNA, 1366 bp, Arabidopsis thaliana
  misc_feature (1)..(1366): Ceres Seq. ID no. 13612200
  misc_feature (1)..(1366): Ortholog of  Ceres SEQ ID NO 12616843 as cited in SEQ ID NO 68992
atggtttcaacctccgtccgaccaattccggtgcagctaagaaccagagatagagagatagagatgcggaggatcaattcactgtacggaagaattggtctcctaaaacgagtacccgagaaatctacgaagcaagctcatacatttctcgcatctctctccttctctacggaaggtgcttatggcggtgacggtgagtttcagcagaacagctccaaagtcaagatctttgaccgagacctcaagcgaatacatcgtgatcgagcggcgtggctttctcgccaaaaaaacgattcttttgttgacgctgttgcagataatctacttgatcgcttagaggattgtaagaagagttttcccactgcattttgtttgggaggatctcttggtgctgttaagagattactacgtggtcgcggtgggattgagaagcttatcatgatggatacttcatatgacatgattaagtcatgtagagatgctcaagacgattcactcgataactccattgaaacctcttactttgttggtgatgaagagtttctgccagtcaaagagagttcggttgatttgatcattagttcgttggggcttcactggacaaatgatcttcctggatccatgatacagtgcaagctagcactgaagccggatggcttatttttagcagcaattcttggtggagaaaccttaaaggagctgagaatagcatgcactttggctcacatggagcgggaaggagggattagtcctcggctatcacctttggcacaggttagggacgcagggaatctgttgaccagggcgggttttagtcttcctggtgttgatgttgatgaatatgtagttaaatacaagagagcgatggatcttatagagcatcttcgtgcgatgggtgaaaccaatgctcttctcgagagaaacaagattttgaatcgtgaaactgctgttgccacggcagccatatatgactccatgtttgccacagaggacggcactatacccgctacttttcaggtgatttacatgacaggatggagagaacattcgtctcacccgcaggccaaacgaagaggttcagccaccgtatccttcacggatctccaaaagcaatttggcggacaatcttgatggaatgattgaagaagagaaacattcaataagcagagactttacaaatgacacttgagagagaaatcagtgacttaagctataaggtacttggaggaactcttgtagatttgtcggagtctttcactgggcgaaagcatcacaattaggacgcctgctttcgcccatgtatttcgtatcgaataatagctgatcagaaacatatttgtattttacaaaaatattacgaatactt

SEQ ID NO: 103206 - protein, 376 aa, Arabidopsis thaliana
  peptide (1)..(376): Ceres Seq. ID no. 13612201
MVSTSVRPIPVQLRTRDREIEMRRINSLYGRIGLLKRVPEKSTKQAHTFLASLSFSTEGAYGGDGEFQQNSSKVKIFDRDLKRIHRDRAAWLSRQKNDSFVDAVADNLLDRLEDCKKSFPTAFCLGGSLGAVKRLLRGRGGIEKLIMMDTSYDMIKSCRDAQDDSLDNSIETSYFVGDEEFLPVKESSVDLIISSLGLHWTNDLPGSMIQCKLALKPDGLFLAAILGGETLKELRIACTLAHMEREGGISPRLSPLAQVRDAGNLLTRAGFSLPGVDVDEYVVKYKRAMDLIEHLRAMGETNALLERNKILNRETAVATAAIYDSMFATEDGTIPATFQVIYMTGWREHSSHPQAKRRGSATVSFTDLQKQFGGQS

SEQ ID NO: 103207 - protein, 355 aa, Arabidopsis thaliana
  peptide (1)..(355): Ceres Seq. ID no. 13612202
MRRINSLYGRIGLLKRVPEKSTKQAHTFLASLSFSTEGAYGGDGEFQQNSSKVKIFDRDLKRIHRDRAAWLSRQKNDSFVDAVADNLLDRLEDCKKSFPTAFCLGGSLGAVKRLLRGRGGIEKLIMMDTSYDMIKSCRDAQDDSLDNSIETSYFVGDEEFLPVKESSVDLIISSLGLHWTNDLPGSMIQCKLALKPDGLFLAAILGGETLKELRIACTLAHMEREGGISPRLSPLAQVRDAGNLLTRAGFSLPGVDVDEYVVKYKRAMDLIEHLRAMGETNALLERNKILNRETAVATAAIYDSMFATEDGTIPATFQVIYMTGWREHSSHPQAKRRGSATVSFTDLQKQFGGQS

SEQ ID NO: 103208 - protein, 230 aa, Arabidopsis thaliana
  peptide (1)..(230): Ceres Seq. ID no. 13612203
MMDTSYDMIKSCRDAQDDSLDNSIETSYFVGDEEFLPVKESSVDLIISSLGLHWTNDLPGSMIQCKLALKPDGLFLAAILGGETLKELRIACTLAHMEREGGISPRLSPLAQVRDAGNLLTRAGFSLPGVDVDEYVVKYKRAMDLIEHLRAMGETNALLERNKILNRETAVATAAIYDSMFATEDGTIPATFQVIYMTGWREHSSHPQAKRRGSATVSFTDLQKQFGGQS

SEQ ID NO: 103209 - DNA, 563 bp, Arabidopsis thaliana
  misc_feature (1)..(563): Ceres Seq. ID no. 13612234
  misc_feature (1)..(563): Ortholog of  Ceres SEQ ID NO 14315076 as cited in SEQ ID NO 57157
aaagatgttgctttacaagaaaaagaatcagattgttaaaggaaacagaatcttgatcagcgtaacgtttcttggtagtgctggtccgatccggttcgttgctaatgaaggtgatcttgttgcatctgtgattgatactgctttgaaatgttatgctcgtgaaggtcgtcttcctattcttggatctgatttcaacgattttgttttttattgtccaatggttggacctggagctttgagtccatgggaagcaattgggtcggtgggagtgaggaactttatgttgtgtaagaagaaaccagaggagaagaaggttgaggaagataagggaagatcgaattttccgattaatggagctagaaaaggagctggtggaagttttaaggcttggattaataaatctttaagacttaaagtgactacccattagagagactacttatatgttgtcttctctgtttctttgaatgctcatgtttggtttgtgtctttgttcttttgatcttcttattttatgaacttttgatttgttttttttgtttcttatgatggtttcaggaaat

SEQ ID NO: 103210 - protein, 142 aa, Arabidopsis thaliana
  peptide (1)..(142): Ceres Seq. ID no. 13612235
KMLLYKKKNQIVKGNRILISVTFLGSAGPIRFVANEGDLVASVIDTALKCYAREGRLPILGSDFNDFVFYCPMVGPGALSPWEAIGSVGVRNFMLCKKKPEEKKVEEDKGRSNFPINGARKGAGGSFKAWINKSLRLKVTTH

SEQ ID NO: 103211 - protein, 141 aa, Arabidopsis thaliana; identical to SEQ ID NO: 42344
  peptide (1)..(141): Ceres Seq. ID no. 13612236

SEQ ID NO: 103212 - DNA, 817 bp, Arabidopsis thaliana
  misc_feature (1)..(817): Ceres Seq. ID no. 13612237
  misc_feature (1)..(817): Ortholog of  Ceres SEQ ID NO 13647991 as cited in SEQ ID NO 187
atccataacccaaaaagagtcacttccgtgtcacaagaaaccatgaaactttctcttcatcaaccacttctcttcttcttcttagccagcgtcctcccattaatcctgaccgtccattctcaatcagacgactcagatttcatccgtactagctgcaacaccacattataccctgacctatgcttctcttctctttcctccttctctagctctgttcacaacgatccagccctcttggctcgagccgccatctccgtcactctcaccaagactctcgacttagcctcatacctcgccaatatcaccactctccagccagagagcaacgaagatggtgctcaccacccaaccgcagccgctgtttttcacgactgcttcgacaatcttaaagacgcggtcgaagaaatgaaaggctcgatgaaacagatgagggagctggtctcgactggctcgctcgagtccttcaggttccaaatgagtaacgtgcagacgtggctcagtgcggctttaactgatgaggagacttgtacggacggatttaaagacattcacgatgagccgaggaaggatgacatatgcgcacgggtcgatgacgttaaaaagatgactagtaatgcgttggctctagttaatcgatgtgttgataaggccatacattgatcattttatcattattcactaaatattcttcttcttttttttcttacttgaaaaagaagttattgtttaaatgtttttggttatcacgcgtgcatgatagagatataataagataagcctgtttgtgattggctgtaatgaaatagtgatattatgt

SEQ ID NO: 103213 - protein, 219 aa, Arabidopsis thaliana
  peptide (1)..(219): Ceres Seq. ID no. 13612238
IHNPKRVTSVSQETMKLSLHQPLLFFFLASVLPLILTVHSQSDDSDFIRTSCNTTLYPDLCFSSLSSFSSSVHNDPALLARAAISVTLTKTLDLASYLANITTLQPESNEDGAHHPTAAAVFHDCFDNLKDAVEEMKGSMKQMRELVSTGSLESFRFQMSNVQTWLSAALTDEETCTDGFKDIHDEPRKDDICARVDDVKKMTSNALALVNRCVDKAIH

SEQ ID NO: 103214 - protein, 205 aa, Arabidopsis thaliana
  peptide (1)..(205): Ceres Seq. ID no. 13612239
MKLSLHQPLLFFFLASVLPLILTVHSQSDDSDFIRTSCNTTLYPDLCFSSLSSFSSSVHNDPALLARAAISVTLTKTLDLASYLANITTLQPESNEDGAHHPTAAAVFHDCFDNLKDAVEEMKGSMKQMRELVSTGSLESFRFQMSNVQTWLSAALTDEETCTDGFKDIHDEPRKDDICARVDDVKKMTSNALALVNRCVDKAIH

SEQ ID NO: 103215 - DNA, 781 bp, Arabidopsis thaliana
  misc_feature (1)..(781): Ceres Seq. ID no. 13612240
  misc_feature (1)..(781): Ortholog of  Ceres SEQ ID NO 13661969 as cited in SEQ ID NO 61215
  misc_feature (1)..(781): Ortholog of  Ceres SEQ ID NO 12614809 as cited in SEQ ID NO 68808
  misc_feature (1)..(781): Ortholog of  Ceres SEQ ID NO 12634366 as cited in SEQ ID NO 0
  misc_feature (1)..(781): Ortholog of  Ceres SEQ ID NO 14309113 as cited in SEQ ID NO 0
  misc_feature (1)..(781): Ortholog of  Ceres SEQ ID NO 15175257 as cited in SEQ ID NO 0
ataagatttacgtataggttgaaaaggaggaaagttagataaggaaaaaatgactgcattggagaaacatgtttccttcttcgacaggaacaaagacggcaccgtttatccatgggaaacctaccaaggatttagagcgctcgggacagggcgtcttttggcggcttttgttgctatattcatcaacatgggactcagcaagaaaactcgtccgggaaagggattctcgccgttgtttccaatagacgtgaagaatagtcacctttgcatgcacggtagtgacaccgacgtctatgacgatgacggaagatttgtggaatcaaaattcgaggaaatattcaacaagcatgctcgcacacataaagatgctctcactgcagaggaaattcaaaaaatgcttaagactaacagggatcctttcgatatcacaggatggctttcagattatggagaatggaaaatattacatacgttagctcaagacaaaaatggtttgttatcggaaaagagcgtcagggccatctacgatggtagccttttccaccaactggagaaaaaaagatcttcttcttcttctcgtggcaagaaacaaaaactaccataaatgtttacatgaatcttcttatattattatgtggagatcacataacattcttggtttataattatataattttgtcaaataacttttgtaatgaataattacatagatcaaacactctttaaataattattgtgtatattgaaaaaaaaaaacttatcaaagtatacttcatttaag

SEQ ID NO: 103216 - protein, 184 aa, Arabidopsis thaliana; identical to SEQ ID NO: 30098
  peptide (1)..(184): Ceres Seq. ID no. 13612241

SEQ ID NO: 103217 - protein, 138 aa, Arabidopsis thaliana; identical to SEQ ID NO: 30099
  peptide (1)..(138): Ceres Seq. ID no. 13612242

SEQ ID NO: 103218 - protein, 111 aa, Arabidopsis thaliana; identical to SEQ ID NO: 30100
  peptide (1)..(111): Ceres Seq. ID no. 13612243

SEQ ID NO: 103219 - DNA, 770 bp, Arabidopsis thaliana
  misc_feature (1)..(770): Ceres Seq. ID no. 13612244
  misc_feature (1)..(770): Ortholog of  Ceres SEQ ID NO 15170072 as cited in SEQ ID NO 55533
  misc_feature (1)..(770): Ortholog of  Ceres SEQ ID NO 15173959 as cited in SEQ ID NO 63398
  misc_feature (1)..(770): Ortholog of  Ceres SEQ ID NO 13663564 as cited in SEQ ID NO 66903
agtactttgaacattctctctctctcttttatctctgagattgcttcttcgctattgctcaattctctctctcacctaaccctaattattcattattcctgagattcatcggcgatgagttcggaggaagccaaggtcgttgttccgaggaactttagattgttggaagagcttgaaagaggtgagaaaggtattggagatggtactgttagctatggaatggatgatgctgatgatatttatatgcaatcttggactggcaccattcttggtcctcctaatactgcatatgaagggaaaatctttcagctgaagcttttctgtggtaaggagtaccctgaaagtccaccgactgtgaggttccagacccggataaacatggcttgtgttaacccagaaactggagtggttgaaccgagtctcttccctatgctcactaactggcggcgagaatatacaatggaggacatactggttaagctgaaaaaagaaatgatgacttcgcataaccggaagttagctcaacccccggaaggtaacgaggaagctagggcagatccaaaaggaccagctaaatgttgtgtgatgtgaagagaggttggtgggaatcagctatttgtattaatagaaggaacagtgtatataaaacatcatttgaagctttgaaattccctacaacttcctaatgttatagtcttgtttgagaatatatatatgtccgccaaaaacagttgatgattattttaataaacctcatctctactttctct

SEQ ID NO: 103220 - protein, 158 aa, Arabidopsis thaliana; identical to SEQ ID NO: 25849
  peptide (1)..(158): Ceres Seq. ID no. 13612245

SEQ ID NO: 103221 - protein, 123 aa, Arabidopsis thaliana; identical to SEQ ID NO: 25850
  peptide (1)..(123): Ceres Seq. ID no. 13612246

SEQ ID NO: 103222 - protein, 115 aa, Arabidopsis thaliana; identical to SEQ ID NO: 25851
  peptide (1)..(115): Ceres Seq. ID no. 13612247

SEQ ID NO: 103223 - DNA, 1094 bp, Arabidopsis thaliana
  misc_feature (1)..(1094): Ceres Seq. ID no. 13612256
  misc_feature (1)..(1094): Ortholog of  Ceres SEQ ID NO 15169419 as cited in SEQ ID NO 58491
  misc_feature (1)..(1094): Ortholog of  Ceres SEQ ID NO 15179026 as cited in SEQ ID NO 0
aatccaacttttatctacggtccctgaaaccatctctttgtcttttggcatatttccctccttaagtcaactatctctttgtctctatatcatctttctctcggacactctctttggatcgtcattttctctctatcgactaaattttaagagtggaatgggtatatttcctggatttggtggcttgatcaaccataacactcaagagcctcctaaggctgagaatgtgaaatctaagtcaaggtcagaaataaaaaatactgatcacgaagagagaaatgagatgaaggagcaactaaaactttggagacatgcagagaagaaagaacaatgggaagatgtccctgctaaggtgaaggtggaaacagaagatggtctttgccatgtggacatggtatttacattaggattgcctcctcaagcagcctacgacgttttgactaatcccgacaaccaatcatactcaagaataattaaccaacgccacgaacttctggataacgtatcaagaaatgtgttgacggataatggatcgagccagacggtggaggcagagaaagctgtggcctggaagtttctttcatggtcgggaactatcccgataagtctagatttcgtcgaaaaccgtaagaatctttctgcagtatatatgaaaaggaaaatgatgttcatgaaaagttttgagggtagttggaaagtggagccaatatacgtagattcaaaacgtttgtgcaagcaaatgaagccaaaaagtcgagaagaataccataaatgtagtggtggacaaggaaagattgcgtcgaaggtgaaaatgaaccagacctttcagccttcttttccttttaatctgccaccgctttcttggtacatccgtgatatcaccatcaagattactaaggctctgatacaagatcttcaagatatgggcgccaagctccgaggcgtttgaaatgccctcaaacattcgataggtttctaaatcactatagtataaatccgaagaggacaaatactaatctttataatcacttcattcatcttaacaagtgtattctttataccgaataaaaaaaatgagtatcgtgttaaatgtt

SEQ ID NO: 103224 - protein, 315 aa, Arabidopsis thaliana
  peptide (1)..(315): Ceres Seq. ID no. 13612257
IQLLSTVPETISLSFGIFPSLSQLSLCLYIIFLSDTLFGSSFSLYRLNFKSGMGIFPGFGGLINHNTQEPPKAENVKSKSRSEIKNTDHEERNEMKEQLKLWRHAEKKEQWEDVPAKVKVETEDGLCHVDMVFTLGLPPQAAYDVLTNPDNQSYSRIINQRHELLDNVSRNVLTDNGSSQTVEAEKAVAWKFLSWSGTIPISLDFVENRKNLSAVYMKRKMMFMKSFEGSWKVEPIYVDSKRLCKQMKPKSREEYHKCSGGQGKIASKVKMNQTFQPSFPFNLPPLSWYIRDITIKITKALIQDLQDMGAKLRGV

SEQ ID NO: 103225 - protein, 263 aa, Arabidopsis thaliana
  peptide (1)..(263): Ceres Seq. ID no. 13612258
MGIFPGFGGLINHNTQEPPKAENVKSKSRSEIKNTDHEERNEMKEQLKLWRHAEKKEQWEDVPAKVKVETEDGLCHVDMVFTLGLPPQAAYDVLTNPDNQSYSRIINQRHELLDNVSRNVLTDNGSSQTVEAEKAVAWKFLSWSGTIPISLDFVENRKNLSAVYMKRKMMFMKSFEGSWKVEPIYVDSKRLCKQMKPKSREEYHKCSGGQGKIASKVKMNQTFQPSFPFNLPPLSWYIRDITIKITKALIQDLQDMGAKLRGV

SEQ ID NO: 103226 - protein, 221 aa, Arabidopsis thaliana
  peptide (1)..(221): Ceres Seq. ID no. 13612259
MKEQLKLWRHAEKKEQWEDVPAKVKVETEDGLCHVDMVFTLGLPPQAAYDVLTNPDNQSYSRIINQRHELLDNVSRNVLTDNGSSQTVEAEKAVAWKFLSWSGTIPISLDFVENRKNLSAVYMKRKMMFMKSFEGSWKVEPIYVDSKRLCKQMKPKSREEYHKCSGGQGKIASKVKMNQTFQPSFPFNLPPLSWYIRDITIKITKALIQDLQDMGAKLRGV

SEQ ID NO: 103227 - DNA, 1303 bp, Arabidopsis thaliana
  misc_feature (1)..(1303): Ceres Seq. ID no. 13612260
  misc_feature (1)..(1303): Ortholog of  Ceres SEQ ID NO 15169419 as cited in SEQ ID NO 58491
ataacctttgattaatcaaacctttctctatgtgtttttccctcaaaccacatcgttgacttggatctctcattgtcatcttgttctgtttttgtgacctaattttacagaaacaaaatgggtgtatctgaaatttcaagatcagaggagaagagcggtataggtttcgttaaattgtttgaaaataacgttgtgtttcctggatttttggtatggatgaatcaaacaattcaagagcctcttaaggctgagttcaaaagattaaggaatgtgaaagagctaagtttgaagtcagtgtcaaagatagagactgcttatgaggagcatagagatgaagagaagttagagaagcaattacaagcttggagagataatccctcatggatagatcagcctcctaaagtggtggtgaaatcacaaaatggtttgttttgccatttaaacattgaagcagacgtaggattgcctcctgaattagtatacaacattttcactcatccagacaacaaaagatacttcaaaaacatcaaggaaaacatatcaagaaaagttttgatcgacgaagggccaaagcagaccgtggaagtgaagcaagccgcggcctggaagttcctttggtgggatggaacttgtcctatacatctcattgtcgaagaaaaccggaaaaatctcacttcaaaatataagcaagagacaacaatgttcatgaaagtgtttgagggttgttggaaagtggagccattgtttatagacgaacatttgtgtgaccgctcaaagccaaaatctcaaaaagattaccatagctgtagcaacggacgaggaaggatcggatcaaaggtgacaatggatcaaatgtttcagccttcagctcttcttactcccccgccactttcttggtacatacgtgggatcaccattaaaaccacagagagtatgatcgaagatcttttcgctgaagctactagacttcggggaggaaaaggaggaggctatattgatgatcaaggagaaaacaatgtggtaaccgaaaagagcaaagctgatgacattaaggaaagatggagatcacataggagaagtaaacggaggagatttacaactgctaggtcaatgtaattgaagagactgtgattctagaatttcttgattattctggagatttgtaatgttcaagctctttacaagtttcccaaaagggatcctctgtttttaccactaacggaaactacaccttccaatagaaaaaaaaaatgcatcaaatctctcatatagttccttccacgttttgattgaagcttgtcct

SEQ ID NO: 103228 - protein, 332 aa, Arabidopsis thaliana; identical to SEQ ID NO: 36239
  peptide (1)..(332): Ceres Seq. ID no. 13612261

SEQ ID NO: 103229 - protein, 299 aa, Arabidopsis thaliana; identical to SEQ ID NO: 36240
  peptide (1)..(299): Ceres Seq. ID no. 13612262

SEQ ID NO: 103230 - DNA, 858 bp, Arabidopsis thaliana
  misc_feature (1)..(858): Ceres Seq. ID no. 13612276
  misc_feature (1)..(858): Ortholog of  Ceres SEQ ID NO 13595658 as cited in SEQ ID NO 59888
  misc_feature (1)..(858): Ortholog of  Ceres SEQ ID NO 13661330 as cited in SEQ ID NO 61614
  misc_feature (1)..(858): Ortholog of  Ceres SEQ ID NO 13596025 as cited in SEQ ID NO 62024
  misc_feature (1)..(858): Ortholog of  Ceres SEQ ID NO 13662324 as cited in SEQ ID NO 62162
  misc_feature (1)..(858): Ortholog of  Ceres SEQ ID NO 12625713 as cited in SEQ ID NO 64160
  misc_feature (1)..(858): Ortholog of  Ceres SEQ ID NO 14301782 as cited in SEQ ID NO 66788
  misc_feature (1)..(858): Ortholog of  Ceres SEQ ID NO 14302860 as cited in SEQ ID NO 67667
  misc_feature (1)..(858): Ortholog of  Ceres SEQ ID NO 15174373 as cited in SEQ ID NO 0
actcatcatcattcacagcttcaaattttcaatactcaaattaacaatggcgattttctccacatcacatcttctcttcatctccttcatcatagccacatgtacaatttctgtctccggtacaaccttcaccttaacaaaccattgcggctccacaatctggcctggaatcctcaccgcaaacggcgcacaactcggcgacggcggatttgccttagcttcaggatcttccgtaaccttcaccgtttctccaggttggtccggtcgattttgggctcgaacgtattgtaacttcgacgcctcaggctcaggtaaatgcggtaccggggactgcggcagcaagttaaaatgcgccggcgcaggaggagctccaccagccacactcgccgaattcacaatcggctcctccggaaagaaaaacgccgtgcaagatttttacgacgtgagcctcgtagatggttataacgttcagatgaaaatcacaccgcaaggtggctcaggggattgtaaaaccgcgggatgcgtttcggacgtgaacgcgatttgtccaaaagagctacaagttacgggcccatcgggtgttgcagcgtgtaagagtgcttgtgaggcttttaacaagccggagtattgttgcaccggcgcgtatagtacaccggcgacttgtccgcccacgaattactcgaagatatttaaacaagcttgtccgagtgcgtatagctatgcatacgatgatgcttccagtacttttacttgtactaatgctaattatgagatcagtttctgttcttaggcaaaaatcgcctttattattcattaattattattatttatcaatgaataaaaagattgatcattttt

SEQ ID NO: 103231 - protein, 262 aa, Arabidopsis thaliana
  peptide (1)..(262): Ceres Seq. ID no. 13612277
LIIIHSFKFSILKLTMAIFSTSHLLFISFIIATCTISVSGTTFTLTNHCGSTIWPGILTANGAQLGDGGFALASGSSVTFTVSPGWSGRFWARTYCNFDASGSGKCGTGDCGSKLKCAGAGGAPPATLAEFTIGSSGKKNAVQDFYDVSLVDGYNVQMKITPQGGSGDCKTAGCVSDVNAICPKELQVTGPSGVAACKSACEAFNKPEYCCTGAYSTPATCPPTNYSKIFKQACPSAYSYAYDDASSTFTCTNANYEISFCS

SEQ ID NO: 103232 - protein, 247 aa, Arabidopsis thaliana
  peptide (1)..(247): Ceres Seq. ID no. 13612278
MAIFSTSHLLFISFIIATCTISVSGTTFTLTNHCGSTIWPGILTANGAQLGDGGFALASGSSVTFTVSPGWSGRFWARTYCNFDASGSGKCGTGDCGSKLKCAGAGGAPPATLAEFTIGSSGKKNAVQDFYDVSLVDGYNVQMKITPQGGSGDCKTAGCVSDVNAICPKELQVTGPSGVAACKSACEAFNKPEYCCTGAYSTPATCPPTNYSKIFKQACPSAYSYAYDDASSTFTCTNANYEISFCS

SEQ ID NO: 103233 - DNA, 692 bp, Arabidopsis thaliana
  misc_feature (1)..(692): Ceres Seq. ID no. 13612286
  misc_feature (1)..(692): Ortholog of  Ceres SEQ ID NO 15175146 as cited in SEQ ID NO 0
ataaatggcgcatttaattagaacccccaaaatctcttcacaactgtaaaaccccaatcacctctttacatgtgacttccttattactctcttcttcttattttcctcctcttcttcttcgctctagtttcccccaacaatcgccatggcagcttcgtctctcaatctcctcctcattctctctcttctcactttcatttctctccagagatctgaatctctttccgataatccatctctcactcttctacccgacggattcgactggccgatctctcactccgatgaattcgatatcatcgacggtgaagaaagcttcgaagttacggaggaagacgacggcgtaacagatcgacggtcattgtactggcggaggacgaagtattacatatcgtacggtgcattgtcggcgaatagagtgccatgtcctcccagatctggaagatcgtactacactcataactgcttcagagctagaggtcccgttcatccgtatagccgaggctgctcgtcgatcactcgatgccggagatagatgaagaaagcttaaaactccatgggcattttcgtaattttgccaaccatggtttattattatgatgtttgtatttgtaatgttcgatgtttgtttgtaaaccgtgattagttacgttcgttaaacggtaaacccggtgattataatttcgagttct

SEQ ID NO: 103234 - protein, 129 aa, Arabidopsis thaliana; identical to SEQ ID NO: 30885
  peptide (1)..(129): Ceres Seq. ID no. 13612287

SEQ ID NO: 103235 - DNA, 1484 bp, Arabidopsis thaliana
  misc_feature (1)..(1484): Ceres Seq. ID no. 13612292
  misc_feature (1)..(1484): Ortholog of  Ceres SEQ ID NO 12609528 as cited in SEQ ID NO 51902
  misc_feature (1)..(1484): Ortholog of  Ceres SEQ ID NO 12625248 as cited in SEQ ID NO 68797
atatagggttacatcttccttagcttgaatacaaaagaaaagctcaagtttgtttctcgtttctatggatattcttcttccttatgctagcctctctggtcttcttcttcttcgttcgtttcagcgaatcacatttgatctatgacacatctatacaaggaattagctttcatcatcaagtctctctctcgaaaactctcctttggtttcgtttgatctgagaaaagaagaaattcaaatattgataactgtggatgggtgcaccaaagcagaagtggacaccggaagaagaagcagctcttaaagctggagttcttaagcatgggactgggaagtggcgtaccatactctcggatactgagtttagtttaatccttaagtctcgctctaatgttgatcttaaggacaaatggagaaatataagcgtgacagctttatggggttcaaggaagaaggctaaacttgcgcttaagaggactccaccaggtactaaacaggatgataacaacacagctcttaccattgtggctttgactaatgatgatgaacgtgcaaaaccaacttcccccggaggttctggtggtggatcaccacgcacttgtgcttctaagagatcaattacaagtttggataagatcatctttgaggcaattaccaacttgagggaactacgcggttctgacagaacatcaatctttctgtatatagaggagaatttcaagactccaccgaatatgaaaaggcatgtcgcagtacgattaaagcatttatcatcgaatggaacattagttaagataaagcacaagtacaggttttcttctaattttattcccgcaggtgcaagacagaaggctcctcaactctttctggaaggaaacaacaagaaagacccaacaaaacccgaggagaacggtgccaacagtctcactaaattccgagtagacggtgaattatatatgataaaaggcatgacagctcaagaagctgcagaggctgcagcaagagcagttgcagaggcagaatttgctatcacagaggctgaacaagcagcaaaagaggcagaaagagcagaagcagaagctgaagctgctcagatatttgcaaaggcagccatgaaagctttgaagttcaggatccgtaatcatccttggtgaaacagaaagaaatagccatcatggggaagttctgtaacaaagcaagccataaaatatatatacttagtgggtttactggtttcttaagagtgccgatcttgaatcaggcgatatctcatcacctgcagagttttttaagtttccaaacctatctgctctctttttttggttagtaacagtgtaaatccgcagtttgatcatatgtatgttctttctccgaatctgagattctgtataactgatcttttattgtatgtggatgatctgtttagtaaccttgaaactattttgaagtgagatgagtaagcaaaaaaattgagattttgttct

SEQ ID NO: 103236 - protein, 299 aa, Arabidopsis thaliana; identical to SEQ ID NO: 35840
  peptide (1)..(299): Ceres Seq. ID no. 13612293

SEQ ID NO: 103237 - DNA, 1049 bp, Arabidopsis thaliana
  misc_feature (1)..(1049): Ceres Seq. ID no. 13612294
  misc_feature (1)..(1049): Ortholog of  Ceres SEQ ID NO 15172842 as cited in SEQ ID NO 58023
aactttaattcgccggctctcttgccgtgttttcgattttgacaaacgaaaaaaaaatcttcaatgagataacaataatatcagcagcggaacaaggattgagaaaaggaacctttcccttttaataagccgatatagatccttggaggagaatttgtagcagaccgatctctgtctgttgtctctgtttctacgaatctctgtgtttgtcggaaatcgtaaattatgggtttgtgggatgctcttctcaattggcttcgcagcctcttcttcaagcaagaaatggagctttcattgataggacttcaaaatgcaggaaagacatcacttgttaacgttgttgcaaccggtggatacagtgaagacatgatccctacggttggtttcaacatgaggaaagtgacaaaaggaagtgtcacgatcaagctttgggatctcggtggtcaacctaggttccgcagcatgtgggaacgttactgccgttctgtttccgcgattgtgtatgtagttgatgctgctgatcctgataacctcagtgtctcgaagagtgaactccatgatttgttgagcaagacgtcgcttaatggtatccctctcctagtccttgggaacaaaatcgacaagcctggagctttgtccaaagaagccctaaccgatgaaatgggtctcaagtcactgacagatagagaagtctgttgcttcatgatatcttgcaagaactctaccaacatcgatcaagtcattgattggcttgtaaagcactccaaatcatcgaattaaactttaccccaaaaggagagaagtcaactctctgcagttgtcgatctttcttgtgtttttggtcatttgatgatgatgatggtgattgtggaagaagacacagcttttttcttttatcctgtgaaaaacaagatttgtctatgttctctgtctgattctttatctgtctttcttctgcgtatgtggctgtgttctctgtatattagatttgattggtgttccctcttcttaaagccatgatgagatcacttccttcggggtcagctttt

SEQ ID NO: 103238 - protein, 184 aa, Arabidopsis thaliana; identical to SEQ ID NO: 23240
  peptide (1)..(184): Ceres Seq. ID no. 13612295

SEQ ID NO: 103239 - protein, 165 aa, Arabidopsis thaliana; identical to SEQ ID NO: 23241
  peptide (1)..(165): Ceres Seq. ID no. 13612296

SEQ ID NO: 103240 - protein, 137 aa, Arabidopsis thaliana; identical to SEQ ID NO: 23242
  peptide (1)..(137): Ceres Seq. ID no. 13612297

SEQ ID NO: 103241 - DNA, 1310 bp, Arabidopsis thaliana
  misc_feature (1)..(1310): Ceres Seq. ID no. 13612298
  misc_feature (1)..(1310): Ortholog of  Ceres SEQ ID NO 15170461 as cited in SEQ ID NO 52853
  misc_feature (1)..(1310): Ortholog of  Ceres SEQ ID NO 13595351 as cited in SEQ ID NO 55934
  misc_feature (1)..(1310): Ortholog of  Ceres SEQ ID NO 13639645 as cited in SEQ ID NO 57488
aaagcacattggggcttatctctctctaagtaatacacacaaaaataactcacatatagagagagatatggctggagatatgcaaggagtgagagtagtagaaaaatattcaccggtcatagtgatggtgatgtcaaatgtagcgatgggttcggtgaatgcacttgtgaagaaagctcttgatgttggtgtgaaccatatggtcattggtgcttatcgaatggctatttccgctttaattttggttccctttgcctatgtcttggaaaggaaaacaagaccacaaataacgtttaggctaatggtcgatcatttcgtcagtggccttctcggggcgagtttgatgcagtttttctttttgcttggtctgtcgtacacgtcagcaactgtttcgtgtgctttggtaagcatgttgcctgcaatcaccttcgctttggcccttattttcaggactgaaaatgtgaagattctaaagaccaaagcaggaatgttgaaggtgattggaactttgatctgtataagtggagctttgttcttaacattttacaaaggcccacaaatatcaaactctcactctcactctcacggtggggcttcccacaacaacaacgatcaagacaaggccaataattggcttcttggatgtctttatttaaccataggaacagtgttgctatctctatggatgttgtttcaagggactttaagtattaagtacccttgcaaatactcgagcacttgtcttatgtcaattttcgcggcatttcaatgtgctctcttgagcctttacaagagcagagacgttaatgattggatcatagatgatagattcgttatcaccgtcatcatatacgctggagtggtaggacaagcaatgacgacggttgcaacaacatgggggattaaaaaattaggagctgtgttcgcatcggcgtttttcccacttactctcatttcggctactctatttgatttcctcattttacacactcctttataccttggaagtgtgattggatcactagtgaccataacgggtctctacatgttcttgtgggggaagaacaaagaaacggaatcatcaactgcattgtcttcaggaatggataacgaagctcaatatactactcctaataaggataacgactctaagtcgcccgtttaatttaattatattgttgttaatgtatgtttcaaataactgttatgtcctagttaatgtttaaggagaggtaatgagagataaaattttataattccaaacatcaacgtagagatttgtgaaatatttaaatccggtttgtttggtt

SEQ ID NO: 103242 - protein, 387 aa, Arabidopsis thaliana
  peptide (1)..(387): Ceres Seq. ID no. 13612299
KHIGAYLSLSNTHKNNSHIERDMAGDMQGVRVVEKYSPVIVMVMSNVAMGSVNALVKKALDVGVNHMVIGAYRMAISALILVPFAYVLERKTRPQITFRLMVDHFVSGLLGASLMQFFFLLGLSYTSATVSCALVSMLPAITFALALIFRTENVKILKTKAGMLKVIGTLICISGALFLTFYKGPQISNSHSHSHGGASHNNNDQDKANNWLLGCLYLTIGTVLLSLWMLFQGTLSIKYPCKYSSTCLMSIFAAFQCALLSLYKSRDVNDWIIDDRFVITVIIYAGVVGQAMTTVATTWGIKKLGAVFASAFFPLTLISATLFDFLILHTPLYLGSVIGSLVTITGLYMFLWGKNKETESSTALSSGMDNEAQYTTPNKDNDSKSPV

SEQ ID NO: 103243 - protein, 365 aa, Arabidopsis thaliana
  peptide (1)..(365): Ceres Seq. ID no. 13612300
MAGDMQGVRVVEKYSPVIVMVMSNVAMGSVNALVKKALDVGVNHMVIGAYRMAISALILVPFAYVLERKTRPQITFRLMVDHFVSGLLGASLMQFFFLLGLSYTSATVSCALVSMLPAITFALALIFRTENVKILKTKAGMLKVIGTLICISGALFLTFYKGPQISNSHSHSHGGASHNNNDQDKANNWLLGCLYLTIGTVLLSLWMLFQGTLSIKYPCKYSSTCLMSIFAAFQCALLSLYKSRDVNDWIIDDRFVITVIIYAGVVGQAMTTVATTWGIKKLGAVFASAFFPLTLISATLFDFLILHTPLYLGSVIGSLVTITGLYMFLWGKNKETESSTALSSGMDNEAQYTTPNKDNDSKSPV

SEQ ID NO: 103244 - protein, 361 aa, Arabidopsis thaliana
  peptide (1)..(361): Ceres Seq. ID no. 13612301
MQGVRVVEKYSPVIVMVMSNVAMGSVNALVKKALDVGVNHMVIGAYRMAISALILVPFAYVLERKTRPQITFRLMVDHFVSGLLGASLMQFFFLLGLSYTSATVSCALVSMLPAITFALALIFRTENVKILKTKAGMLKVIGTLICISGALFLTFYKGPQISNSHSHSHGGASHNNNDQDKANNWLLGCLYLTIGTVLLSLWMLFQGTLSIKYPCKYSSTCLMSIFAAFQCALLSLYKSRDVNDWIIDDRFVITVIIYAGVVGQAMTTVATTWGIKKLGAVFASAFFPLTLISATLFDFLILHTPLYLGSVIGSLVTITGLYMFLWGKNKETESSTALSSGMDNEAQYTTPNKDNDSKSPV

SEQ ID NO: 103245 - DNA, 1627 bp, Arabidopsis thaliana
  misc_feature (1)..(1627): Ceres Seq. ID no. 13612306
  misc_feature (1)..(1627): Ortholog of  Ceres SEQ ID NO 13594128 as cited in SEQ ID NO 58608
  misc_feature (1)..(1627): Ortholog of  Ceres SEQ ID NO 14309682 as cited in SEQ ID NO 58908
  misc_feature (1)..(1627): Ortholog of  Ceres SEQ ID NO 15176122 as cited in SEQ ID NO 62462
  misc_feature (1)..(1627): Ortholog of  Ceres SEQ ID NO 12624849 as cited in SEQ ID NO 62773
ctcctctgcctctcatctcttgttctctccgcccatctctgctctcttttattttcccagaaagttttttttttttttttccgaattccgttaatctcattggggtttccattgatagcaatggcgacggctttcgctcccactaagctcactgccacggttcctctgcatggatcccatgagaatcgtctcttgctcccgatccgattggctcctccttcttctttcctcggatccacccgttccctctcccttcgcagactcaatcactccaacgccacccgtcgatctcccgtcgtctctgtccaggaagttgtcaaggagaagcaatccaccaataataccagcctgttgataaccaaagaggaaggattggagttgtatgaagatatgatactaggtagatctttcgaagacatgtgtgctcaaatgtattaccgaggcaagatgtttggttttgttcacttgtacaatggccaagaggctgtttctactggctttatcaagctccttaccaagtctgactctgtcgttagtacctaccgtgaccatgtccatgccctcagcaaaggtgtctctgctcgtgctgttatgagcgagctcttcggcaaggttactggatgctgcagaggccaaggtggatccatgcacatgttctccaaagaacacaacatgcttggtggctttgcttttattggtgaaggcattcctgtcgccactggtgctgcctttagctccaagtacaggagggaagtcttgaaacaggattgtgatgatgtcactgtcgcctttttcggagatggaacttgtaacaacggacagttcttcgagtgtctcaacatggctgctctctataaactgcctattatctttgttgtcgagaataacttgtgggccattgggatgtctcacttgagagccacttctgaccccgagatttggaagaaaggtcctgcatttgggatgcctggtgttcatgttgacggtatggatgtcttgaaggtcagggaagtcgctaaagaagctgtcactagagctagaagaggagaaggtccaaccttggttgaatgtgagacttatagattcagaggacactccttggctgatcccgatgagctccgtgatgctgctgagaaagccaaatacgcggctagagacccaatcgcagcattgaagaagtatttgatagagaacaagcttgcaaaggaagcagagctaaagtcaatagagaaaaagatagacgagttggtggaggaagcggttgagtttgcagacgctagtccacagcccggtcgcagtcagttgctagagaatgtgtttgctgatccaaaaggatttggaattggacctgatggacggtacagatgtgaggaccccaagtttaccgaaggcacagctcaagtctgagaagacaagtttaaccataagctgtctactgtctcttcgatgtttctatatatcttattaagttaaatgctacagagaatcagtttgaatcatttgcactttttgctttttgtttggtgttactaaactatcacaaggttcttcttgtagttcgttgggttttcattggttaccacttaccagagaattgtatttttttttttaaagataattattttgc

SEQ ID NO: 103246 - protein, 468 aa, Arabidopsis thaliana
  peptide (1)..(468): Ceres Seq. ID no. 13612307
LLCLSSLVLSAHLCSLLFSQKVFFFFFRIPLISLGFPLIAMATAFAPTKLTATVPLHGSHENRLLLPIRLAPPSSFLGSTRSLSLRRLNHSNATRRSPVVSVQEVVKEKQSTNNTSLLITKEEGLELYEDMILGRSFEDMCAQMYYRGKMFGFVHLYNGQEAVSTGFIKLLTKSDSVVSTYRDHVHALSKGVSARAVMSELFGKVTGCCRGQGGSMHMFSKEHNMLGGFAFIGEGIPVATGAAFSSKYRREVLKQDCDDVTVAFFGDGTCNNGQFFECLNMAALYKLPIIFVVENNLWAIGMSHLRATSDPEIWKKGPAFGMPGVHVDGMDVLKVREVAKEAVTRARRGEGPTLVECETYRFRGHSLADPDELRDAAEKAKYAARDPIAALKKYLIENKLAKEAELKSIEKKIDELVEEAVEFADASPQPGRSQLLENVFADPKGFGIGPDGRYRCEDPKFTEGTAQV

SEQ ID NO: 103247 - protein, 428 aa, Arabidopsis thaliana; identical to SEQ ID NO: 36448
  peptide (1)..(428): Ceres Seq. ID no. 13612308

SEQ ID NO: 103248 - protein, 338 aa, Arabidopsis thaliana; identical to SEQ ID NO: 24106
  peptide (1)..(338): Ceres Seq. ID no. 13612309

SEQ ID NO: 103249 - DNA, 982 bp, Arabidopsis thaliana
  misc_feature (1)..(982): Ceres Seq. ID no. 13612316
  misc_feature (1)..(982): Ortholog of  Ceres SEQ ID NO 14305022 as cited in SEQ ID NO 53586
  misc_feature (1)..(982): Ortholog of  Ceres SEQ ID NO 12506279 as cited in SEQ ID NO 55440
  misc_feature (1)..(982): Ortholog of  Ceres SEQ ID NO 13654847 as cited in SEQ ID NO 62459
  misc_feature (1)..(982): Ortholog of  Ceres SEQ ID NO 15174357 as cited in SEQ ID NO 0
aaggtaaaaaaaagctttgtgcagagagagagagaagaagaaaaatgggtttgcttacgaacaagattgagagagaagagctaaagccaggagatcacatctatacttacagagcaatcttcgcttattctcaccacggaatctttgtcggtgggtccaaagttgttcatttcagacctgaacacaaccccatggattcatcaacatcatcaatatcatcatcttcctctgaagatatctgttccatatttcctgattgcggtttcagacaaccggacagtggagtagtcctttcttgcttagactgtttcctcaagaacggctcactctactgcttcgaatatggagtcagtccatcggttttcctaaccaaagtccgcggagggacttgcacaaccgcgcaatctgatacaactgattcagtcatccacagggcaatgtaccttctccaaaacggatttggcaactacgacattttcaagaacaactgtgaggatttcgcgctctattgcaagaccggtttgcttataatggataagctcggtgtagggagaagcggtcaagcttcttcaattgttggtgctcctttggctgcactcctctcttctcctttcaaattgcttattccaagtcccattggtgtggcaacagttactgctggtatgtactgtatgagtcgctatgctaccgatattggtgttagaagcgacgtcattaaggtctcagttgaggatttggctctcaaccttgacgtaaagaccattgagcaaggtgaagaagaagaagaagacgaagaagaagattctgataccgactatgttaggtgacaaacagatacctatcacctttgttcacgaatttcgatatacataagaaaacatttcagttagaatcctcatgttggttttatgttccctttattgcatttgttggcctattttctgtctgtacaaaatgaaaacgcagacgttttggtttgggt

SEQ ID NO: 103250 - protein, 274 aa, Arabidopsis thaliana
  peptide (1)..(274): Ceres Seq. ID no. 13612317
GKKKLCAERERRRKMGLLTNKIEREELKPGDHIYTYRAIFAYSHHGIFVGGSKVVHFRPEHNPMDSSTSSISSSSSEDICSIFPDCGFRQPDSGVVLSCLDCFLKNGSLYCFEYGVSPSVFLTKVRGGTCTTAQSDTTDSVIHRAMYLLQNGFGNYDIFKNNCEDFALYCKTGLLIMDKLGVGRSGQASSIVGAPLAALLSSPFKLLIPSPIGVATVTAGMYCMSRYATDIGVRSDVIKVSVEDLALNLDVKTIEQGEEEEEDEEEDSDTDYVR

SEQ ID NO: 103251 - protein, 260 aa, Arabidopsis thaliana
  peptide (1)..(260): Ceres Seq. ID no. 13612318
MGLLTNKIEREELKPGDHIYTYRAIFAYSHHGIFVGGSKVVHFRPEHNPMDSSTSSISSSSSEDICSIFPDCGFRQPDSGVVLSCLDCFLKNGSLYCFEYGVSPSVFLTKVRGGTCTTAQSDTTDSVIHRAMYLLQNGFGNYDIFKNNCEDFALYCKTGLLIMDKLGVGRSGQASSIVGAPLAALLSSPFKLLIPSPIGVATVTAGMYCMSRYATDIGVRSDVIKVSVEDLALNLDVKTIEQGEEEEEDEEEDSDTDYVR

SEQ ID NO: 103252 - protein, 211 aa, Arabidopsis thaliana
  peptide (1)..(211): Ceres Seq. ID no. 13612319
MDSSTSSISSSSSEDICSIFPDCGFRQPDSGVVLSCLDCFLKNGSLYCFEYGVSPSVFLTKVRGGTCTTAQSDTTDSVIHRAMYLLQNGFGNYDIFKNNCEDFALYCKTGLLIMDKLGVGRSGQASSIVGAPLAALLSSPFKLLIPSPIGVATVTAGMYCMSRYATDIGVRSDVIKVSVEDLALNLDVKTIEQGEEEEEDEEEDSDTDYVR

SEQ ID NO: 103253 - DNA, 678 bp, Arabidopsis thaliana
  misc_feature (1)..(678): Ceres Seq. ID no. 13612328
  misc_feature (1)..(678): Ortholog of  Ceres SEQ ID NO 13594766 as cited in SEQ ID NO 51913
  misc_feature (1)..(678): Ortholog of  Ceres SEQ ID NO 12609226 as cited in SEQ ID NO 59300
  misc_feature (1)..(678): Ortholog of  Ceres SEQ ID NO 13654942 as cited in SEQ ID NO 62533
  misc_feature (1)..(678): Ortholog of  Ceres SEQ ID NO 13599195 as cited in SEQ ID NO 0
cataagaacatcgtaatcccatccgtttatatatatattccaagttaaacttcatatcatacacacaaacctaaaacaccgaaacaaaaacaaagagatttaaacaagaagagttattatggcgagcttgctagataaagccaaggacttcgtggcggataaactcaccgcgatccctaaaccggagggttcagttacggacgttgacctcaaagacgtgaaccgtgactcagttgagtacttggccaaagtctctgtcaccaatccttacagtcattcgattccgatctgtgagatcagtttcactttccacagcgccggcagggagattggaaaggggaagataccggacccgggttctctgaaagctaaggacatgacggctcttgatattcccgtggtggtgccgtatagtatactgtttaacctggctcgagacgttggtgtggactgggacattgactacgagctccaaatcggtctaaccatcgaccttcctgttgtaggggaatttactatccctatctctagtaagggagaaatcaaacttcctacttttaaagatttcttctgatcgacaaaacctatatataagaccacacatcgttatgatggtgaatggtgatgatcgtaatgtaataagttgggtttgctataactaataaaatgttattttgc

SEQ ID NO: 103254 - protein, 151 aa, Arabidopsis thaliana; identical to SEQ ID NO: 23597
  peptide (1)..(151): Ceres Seq. ID no. 13612329

SEQ ID NO: 103255 - DNA, 1105 bp, Arabidopsis thaliana
  misc_feature (1)..(1105): Ceres Seq. ID no. 13612330
  misc_feature (1)..(1105): Ortholog of  Ceres SEQ ID NO 13654802 as cited in SEQ ID NO 62664
tctttttgtcgactgcttcttcacgccgtcgaggaattcttctccaccaacgaatccggcgacgtcttatcaccaccttgtcgaatctttagttgatgttgtttaaaggttttagctaataagggcatgaaacggatctgctcggtttcaagtgttcaacttttttccagaagtttcagagctttagcatcgccacgttccttgaactatcccctgcagtgtatcaagcgttcatcagttcggatggagagtagcaacttttcttctggtgtcagaaccgagagtagtgtgaagccaagaggagcattgatagttctagaaggtcttgatcgcagcgggaaatcaacacagtgtgctaagctactctctttcttgaatggtttaggacatccgaccgagctctggagattccccgatagagagacgagtgtcggtcagatgatatccgcgtatctttctaataagtcgcagttagatgatcacacaattcatctccttttcagcgccaatcgttgggagaaaaggtcgttgatggaggaaaagctaaaaacaggaactacgcttatcgtggatcgttattcgtattctggtgttgcattctcatcagctaaaggtctcgatatcgaatggtgcaaggctcccgaaatcgggttactggctccagattctgtactttacctggacatttcacctgaaagagctgctgagagaggtggatatggagatgagaggtatgagcgagtggagtttcagaagaaagttgcagacttttatcaaacccttggcgattcttcatggaagataatcaatgccagtgatgccatggaggaagtagagaagaagattcaacaagtggtattagatcaagtcaaagaatgtactgaaggaaagcctctgtctctcctatggtcgtcatagaacgttttcgagtcatagcacttgcaagtttagtgattttgaaggaacttttgttgaagtttatactatgttgtgccatctaagcccattaacaggcccaaaagtttagtttatgtcgtcactcatgacatcttaatcgattattttggtgtaaactaattgagcgtcattaagtaaaggacaaatc

SEQ ID NO: 103256 - protein, 263 aa, Arabidopsis thaliana
  peptide (1)..(263): Ceres Seq. ID no. 13612331
MKRICSVSSVQLFSRSFRALASPRSLNYPLQCIKRSSVRMESSNFSSGVRTESSVKPRGALIVLEGLDRSGKSTQCAKLLSFLNGLGHPTELWRFPDRETSVGQMISAYLSNKSQLDDHTIHLLFSANRWEKRSLMEEKLKTGTTLIVDRYSYSGVAFSSAKGLDIEWCKAPEIGLLAPDSVLYLDISPERAAERGGYGDERYERVEFQKKVADFYQTLGDSSWKIINASDAMEEVEKKIQQVVLDQVKECTEGKPLSLLWSS

SEQ ID NO: 103257 - protein, 224 aa, Arabidopsis thaliana; identical to SEQ ID NO: 77543
  peptide (1)..(224): Ceres Seq. ID no. 13612332

SEQ ID NO: 103258 - protein, 159 aa, Arabidopsis thaliana; identical to SEQ ID NO: 77544
  peptide (1)..(159): Ceres Seq. ID no. 13612333

SEQ ID NO: 103259 - DNA, 840 bp, Arabidopsis thaliana
  misc_feature (1)..(840): Ceres Seq. ID no. 13612334
  misc_feature (1)..(840): Ortholog of  Ceres SEQ ID NO 13495070 as cited in SEQ ID NO 53216
  misc_feature (1)..(840): Ortholog of  Ceres SEQ ID NO 12598241 as cited in SEQ ID NO 61025
  misc_feature (1)..(840): Ortholog of  Ceres SEQ ID NO 13661333 as cited in SEQ ID NO 61620
  misc_feature (1)..(840): Ortholog of  Ceres SEQ ID NO 15173749 as cited in SEQ ID NO 61775
  misc_feature (1)..(840): Ortholog of  Ceres SEQ ID NO 13596812 as cited in SEQ ID NO 62283
  misc_feature (1)..(840): Ortholog of  Ceres SEQ ID NO 13623021 as cited in SEQ ID NO 0
  misc_feature (1)..(840): Ortholog of  Ceres SEQ ID NO 14309080 as cited in SEQ ID NO 0
agaagaaagtaaagagagaagaagcaaaaagagtcatattcgttgaaaacatcattcactcttctctgcgtctccttctttcacccgaaattgtctctgacaccgttttgattcagccatggctaatgctgcgtcaggaatggcagtccatgatgactgcaagctaagatttctggaactgaaggcgaaaaggacacaccgtttcattgtctacaagattgaggagaagcagaagcaagtgattgttgagaaagttggtgaacctattctaacttacgaggactttgcagcaagtcttccagctgacgaatgccgatacgccatttatgatttcgactttgtcactgcagagaattgccagaagagcaagattttcttcattgcatggtgtcccgacgtagcaaaggtgagaagcaagatgatctatgcgagctctaaggacaggttcaagcgtgaacttgatggaattcaagtggagcttcaagcaactgatccaactgagatggatcttgatgttttgaaaagccgcgtcaactaaaagaaactctctttgaataagcttccgattatattcgactattatgaaatggtgttttctattctcttacagtctcttgtgactgttagatacacttgacacccttcattctatctgtctggtctgttctctgtgtctatgttaccttacagtgtctcatctatattcaaaattatcacaaggtttgtgctgtgtttgcttcctttgtttcaactctaccaaagcttaagattaagatttgggtaagatgattcttttaagcttccctttgttctctttgttacagagggtataaaaaatgc

SEQ ID NO: 103260 - protein, 139 aa, Arabidopsis thaliana; identical to SEQ ID NO: 28739
  peptide (1)..(139): Ceres Seq. ID no. 13612335

SEQ ID NO: 103261 - protein, 132 aa, Arabidopsis thaliana; identical to SEQ ID NO: 28740
  peptide (1)..(132): Ceres Seq. ID no. 13612336

SEQ ID NO: 103262 - DNA, 696 bp, Arabidopsis thaliana
  misc_feature (1)..(696): Ceres Seq. ID no. 13612345
  misc_feature (1)..(696): Ortholog of  Ceres SEQ ID NO 13594705 as cited in SEQ ID NO 52034
agagaaaggttttggagatcgagaccaaactccgattgaaagaggatgcattcttttggttacagagcgaatgctctactcacattcgccgtcacgattctagctttcatttgcgcgattgcttccttctctgataacttcagtaaccaaaatccctctgctcagatccagatattgaatatcaattggtttcagaagcaacctcatggaaatgatgaggtcagcttgacactgaacataacagctgacttgcagtcactatttacttggaacacaaagcaggtatttgcttttgtagcagcagagtatgaaacctccaagaacgccctgaatcaggtttcactatgggatgccataataccagagaaagagcatgccaaattctggatacaaatctcaaacaagtaccgtttcatagatcagggacataacctccgagggaaggactttaacttgacattgcactggcatgtcatgcccaagacaggcaagatgtttgctgacaaaatagttatgtctggttatcgtttacctaatgcatacagatgaagatgaagagcctcctcctgcatcatctaaggttaacaaaaaatctcttaaattaggaaagaagagagttatatttcaggtgttaagttagacttgctgatctgtatactggcatgaagttaaaaacattgttttggaatgaattat

SEQ ID NO: 103263 - protein, 167 aa, Arabidopsis thaliana
  peptide (1)..(167): Ceres Seq. ID no. 13612346
MHSFGYRANALLTFAVTILAFICAIASFSDNFSNQNPSAQIQILNINWFQKQPHGNDEVSLTLNITADLQSLFTWNTKQVFAFVAAEYETSKNALNQVSLWDAIIPEKEHAKFWIQISNKYRFIDQGHNLRGKDFNLTLHWHVMPKTGKMFADKIVMSGYRLPNAYR

SEQ ID NO: 103264 - DNA, 1453 bp, Arabidopsis thaliana
  misc_feature (1)..(1453): Ceres Seq. ID no. 13612347
  misc_feature (1)..(1453): Ortholog of  Ceres SEQ ID NO 13664362 as cited in SEQ ID NO 66523
gattctcgttggcttcagacattttccatcttctaggtttctttctttctcagcaatttccaggaaaatggaagtgaaagctagagctcctgggaagatcatacttgcaggggaacacgctgttgttcatggatccaccgctgtagctgccgccattgatctctacacttacgttactctccgctttcctcttccatcagctgagaacaatgataggcttacacttcagctcaaggacatttccttggagttttcatggtccttagccagaatcaaagaagcgattccttatgattcaagcactctctgccgttctacgccggcttcatgttcagaggagacccttaaatcaattgcagttttggttgaagagcaaaatcttccaaaggaaaagatgtggctctcctctgggatctccacgtttctctggttatacaccagaattatagggttcaatccggctacagtagtcattaactctgagcttccatacgggtctggcctcggttcatcagcagctttatgtgtagctctcacagctgctctccttgcttcttctatttcagagaaaacccgtggtaacggttggtcatctctcgatgaaaccaatcttgagttgctaaataaatgggctttcgaaggcgaaaagatcatccatgggaaaccttctgggatagacaacaccgtcagtgcatacggcaacatgatcaagttctgctcaggcgagataactcggttacaatccaacatgcctctgagaatgctaattaccaacactagagttgggcgaaacacaaaagctctggtctctggtgtgtcacagagagcggtaagacatcctgatgcgatgaagtcagtgttcaacgccgtggattctataagcaaagagctcgctgcgatcattcagtctaaagacgagacctcagttacagaaaaagaagagagaataaaagaactcatggagatgaaccaaggtctgctcctgtcaatgggggttagccacagctcaatcgaggctgtgattctaaccacggtcaagcacaagcttgtctccaaacttacaggagctggtggcggcggctgcgtcctcactctattaccaaccgggacggtggtggacaaagtggtggaggagctcgagtccagcggttttcagtgtttcacggcattgattggtggtaacggagctcagatttgctattgatcaggtcggaaaaatcatatttggcctctcaccattcttaaacttgctgacgtgtacgtcaagaaggctgcaattagaaattcaaagagtcgattttttcttataaatgatgtgttgaatgtaaaattgctttattattataccatgtgacaaataattgaaaaaagcaaagattgtttagtttttttttttgtattttgaaattgttatgtttcatgatgggaaatataaaatgacaaagtttttact

SEQ ID NO: 103265 - protein, 400 aa, Arabidopsis thaliana
  peptide (1)..(400): Ceres Seq. ID no. 13612348
ILVGFRHFPSSRFLSFSAISRKMEVKARAPGKIILAGEHAVVHGSTAVAAAIDLYTYVTLRFPLPSAENNDRLTLQLKDISLEFSWSLARIKEAIPYDSSTLCRSTPASCSEETLKSIAVLVEEQNLPKEKMWLSSGISTFLWLYTRIIGFNPATVVINSELPYGSGLGSSAALCVALTAALLASSISEKTRGNGWSSLDETNLELLNKWAFEGEKIIHGKPSGIDNTVSAYGNMIKFCSGEITRLQSNMPLRMLITNTRVGRNTKALVSGVSQRAVRHPDAMKSVFNAVDSISKELAAIIQSKDETSVTEKEERIKELMEMNQGLLLSMGVSHSSIEAVILTTVKHKLVSKLTGAGGGGCVLTLLPTGTVVDKVVEELESSGFQCFTALIGGNGAQICY

SEQ ID NO: 103266 - protein, 378 aa, Arabidopsis thaliana; identical to SEQ ID NO: 25905
  peptide (1)..(378): Ceres Seq. ID no. 13612349

SEQ ID NO: 103267 - protein, 269 aa, Arabidopsis thaliana; identical to SEQ ID NO: 25906
  peptide (1)..(269): Ceres Seq. ID no. 13612350

SEQ ID NO: 103268 - DNA, 1390 bp, Arabidopsis thaliana
  misc_feature (1)..(1390): Ceres Seq. ID no. 13612369
  misc_feature (1)..(1390): Ortholog of  Ceres SEQ ID NO 13581579 as cited in SEQ ID NO 58361
  misc_feature (1)..(1390): Ortholog of  Ceres SEQ ID NO 13596474 as cited in SEQ ID NO 62169
  misc_feature (1)..(1390): Ortholog of  Ceres SEQ ID NO 13598714 as cited in SEQ ID NO 62656
  misc_feature (1)..(1390): Ortholog of  Ceres SEQ ID NO 13596969 as cited in SEQ ID NO 63375
  misc_feature (1)..(1390): Ortholog of  Ceres SEQ ID NO 13597519 as cited in SEQ ID NO 64759
  misc_feature (1)..(1390): Ortholog of  Ceres SEQ ID NO 13597870 as cited in SEQ ID NO 64982
  misc_feature (1)..(1390): Ortholog of  Ceres SEQ ID NO 13595926 as cited in SEQ ID NO 67778
  misc_feature (1)..(1390): Ortholog of  Ceres SEQ ID NO 13596362 as cited in SEQ ID NO 67877
  misc_feature (1)..(1390): Ortholog of  Ceres SEQ ID NO 12567001 as cited in SEQ ID NO 0
ctcttcttagtaacctcctaagccatgaaatagtcgcaaaggccctttcttcgtcttcgtttctaattgctttcgacgacaatcgatcgtagagaagtctacctcgtagacatctctctcacaaatccaattcaattaccattgtttgttattatctgatgtcgaatatgcaattctctcgtggttttaatccctttgttatcctcttctgtctcgccgtggttgcaccaattatatcggctgatgtcgctatcttgagaacggactattaccaaaaaacatgtcctgatttccacaaaattgtgcgtgaagccgttacaaccaaacaagtccaacaaccaacaactgcggccgggaccctccgtctctttttccatgattgtttccttgaaggttgtgatgcatctgtcttgatcgcgaccaactcgttcaacaaagcggaacgcgatgatgatctcaatgattccctcccgggagatgcttttgacatcgtcacccgcatcaagacagctctcgagttgtcttgtcctggtgtagtatcatgcgcggatattctagcgcaggctacacgtgaccttgtcacaatggtaggaggaccttactttgacgtaaagcttggtcgtaaagacggattcgaatccaaagctcataaagtcagaggaaatgtcccaatggcaaaccagactgttcctgacatccacgggatattcaagaaaaacggttttagtcttcgcgagatggtagcattaagcggggctcacaccattggattctctcactgcaaagagttttccgacagactctacggatcccgtgctgataaagaaatcaacccgcgattcgcagccgctctcaaagatctttgcaaaaaccacaccgtggatgatacaatcgccgcgtttaacgacgtgatgactccaggaaagttcgacaacatgtacttcaagaacctaaagcgagggctagggcttttagcgtctgaccacatccttattaaagacaacagcaccaagccgtttgtggatctatacgcaactaacgagacagcattctttgaggatttcgctcgtgcgatggagaaacttggcacggtcggcgtcaagggcgataaagatggagaagtgagacgtaggtgcgaccacttcaacaatctcaacgtttaagaagaaaaagaaaacacaaaaccatataaatataatattatttctgttttatttgcggaggagttgaggagaagaaaggtttggttggtatatatgtttaataactacctattataagcaagatcttgtaacaattcaagttgggatgtttaatttttccatgaaaattcaaactgttgtattgaaagtatatagataaaataacatattatatatcgaacaattgt

SEQ ID NO: 103269 - protein, 334 aa, Arabidopsis thaliana; identical to SEQ ID NO: 37496
  peptide (1)..(334): Ceres Seq. ID no. 13612370

SEQ ID NO: 103270 - protein, 331 aa, Arabidopsis thaliana; identical to SEQ ID NO: 37497
  peptide (1)..(331): Ceres Seq. ID no. 13612371

SEQ ID NO: 103271 - protein, 192 aa, Arabidopsis thaliana; identical to SEQ ID NO: 37498
  peptide (1)..(192): Ceres Seq. ID no. 13612372

SEQ ID NO: 103272 - DNA, 965 bp, Arabidopsis thaliana
  misc_feature (1)..(965): Ceres Seq. ID no. 13612373
  misc_feature (1)..(965): Ortholog of  Ceres SEQ ID NO 14306062 as cited in SEQ ID NO 57524
aacaacaaaacctctctctctttcactttctctctaaaaaccagaaaaaaaaaaaatggagctttcatcgagaaagccttatttcattgaggaagaagaagaagagaatttggcttcttctttatcagaaatggaagctgggttttctggtaacaataataatagtaataaccatggaaatccccaaaacggtgtcgtttcttcaagccgtttctcttacggtagattaaacagtcttaggaacagtcagagttattattacaatcaatactctgtttcgtctccgagatctgttgtgtctggaagatttcatgatttcagattcgatattcaacaacctcatttcttggactcgtgtttcctctgtaagaaacctcttggtgataacagagacatctacatgtacagaggagatacaccgttttgcagtgaagagtgtagacaagaacagatagagagagatgaagcaaaagagaagaaacagaatctgtctcattcggtgaaatcagctatgcggaggaaagaacaatcttcaccaactagatctcgtgattatgcttttcacaatggaactgttgctgctgcttaattaaaaatatctgggaactttgagaattattataattaattaggttaagaaaaaaataagctatattgtatctaacgctatgaagctggttttggatcctctctctttctctcgagatcttaaggatcttttaaaactttagcttcaagtcttgggaaaaagatgaagaagctaaagatcctttaattttcttttctttttttgtaagaaaaaaatagtttcttgacatgaaattttgggagtatgagaagagaaaatgtaaatgcctatgtgaattataatagtccatggcatgtttgagttatattttttcttttgtttttagatttcggtatcaatgtctttcgagggatatacagatgttaaatcaaatttt

SEQ ID NO: 103273 - protein, 177 aa, Arabidopsis thaliana
  peptide (1)..(177): Ceres Seq. ID no. 13612374
MELSSRKPYFIEEEEEENLASSLSEMEAGFSGNNNNSNNHGNPQNGVVSSSRFSYGRLNSLRNSQSYYYNQYSVSSPRSVVSGRFHDFRFDIQQPHFLDSCFLCKKPLGDNRDIYMYRGDTPFCSEECRQEQIERDEAKEKKQNLSHSVKSAMRRKEQSSPTRSRDYAFHNGTVAAA

SEQ ID NO: 103274 - protein, 152 aa, Arabidopsis thaliana
  peptide (1)..(152): Ceres Seq. ID no. 13612375
MEAGFSGNNNNSNNHGNPQNGVVSSSRFSYGRLNSLRNSQSYYYNQYSVSSPRSVVSGRFHDFRFDIQQPHFLDSCFLCKKPLGDNRDIYMYRGDTPFCSEECRQEQIERDEAKEKKQNLSHSVKSAMRRKEQSSPTRSRDYAFHNGTVAAA

SEQ ID NO: 103275 - DNA, 1083 bp, Arabidopsis thaliana
  misc_feature (1)..(1083): Ceres Seq. ID no. 13612376
  misc_feature (1)..(1083): Ortholog of  Ceres SEQ ID NO 14312777 as cited in SEQ ID NO 55573
  misc_feature (1)..(1083): Ortholog of  Ceres SEQ ID NO 13595190 as cited in SEQ ID NO 55916
  misc_feature (1)..(1083): Ortholog of  Ceres SEQ ID NO 14302004 as cited in SEQ ID NO 63437
  misc_feature (1)..(1083): Ortholog of  Ceres SEQ ID NO 13599456 as cited in SEQ ID NO 0
aatattttcattaatcgattctcaaagtcaagcaaaaaaaacgaaacaatggatgcgttctcttccttcttcgattctcaacctggtagcagaagctggagctatgattctcttaaaaacttccgtcagatttctccagccgttcagaatcatcttaaacgggtttatttgaccttatgttgtgctcttgtggcgtctgcctttggagcttacctccatgtgctctggaatatcggcggtattcttacaacgattggatgtattggaactatgatttggctcctttcatgtcctccttatgaacaccaaaaaaggctttctcttctgtttgtgtctgctgttcttgaaggtgcttctgttggccccttgatcaaagtggcaattgatgttgacccaagcatccttatcactgcatttgttggaactgcgatagcgtttgtctgtttctcagcagcagcaatgttagcaagacgcagggagtatctctaccttggaggactgctttcatctggcttgtctatgctaatgtggctccagtttgcctcttcaatctttggtggctctgcatctatctttaagtttgagttgtactttggacttttgatctttgtgggatacatggtggtggacacacaagagattatagaaaaggcacacctcggtgacatggactatgtaaaacattcgttgacccttttcactgactttgtagctgtgtttgttcggattctcatcataatgttgaagaactcagcagataaagaagagaagaagaagaaaaggagaaactgaggggatgtaaagtaaatttaactttatggttgttatcgtgtgtggccactttgaagatattacttgttagcactctctattggtgaccagacatgtttccactaaaaaggatctgcttgtttcacttctgcacaagtaccatcttcagattgtaaatgactcgagtgttgttcttcttttcataaacttttgttctttaagagtttggttctactgattgcatcttaccaagctaagaataatgtaggaaaatgataatcctgtttaaattttctaaaatgtgtgcatttc

SEQ ID NO: 103276 - protein, 263 aa, Arabidopsis thaliana; identical to SEQ ID NO: 23440
  peptide (1)..(263): Ceres Seq. ID no. 13612377

SEQ ID NO: 103277 - protein, 247 aa, Arabidopsis thaliana; identical to SEQ ID NO: 23441
  peptide (1)..(247): Ceres Seq. ID no. 13612378

SEQ ID NO: 103278 - protein, 173 aa, Arabidopsis thaliana; identical to SEQ ID NO: 23442
  peptide (1)..(173): Ceres Seq. ID no. 13612379

SEQ ID NO: 103279 - DNA, 962 bp, Arabidopsis thaliana
  misc_feature (1)..(962): Ceres Seq. ID no. 13612380
  misc_feature (1)..(962): Ortholog of  Ceres SEQ ID NO 14302764 as cited in SEQ ID NO 67753
  misc_feature (1)..(962): Ortholog of  Ceres SEQ ID NO 14302291 as cited in SEQ ID NO 68180
aaaaaagttcagatatttgataaatcaatcaacaaaacaaaaaaaactctatagttagtttctctgaaaatgtacggacagtgcaatatagaatccgactacgctttgttggagtcgataacacgtcacttgctaggaggaggaggagagaacgagctgcgactcaatgagtcaacaccgagttcgtgtttcacagagagttggggaggtttgccattgaaagagaatgattcagaggacatgttggtgtacggactcctcaaagatgccttccattttgacacgtcatcatcggacttgagctgtctttttgattttccggcggttaaagtcgagccaactgagaactttacggcgatggaggagaaaccaaagaaagcgataccggttacggagacggcagtgaaggcgaagcattacagaggagtgaggcagagaccgtgggggaaattcgcggcggagatacgtgatccggcgaagaatggagctagggtttggttagggacgtttgagacggcggaagatgcggctttagcttacgatatagctgcttttaggatgcgtggttcccgcgctttattgaattttccgttgagggttaattccggtgaacctgacccggttcggatcacgtctaagagatcttcttcgtcgtcgtcgtcgtcgtcctcttctacgtcgtcgtctgaaaacgggaagttgaaacgaaggagaaaagcagagaatctgacgtcggaggtggtgcaggtgaagtgtgaggttggtgatgagacacgtgttgatgagttattggtttcataagtttgatcttgtgtgttttgtagttgaatagttttgctataaatgttgaggcaccaagtaaaagtgttcccgtgatgtaaattagttactaaacagagccatatatcttcaatccataaacaaaatagacactttaataaagccgtgagtgttaatttttc

SEQ ID NO: 103280 - protein, 243 aa, Arabidopsis thaliana; identical to SEQ ID NO: 26540
  peptide (1)..(243): Ceres Seq. ID no. 13612381

SEQ ID NO: 103281 - protein, 186 aa, Arabidopsis thaliana; identical to SEQ ID NO: 26541
  peptide (1)..(186): Ceres Seq. ID no. 13612382

SEQ ID NO: 103282 - protein, 147 aa, Arabidopsis thaliana; identical to SEQ ID NO: 26542
  peptide (1)..(147): Ceres Seq. ID no. 13612383

SEQ ID NO: 103283 - DNA, 1208 bp, Arabidopsis thaliana
  misc_feature (1)..(1208): Ceres Seq. ID no. 13612392
  misc_feature (1)..(1208): Ortholog of  Ceres SEQ ID NO 12619999 as cited in SEQ ID NO 66123
  misc_feature (1)..(1208): Ortholog of  Ceres SEQ ID NO 13656436 as cited in SEQ ID NO 69154
agaaggcgttgaatcctttcgttttccgattccatttttgggatctcttgtttcgttttcttctctttggatccattccattcccatgttccccaatttctttaatcggtgttgcttccacaaggcttcatgagcttgtataacaagtttctctaggaggtgttaaagagccagatcaagctttcagaagagattttcttagggtggttgagagctgaaagttttgatatttagtcaactttgttccactgaaccttctaggaagctacctcaagtagacagctttgttgacgggcttcaagccagtggtaaagatatgcttctgtagaagggttaatcttgagcattaaaggacatggctttctactctgaagacgacaagagcgaagactacctctttaagattgttctaatcggtgattctgctgtcgggaaatcaaatttacttgccagatttgcgagggatgagttctatcccaattcaaagtcgacgattggagtggagtttcagacacagaagatggatataaacgggaaggagatcaaagcacagatatgggacacagcaggtcaagaacgttttagagcagtcacttctgcatattaccgaggtgcagttggagctcttctggtttacgatatcagcagacggcagacttttcacagcattggtagatggctcaacgagctacacacacactctgatatgaatgttgtgacgatcctggtgggcaacaagtcggatctgaaggacttgagagaagtgtcaacagcggaagggaaggcattggctgaagcacaaggtcttttcttcatggagacatcggctttggactcatcaaacgtggcagctgcatttgagacggttgtgaaggagatatacaacatactgagcaggaaagtgatgagctcacaggagctaaacaagcaagaccctgcttcactgagcaatggcaagaaagttgtgataccatcagacgggcagggcgagttcaagaaaggtggatgttgttcttcttgatagaaaactgaaattgtagagagcttaaaaaggaagactattgatcatctgtttgattgtttatgttgtccacgttgccatgaacgttgaaatttgagatgggcttgtgttgtggtgtggaagtgtttaggtgtagtagcaatctgtaaattttctattgcagaagcttttatgagactcacactac

SEQ ID NO: 103284 - protein, 221 aa, Arabidopsis thaliana
  peptide (1)..(221): Ceres Seq. ID no. 13612393
MAFYSEDDKSEDYLFKIVLIGDSAVGKSNLLARFARDEFYPNSKSTIGVEFQTQKMDINGKEIKAQIWDTAGQERFRAVTSAYYRGAVGALLVYDISRRQTFHSIGRWLNELHTHSDMNVVTILVGNKSDLKDLREVSTAEGKALAEAQGLFFMETSALDSSNVAAAFETVVKEIYNILSRKVMSSQELNKQDPASLSNGKKVVIPSDGQGEFKKGGCCSS

SEQ ID NO: 103285 - protein, 166 aa, Arabidopsis thaliana
  peptide (1)..(166): Ceres Seq. ID no. 13612394
MDINGKEIKAQIWDTAGQERFRAVTSAYYRGAVGALLVYDISRRQTFHSIGRWLNELHTHSDMNVVTILVGNKSDLKDLREVSTAEGKALAEAQGLFFMETSALDSSNVAAAFETVVKEIYNILSRKVMSSQELNKQDPASLSNGKKVVIPSDGQGEFKKGGCCSS

SEQ ID NO: 103286 - DNA, 1645 bp, Arabidopsis thaliana
  misc_feature (1)..(1645): Ceres Seq. ID no. 13612425
  misc_feature (1)..(1645): Ortholog of  Ceres SEQ ID NO 13597334 as cited in SEQ ID NO 64244
gaaaagaaaagtaaggaattttccattactctctctcacttctctctctctaattctcaccaagaacccagaattgagaataagaatctatagatcattatgctcacctctctgctcttgtttaagtgatgagctgaatctaacaaacgttcacacgtgttaacacccacacgtgcgacttcttctttattctcttcaaagcctcttcttgaactagaagtttcttttgaacatgtatagtccaaatactctagttgctttagagtcattgccaaacttgaacttgttttatccttcttctctttcattagcttgagcaagctgaagcttctttgtgctttctccaagctccactttaaagttgaatcatactcaaacatttactgacagaggactgattcatagaatatttaacatcataagatgatcttctcaataataatggcggttcttttggcccaagcttcaagtttgccaaagaagactgtccagagttcggatggggatattgtagactgcttcgacgtgagagatcagccttcattggatcacccactattgcagaatcatgaaattcagggcgcacccgccacaggattaccatatatgatcaacaaagcgggaaaaagaagagtttggcaggtttggaaccaaaacggcaccagctgtcctgacgaaactatacccataagacgtagcgtggtcggggctaaaagatttaagaaaaaacattggacagatgttcgagtcaatcgccgaacagttccatacgccgctgaggagggacacgagtacgcgattggagaggtggtatatctgcggggaatatatggaacagtggcaactatgaacgtttggaatccatctgtagaacatggaacaaacgaatttagtttgtcccaaatttggctcgtcgctggacattacaacgattccgacctcaacacagtcgaggctggttggcaggttttcccggatcattatcatgacagccagccacgacttttcgtctattggacgaaggacacatatcagaagacagggtgtctcaacctcgagtgccctggttttgttcaagtcactagcgagtttgccattggcagtgcattctctcctacatcttcttacggcggcagccagtacgacatcacgatgtacatatggaaggatactaaagatggcaactggtggctgagcattgactcctcagtgattgggtattggccggcgaggcttttcacgcatttagctcacgggccggcgacgttggtacagtggggaggcgagattgtaaactctcgcagctatggccagcacactaccacacagatgggctcgggacattttgcagaggaaggcttcggcaaagcaggtagcttccgaaacctgaaaattattgactacctctcgtacatgcaaccagtccaagagttcatcctgcaaacgaagaaccccacatgttatactgccataaagggatacagcgaggagtgggggagtcatttctactacggcggaccgggatataacgccctgtgtccatagtgtttggacattaggataaacttatttctttatgatatatgataaaactagagtttggagtgtttaatgacgttaaataaaaaactagagtttggatttc

SEQ ID NO: 103287 - protein, 373 aa, Arabidopsis thaliana; identical to SEQ ID NO: 40819
  peptide (1)..(373): Ceres Seq. ID no. 13612426

SEQ ID NO: 103288 - protein, 367 aa, Arabidopsis thaliana; identical to SEQ ID NO: 40820
  peptide (1)..(367): Ceres Seq. ID no. 13612427

SEQ ID NO: 103289 - protein, 312 aa, Arabidopsis thaliana; identical to SEQ ID NO: 40821
  peptide (1)..(312): Ceres Seq. ID no. 13612428

SEQ ID NO: 103290 - DNA, 1303 bp, Arabidopsis thaliana
  misc_feature (1)..(1303): Ceres Seq. ID no. 13612429
  misc_feature (1)..(1303): Ortholog of  Ceres SEQ ID NO 13648081 as cited in SEQ ID NO 165
  misc_feature (1)..(1303): Ortholog of  Ceres SEQ ID NO 15224803 as cited in SEQ ID NO 56572
  misc_feature (1)..(1303): Ortholog of  Ceres SEQ ID NO 13502952 as cited in SEQ ID NO 62271
  misc_feature (1)..(1303): Ortholog of  Ceres SEQ ID NO 13502973 as cited in SEQ ID NO 68052
  misc_feature (1)..(1303): Ortholog of  Ceres SEQ ID NO 13596000 as cited in SEQ ID NO 68188
caagaagaagaatccaaagacatgaaacttttctttattgttctcatctcttttctttccctcctccaagcatcaaaaggattcgatttcgacgaaaaagaattagaaaccgaagagaacgtatggaagctctatgagaggtggagaggccaccactctgtatccagagcctcccacgaggcaataaagcggttcaacgtttttagacacaatgtccttcatgtccacaggactaacaaaaagaacaagccttacaaactcaagatcaatagattcgccgacataacgcaccacgagtttagaagctcctacgctggctctaatgttaagcatcaccgaatgcttcgtggaccgaagcgcggatctggtggtttcatgtatgagaatgtgaccagagttccgagttctgttgattggcgagagaaaggagctgtcactgaggtcaagaatcaacaagattgtggaagttgctgggcgttttcgacggttgcagcagtggaagggataaacaagatcagaacaaacaaactggtttcattgtctgaacaagagcttgtggattgtgacactgaagagaatcaaggttgtgcaggaggtctcatggaacctgcgtttgaatttataaagaacaatggtggcatcaaaaccgaagagacttatccttacgattccagtgacgttcaattctgtagagctaatagtattggtggagaaactgtaaccatcgatggacacgaacacgtccctgagaatgatgaggaagaacttctcaaagctgttgctcaccagcctgtctctgtagctattgatgctgggagctcagatttccagctttactctgagggtgtgtttatcggagaatgcgggactcagttgaaccacggggtggtgattgttgggtatggagagaccaaaaatggaacaaaatattggatagtaaggaactcatggggacctgaatggggagaaggaggctatgttcggatagaaagaggaatatcggagaatgaaggacgttgcggtatagccatggaggcttcttatcccaccaagctctcttcgactccttctactcatgagtcagtagttcgtgatgatgttaaagacgagctctagagactttaagtcattgaaaactgaatttcgaaccattcttctagtgagcttacactgagtttattattttatggattgaggttcatgggtttcagtttacacatttatcgtgtattcatcttaaattgagacgatttttatctccttgtaatattggccagcatttgctttgcggaaaaatggcgtt

SEQ ID NO: 103291 - protein, 371 aa, Arabidopsis thaliana
  peptide (1)..(371): Ceres Seq. ID no. 13612430
QEEESKDMKLFFIVLISFLSLLQASKGFDFDEKELETEENVWKLYERWRGHHSVSRASHEAIKRFNVFRHNVLHVHRTNKKNKPYKLKINRFADITHHEFRSSYAGSNVKHHRMLRGPKRGSGGFMYENVTRVPSSVDWREKGAVTEVKNQQDCGSCWAFSTVAAVEGINKIRTNKLVSLSEQELVDCDTEENQGCAGGLMEPAFEFIKNNGGIKTEETYPYDSSDVQFCRANSIGGETVTIDGHEHVPENDEEELLKAVAHQPVSVAIDAGSSDFQLYSEGVFIGECGTQLNHGVVIVGYGETKNGTKYWIVRNSWGPEWGEGGYVRIERGISENEGRCGIAMEASYPTKLSSTPSTHESVVRDDVKDEL

SEQ ID NO: 103292 - protein, 364 aa, Arabidopsis thaliana; identical to SEQ ID NO: 42787
  peptide (1)..(364): Ceres Seq. ID no. 13612431

SEQ ID NO: 103293 - protein, 258 aa, Arabidopsis thaliana; identical to SEQ ID NO: 42788
  peptide (1)..(258): Ceres Seq. ID no. 13612432

SEQ ID NO: 103294 - DNA, 1089 bp, Arabidopsis thaliana
  misc_feature (1)..(1089): Ceres Seq. ID no. 13612439
  misc_feature (1)..(1089): Ortholog of  Ceres SEQ ID NO 14314775 as cited in SEQ ID NO 56844
  misc_feature (1)..(1089): Ortholog of  Ceres SEQ ID NO 14314628 as cited in SEQ ID NO 56888
aagtaaagcttttacctaattctcaaacattctttacacaaaaatatcaagagtgatatagatagcgagaaaaaatggacggtaggggagggtgttgcatagctaggtacgccattggctctggaccgtacgatctttccaaagcagatcgcatcatgcttcgatttcgtcccattgctcctaaaccggccagccccggcggagtaaatcccgtatccagcggagatagcggcggcggaagctccgacgtttcctttagatcagctagtagaagaaagaggaaatgtcatcagctgaaggagaatggtggtaacgccaagaggtgcacccggcggaagacgtcggataaacccgtcgttcacggcagtgctaatgcggtgactctttctctattaccggagaaacctatagatcttaaggcggcggtggagaagcagaagcggcagggtccgttatggttgagtttcaaagacggcggagggatgctcacaccggcttatcagacaccggagattgtgcagaggacggtggtgatttcgtcgtgtatgacggtggagcgtgtaacggacgcttggattgacggttacggtttagggaggtcagatgaagaaaggaagatgaatcttgtgagagacacgtgtcctggtttcatatccgacggttcagggagagtcacgtggactaatgacgcgtatcggaagatggctagggatattattcccgtggaagaaggtgcaccggagataactagcggcgatagttttcacgtgatcgtacggttggtgatgagggagaggccgatgctaacgtcccctggattcacatgcagaatgaaactccagtacacgtgtcaaaatcgtgagagaggctcagtcacggtgccttgcgacgtgtggagaatggacgtcggtggtggttttgcttggaggctcgacgttaaggccgctttgtgcctttgacaccgttagatcaactttagtcactatgggcacgaacattacacatgatatgtcctccaatgataaaatatggattcagaactaattagatttctaatggtttaacatatatttatgtcgtttttgttct

SEQ ID NO: 103295 - protein, 294 aa, Arabidopsis thaliana
  peptide (1)..(294): Ceres Seq. ID no. 13612440
MDGRGGCCIARYAIGSGPYDLSKADRIMLRFRPIAPKPASPGGVNPVSSGDSGGGSSDVSFRSASRRKRKCHQLKENGGNAKRCTRRKTSDKPVVHGSANAVTLSLLPEKPIDLKAAVEKQKRQGPLWLSFKDGGGMLTPAYQTPEIVQRTVVISSCMTVERVTDAWIDGYGLGRSDEERKMNLVRDTCPGFISDGSGRVTWTNDAYRKMARDIIPVEEGAPEITSGDSFHVIVRLVMRERPMLTSPGFTCRMKLQYTCQNRERGSVTVPCDVWRMDVGGGFAWRLDVKAALCL

SEQ ID NO: 103296 - protein, 267 aa, Arabidopsis thaliana
  peptide (1)..(267): Ceres Seq. ID no. 13612441
MLRFRPIAPKPASPGGVNPVSSGDSGGGSSDVSFRSASRRKRKCHQLKENGGNAKRCTRRKTSDKPVVHGSANAVTLSLLPEKPIDLKAAVEKQKRQGPLWLSFKDGGGMLTPAYQTPEIVQRTVVISSCMTVERVTDAWIDGYGLGRSDEERKMNLVRDTCPGFISDGSGRVTWTNDAYRKMARDIIPVEEGAPEITSGDSFHVIVRLVMRERPMLTSPGFTCRMKLQYTCQNRERGSVTVPCDVWRMDVGGGFAWRLDVKAALCL

SEQ ID NO: 103297 - protein, 158 aa, Arabidopsis thaliana; identical to SEQ ID NO: 41862
  peptide (1)..(158): Ceres Seq. ID no. 13612442

SEQ ID NO: 103298 - DNA, 1573 bp, Arabidopsis thaliana
  misc_feature (1)..(1573): Ceres Seq. ID no. 13612443
  misc_feature (1)..(1573): Ortholog of  Ceres SEQ ID NO 14301471 as cited in SEQ ID NO 68064
  misc_feature (1)..(1573): Ortholog of  Ceres SEQ ID NO 13574418 as cited in SEQ ID NO 0
  misc_feature (1)..(1573): Ortholog of  Ceres SEQ ID NO 13600272 as cited in SEQ ID NO 0
acaaagatcatcacagccaattttagaaaacttctgacggaaaataaaaagagaggatttatttttatctttctgtgttaccggagaataaagacggtaccttttcactgttgacttaacggagaagatggcgactgttccggagataaagataatgagaagcgagagcttaggtcatcggagtgacgtgtcgagcccggaagctaagctagggatgcgtgtggaagatctctgggatgagcagaaaccacagctcagtcctaacgagaagctcaacgcttgctttgagagcatccctgtctctgctttccctctctcttctgattcacaagatattgagataagatcagacacaagtttggctgaagctgttcagacactatcgaaattcaaggtcttgagcgcgcctgttgtagatgttgatgcgcctgaagatgccagttggattgatcgctacatcggtattgtggaatttccaggcattgttgtctggcttttgcatcagttggagccaccatctccaaggagccctgctgttgcagcttcaaatggattttctcatgatttcaccaccgatgttctggataacggagattcagcagtaacttctggaaacttctttgaggtccttacttcttcagagctatacaagaacaccaaggttcgagatatctctggaacattccgctgggcaccgttcctggctctgcagaaagagaactcctttttgaccatgctgttacttctttctaaatacaaaatgaagagcatcccggtggttgatttaggtgtagcaaagatcgagaacattatcacacaatcaggagttatacatatgctggcagaatgcgcggggcttctctggtttgaggattggggaatcaaaactctctctgaagtcggtcttcccattatgtcaaaggaccatatcataaagatctatgaggatgaaccagttcttcaggcattcaagctgatgaggagaaagagaatcggaggcatacctgtcattgaaaggaatagcgagaagccagtaggcaacataagccttagagatgttcaatttctcctcactgcacctgagatctaccatgactacaggtcaatcacaacgaagaacttcttagtatctgttagagagcatcttgagaagtgcggggatacatcagctcctatcatgagtggtgtgattgcttgcacgaagaaccatacactaaaggaactgatcttgatgttagacgcggagaagatccataggatatatgttgtggatgattttggtaaccttgaaggactcatcactcttagagacatcattgcaagacttgtccatgagccatccggctattttggagatttctttgatggtgttatgcctcttcccgaaaactaccgagtctgagagaaaaatggtatctttcttctgtaaattgtcttttgtttggtgataatgcttctgtctgtttgtgcttaagttctcgaaattgtgttattaacgtttaacagaaataagaaaagaagaaagagcctgtctttgagtgaatatgtctgaaatacaataactcttaagatt

SEQ ID NO: 103299 - protein, 424 aa, Arabidopsis thaliana
  peptide (1)..(424): Ceres Seq. ID no. 13612444
MATVPEIKIMRSESLGHRSDVSSPEAKLGMRVEDLWDEQKPQLSPNEKLNACFESIPVSAFPLSSDSQDIEIRSDTSLAEAVQTLSKFKVLSAPVVDVDAPEDASWIDRYIGIVEFPGIVVWLLHQLEPPSPRSPAVAASNGFSHDFTTDVLDNGDSAVTSGNFFEVLTSSELYKNTKVRDISGTFRWAPFLALQKENSFLTMLLLLSKYKMKSIPVVDLGVAKIENIITQSGVIHMLAECAGLLWFEDWGIKTLSEVGLPIMSKDHIIKIYEDEPVLQAFKLMRRKRIGGIPVIERNSEKPVGNISLRDVQFLLTAPEIYHDYRSITTKNFLVSVREHLEKCGDTSAPIMSGVIACTKNHTLKELILMLDAEKIHRIYVVDDFGNLEGLITLRDIIARLVHEPSGYFGDFFDGVMPLPENYRV

SEQ ID NO: 103300 - protein, 415 aa, Arabidopsis thaliana
  peptide (1)..(415): Ceres Seq. ID no. 13612445
MRSESLGHRSDVSSPEAKLGMRVEDLWDEQKPQLSPNEKLNACFESIPVSAFPLSSDSQDIEIRSDTSLAEAVQTLSKFKVLSAPVVDVDAPEDASWIDRYIGIVEFPGIVVWLLHQLEPPSPRSPAVAASNGFSHDFTTDVLDNGDSAVTSGNFFEVLTSSELYKNTKVRDISGTFRWAPFLALQKENSFLTMLLLLSKYKMKSIPVVDLGVAKIENIITQSGVIHMLAECAGLLWFEDWGIKTLSEVGLPIMSKDHIIKIYEDEPVLQAFKLMRRKRIGGIPVIERNSEKPVGNISLRDVQFLLTAPEIYHDYRSITTKNFLVSVREHLEKCGDTSAPIMSGVIACTKNHTLKELILMLDAEKIHRIYVVDDFGNLEGLITLRDIIARLVHEPSGYFGDFFDGVMPLPENYRV

SEQ ID NO: 103301 - protein, 395 aa, Arabidopsis thaliana
  peptide (1)..(395): Ceres Seq. ID no. 13612446
MRVEDLWDEQKPQLSPNEKLNACFESIPVSAFPLSSDSQDIEIRSDTSLAEAVQTLSKFKVLSAPVVDVDAPEDASWIDRYIGIVEFPGIVVWLLHQLEPPSPRSPAVAASNGFSHDFTTDVLDNGDSAVTSGNFFEVLTSSELYKNTKVRDISGTFRWAPFLALQKENSFLTMLLLLSKYKMKSIPVVDLGVAKIENIITQSGVIHMLAECAGLLWFEDWGIKTLSEVGLPIMSKDHIIKIYEDEPVLQAFKLMRRKRIGGIPVIERNSEKPVGNISLRDVQFLLTAPEIYHDYRSITTKNFLVSVREHLEKCGDTSAPIMSGVIACTKNHTLKELILMLDAEKIHRIYVVDDFGNLEGLITLRDIIARLVHEPSGYFGDFFDGVMPLPENYRV

SEQ ID NO: 103302 - DNA, 1140 bp, Arabidopsis thaliana
  misc_feature (1)..(1140): Ceres Seq. ID no. 13612453
  misc_feature (1)..(1140): Ortholog of  Ceres SEQ ID NO 14305750 as cited in SEQ ID NO 52458
  misc_feature (1)..(1140): Ortholog of  Ceres SEQ ID NO 14314252 as cited in SEQ ID NO 57492
  misc_feature (1)..(1140): Ortholog of  Ceres SEQ ID NO 12608276 as cited in SEQ ID NO 57871
  misc_feature (1)..(1140): Ortholog of  Ceres SEQ ID NO 13598492 as cited in SEQ ID NO 63882
  misc_feature (1)..(1140): Ortholog of  Ceres SEQ ID NO 13657914 as cited in SEQ ID NO 66230
  misc_feature (1)..(1140): Ortholog of  Ceres SEQ ID NO 13595877 as cited in SEQ ID NO 67702
  misc_feature (1)..(1140): Ortholog of  Ceres SEQ ID NO 13622667 as cited in SEQ ID NO 0
acacacaccaatcttatcataactcaccaaccaatcaactaaccatggattccgagatcgccgtcgactgctctccattgctcaaaatctacaagagtggccgcatcgagcgactcatgggtgaagccaccgtcccaccttcttccgaaccacaaaacggagtcgtttccaaggacgttgtttattctgccgacaacaacctatccgtccgtatttacctcccggagaaagccgccgccgagaccgactcgaaactccctctcctcgtttacttccacggtggaggattcatcattgagacagctttctctccaacttaccacactttcctcacgacgtctgtctctgcgtcgaactgtgtagcggtctctgttgattaccgtcgtgcaccggagcatccgatctccgtcccgttcgatgattcttggacagctctcaaatgggtattcacccatatcactggatctggtcaagaagattggttaaacaaacatgctgacttcagcagagtgttcctctccggagacagtgcaggagcaaacatcgtgcatcacatggcgatgagagctgcgaaagagaaactcagtcctggtttgaacgatacaggaatctctggaatcatcttgcttcatccttacttctggtcgaaaacaccaatcgacgagaaggatacgaaagatgaaacgttgaggatgaagatagaggcgttttggatgatggcaagtcctaatagcaaagatggaacagatgatccgttgctcaacgtggtgcaatcagagtcggtggatttgtctgggttgggttgtggtaaggttttggtaatggtggctgagaaagatgcgttggtgaggcagggttggggttacgcggctaagcttgagaagtctggttggaaaggagaggttgaagtggtggagagtgaaggagaagatcatgtttttcatttgttgaaacctgaatgtgataatgctattgaagtcatgcataaattctcagggtttattaagggagggaactagctttgtgctctctagagatattggaataatttggtactacatattttagttgcgtctctcagtttctgtaatgtttcagtgattggcttttcgcccaaagcaacacaataaaaattgaaga

SEQ ID NO: 103303 - protein, 338 aa, Arabidopsis thaliana
  peptide (1)..(338): Ceres Seq. ID no. 13612454
THQSYHNSPTNQLTMDSEIAVDCSPLLKIYKSGRIERLMGEATVPPSSEPQNGVVSKDVVYSADNNLSVRIYLPEKAAAETDSKLPLLVYFHGGGFIIETAFSPTYHTFLTTSVSASNCVAVSVDYRRAPEHPISVPFDDSWTALKWVFTHITGSGQEDWLNKHADFSRVFLSGDSAGANIVHHMAMRAAKEKLSPGLNDTGISGIILLHPYFWSKTPIDEKDTKDETLRMKIEAFWMMASPNSKDGTDDPLLNVVQSESVDLSGLGCGKVLVMVAEKDALVRQGWGYAAKLEKSGWKGEVEVVESEGEDHVFHLLKPECDNAIEVMHKFSGFIKGGN

SEQ ID NO: 103304 - protein, 324 aa, Arabidopsis thaliana
  peptide (1)..(324): Ceres Seq. ID no. 13612455
MDSEIAVDCSPLLKIYKSGRIERLMGEATVPPSSEPQNGVVSKDVVYSADNNLSVRIYLPEKAAAETDSKLPLLVYFHGGGFIIETAFSPTYHTFLTTSVSASNCVAVSVDYRRAPEHPISVPFDDSWTALKWVFTHITGSGQEDWLNKHADFSRVFLSGDSAGANIVHHMAMRAAKEKLSPGLNDTGISGIILLHPYFWSKTPIDEKDTKDETLRMKIEAFWMMASPNSKDGTDDPLLNVVQSESVDLSGLGCGKVLVMVAEKDALVRQGWGYAAKLEKSGWKGEVEVVESEGEDHVFHLLKPECDNAIEVMHKFSGFIKGGN

SEQ ID NO: 103305 - protein, 300 aa, Arabidopsis thaliana
  peptide (1)..(300): Ceres Seq. ID no. 13612456
MGEATVPPSSEPQNGVVSKDVVYSADNNLSVRIYLPEKAAAETDSKLPLLVYFHGGGFIIETAFSPTYHTFLTTSVSASNCVAVSVDYRRAPEHPISVPFDDSWTALKWVFTHITGSGQEDWLNKHADFSRVFLSGDSAGANIVHHMAMRAAKEKLSPGLNDTGISGIILLHPYFWSKTPIDEKDTKDETLRMKIEAFWMMASPNSKDGTDDPLLNVVQSESVDLSGLGCGKVLVMVAEKDALVRQGWGYAAKLEKSGWKGEVEVVESEGEDHVFHLLKPECDNAIEVMHKFSGFIKGGN

SEQ ID NO: 103306 - DNA, 1405 bp, Arabidopsis thaliana
  misc_feature (1)..(1405): Ceres Seq. ID no. 13612461
  misc_feature (1)..(1405): Ortholog of  Ceres SEQ ID NO 15176375 as cited in SEQ ID NO 53238
  misc_feature (1)..(1405): Ortholog of  Ceres SEQ ID NO 15170532 as cited in SEQ ID NO 55671
  misc_feature (1)..(1405): Ortholog of  Ceres SEQ ID NO 14316507 as cited in SEQ ID NO 57397
  misc_feature (1)..(1405): Ortholog of  Ceres SEQ ID NO 13663060 as cited in SEQ ID NO 60964
  misc_feature (1)..(1405): Ortholog of  Ceres SEQ ID NO 13598532 as cited in SEQ ID NO 65204
  misc_feature (1)..(1405): Ortholog of  Ceres SEQ ID NO 13656849 as cited in SEQ ID NO 65764
  misc_feature (1)..(1405): Ortholog of  Ceres SEQ ID NO 13656501 as cited in SEQ ID NO 69206
ctcctctcttcaagcttttcacagaaaaccaccacccttctctctctactgcctttttaccacagagaagagagaggatccgtcggtgtgctagtctcactgacactacatccgatcgtcgccggtgacattttataagtgtggagtttacttcagctttattattcaggaattgatggatcagtacgagaaagttgagaagattggtgaaggaacttacggtgtggtttataaggcacgtgacaaagtgactaatgagacaattgctttgaagaagatcaggctagagcaggaggatgaaggtgttcctagcacagcaatcagagaaatctccctcttgaaagaaatgcagcacagcaacattgtcaaattgcaggatgtggtgcacagcgagaaacgtttgtatctggtttttgagtatcttgacttggatctcaaaaagcacatggattctactcctgatttctccaaggatctacatatgatcaaaacatatctttaccagattctccgtggaattgcgtattgccactctcatagggttctccatcgtgatctgaagccacagaatttgttgattgatcgccgcacaaactcactgaagcttgctgattttggactggccagagcattcggtatccctgtcaggacatttactcatgaggttgttactctctggtaccgagcaccagagatactcctaggatctcatcattactctacacctgttgatatttggtctgtggggtgcatatttgctgagatgatcagccaaaagcccttatttcctggagactccgagattgatcaactcttcaagattttcagaatcatgggaactccgtacgaggatacatggcgtggggtaacttctctaccggattataaatctgctttccctaaatggaaaccaacggacctagaaacttttgtccccaatctagatcccgatggagtcgatctcctttctaaaatgctgttaatggatccgaccaaaagaatcaacgcaagagccgccctggagcatgaatacttcaaggatcttggaggcatgccttagaaaggcataaaaccagtaatctccttcattctatatataattatcaatcctaagaaaatgaagaacaatattaatgggttttgtttattctttttctgagttcgtttcctacttatattctattacgaaaaaaaagaaagaagaagatttcgagtgtgtttttttttacttctaagcttttgagatcagtttcttgtatcttattttacccagaatatagtatttccctatatgaaatatggtttttgttttgcaaaatgaccatattatgcaacttctcagcttcttgattgtgccttgatagtgatcttttgaaatatatcccaaaaaacatcacttttttcg

SEQ ID NO: 103307 - protein, 294 aa, Arabidopsis thaliana [sequence omitted]

SEQ ID NO: 103308 - protein, 237 aa, Arabidopsis thaliana; identical to SEQ ID NO: 29230
  peptide (1)..(237): Ceres Seq. ID no. 13612463

SEQ ID NO: 103309 - protein, 204 aa, Arabidopsis thaliana; identical to SEQ ID NO: 29231
  peptide (1)..(204): Ceres Seq. ID no. 13612464

SEQ ID NO: 103310 - DNA, 1318 bp, Arabidopsis thaliana
  misc_feature (1)..(1318): Ceres Seq. ID no. 13612465
  misc_feature (1)..(1318): Ortholog of  Ceres SEQ ID NO 13585976 as cited in SEQ ID NO 0
gattctttgttcaattctgaattgagaaaatggcgattcgagatctgtctcttcggttttttagttcgactgatttgggaatgtgaagagatcagattgatttgttgacagagtcttgggggttttcaatcttattcctctagattttcgaaattcgattcctttacatcagatttcgcttaattctctgtcctaggtacaacaagaatggaagaagagtatgagagtcgtcgattgaggagatgggaagagttggacactgacatcttagtaagaattttccagaagtttagcgtctttgagttgacttcgggattagctcatgtttgtagaggatggagagctgcttgttgcgatccgattctttggaagacggtggatttgtcaaacatgagatctagtttcatcaagatcccattagagccttatgtctatgtggaacgccgatctgatgaggccctaacccgcatcctgaaactctccatgaaccttagcggaggaagcacgaggaccttgatttttcatttcaacttgttcttgagtgatgatcagcttacttacaccgcagaaaggtgtccagggttgagacgggtcgtcctaccggcttggaacagaataaagaagactggtatatgcaaagcgataagaatctggaaagatctagagtcactaacaatgccaagcatcgcaaacccgccttatctcttaacagaaattgccaagaactgcaagaattttaaagagctgaagatcatgggtccattcgaggtcttctttgcaaacacgctcatcacttgcctcccaaacatcaaaacactcagcatcagatgctcggcgataaagcgggaagcactgatgaaaatccttgacggattaccaagccttgaagtgctcaacatatcacactctcacctagtggagtacagcggttggcagcctcagcagaaggtgattgttagagagctcgataagacgataatggagaaaacagcaaggctaaagaaattcttgacttgcatggatcacaagacgtgtgtgatgtgtcagaggactgaaaacgatgaagggattgtgagatggtacaagtatgaggaaggagactggaaggttgatgaagtgagttctcttcatctttgatgtttctgctgtgatcattctctgtgaaggacttaacttgttattgttctcatctttgactgttgaattgtttatttctttgtgttgtttgttttgatttgaatcgtattatgtgtatatatctgtaggctatgccaatgaatgtctgtagtgatcaacttttgatcaccaccaaccttgc

SEQ ID NO: 103311 - protein, 309 aa, Arabidopsis thaliana; identical to SEQ ID NO: 37206
  peptide (1)..(309): Ceres Seq. ID no. 13612466

SEQ ID NO: 103312 - protein, 248 aa, Arabidopsis thaliana; identical to SEQ ID NO: 37207
  peptide (1)..(248): Ceres Seq. ID no. 13612467

SEQ ID NO: 103313 - protein, 217 aa, Arabidopsis thaliana; identical to SEQ ID NO: 37208
  peptide (1)..(217): Ceres Seq. ID no. 13612468

SEQ ID NO: 103314 - DNA, 1317 bp, Arabidopsis thaliana
  misc_feature (1)..(1317): Ceres Seq. ID no. 13612480
  misc_feature (1)..(1317): Ortholog of  Ceres SEQ ID NO 14309755 as cited in SEQ ID NO 20741
  misc_feature (1)..(1317): Ortholog of  Ceres SEQ ID NO 13638746 as cited in SEQ ID NO 59296
  misc_feature (1)..(1317): Ortholog of  Ceres SEQ ID NO 13596474 as cited in SEQ ID NO 62169
  misc_feature (1)..(1317): Ortholog of  Ceres SEQ ID NO 13598714 as cited in SEQ ID NO 62656
  misc_feature (1)..(1317): Ortholog of  Ceres SEQ ID NO 13596969 as cited in SEQ ID NO 63375
  misc_feature (1)..(1317): Ortholog of  Ceres SEQ ID NO 13597519 as cited in SEQ ID NO 64759
  misc_feature (1)..(1317): Ortholog of  Ceres SEQ ID NO 13587054 as cited in SEQ ID NO 0
aaaaggaaactattcgtttgctgttctagataaaagcctttaattgagaaaaagaaaatgcctccagctttgacccgttttgcctataaaaggattctctaagatatggactttcctcatcttctcgggtaaacagaatcaactagttttgtttttcctctttcaaaaatgcatttctcttcgtcttcaacatcgtccacttggacaatcttaatcacattgggatgtcttatgcttcatgcatctttgtccgctgctcaactcacccctaccttctacgataggtcatgtcctaatgtcactaacatcgtacgagaaaccattgtaaatgagttaaggtcggaccctcgtatcgctgcgagcatccttcgtcttcacttccacgactgctttgttaatggttgtgacgcatccatcttgttagacaacacgacatcatttcgaacagagaaagatgcgtttggaaacgcaaattcggctcggggatttccagtgattgatagaatgaaagctgcggtggagagggcatgcccaagaaccgtttcatgcgcagatatgctcaccattgcagctcaacaatctgtcactttggcaggaggtccttcttggagggttcctttgggaaggagagacagtttacaagcattcctggaactcgctaatgcaaatcttccagctccattctttacacttccacaacttaaagccagcttcagaaatgttggtctcgatcgtccttctgatctcgttgctctctccggtggtcacacatttggtaaaaatcaatgtcagtttattcttgacagattatacaatttcagcaacacaggtttacccgaccctacactcaacactacttacctccaaactcttcgtggactatgcccccttaatggcaatcgaagtgccttggtagattttgatctacgtacgcctacggttttcgacaacaaatactacgtgaatctcaaagagcgaaaaggtcttatccagagcgaccaagagttgttctctagccccaatgccactgacacaatccccttggtgagagcatatgctgatggcacacaaacattcttcaatgcatttgtggaggcaatgaataggatgggaaacattacaccaactacaggaactcaaggacaaatcagattgaactgtagagttgtgaactccaactctctgctccatgatgtggtggatatcgttgactttgttagctctatgtgagaattgtttacccaatatgtggctacaagaatacatatatattaatgaataaaactctcaagacgtttacttgagaacatttatttt

SEQ ID NO: 103315 - protein, 353 aa, Arabidopsis thaliana; identical to SEQ ID NO: 25028
  peptide (1)..(353): Ceres Seq. ID no. 13612481

SEQ ID NO: 103316 - protein, 332 aa, Arabidopsis thaliana; identical to SEQ ID NO: 25029
  peptide (1)..(332): Ceres Seq. ID no. 13612482

SEQ ID NO: 103317 - protein, 241 aa, Arabidopsis thaliana; identical to SEQ ID NO: 25030
  peptide (1)..(241): Ceres Seq. ID no. 13612483

SEQ ID NO: 103318 - DNA, 2020 bp, Arabidopsis thaliana
  misc_feature (1)..(2020): Ceres Seq. ID no. 13612484
  misc_feature (1)..(2020): Ortholog of  Ceres SEQ ID NO 13594037 as cited in SEQ ID NO 55666
  misc_feature (1)..(2020): Ortholog of  Ceres SEQ ID NO 13657707 as cited in SEQ ID NO 66407
gtaaatcaaaagagaactaaaccaagaaacaaaatgggatacgaaaggctcggaccatccggagcaactggttcggtcaccacctccactactacagctccaatccttaaccaagtctccacgtcagagcaaccggagaacaacaaccgaagaagcaaaaagaagcttgtcgtatcatcaatcgtcttagccatctcacttatcctcgccgccgcgatcttcgccggagtcagatcacgtctcaagttaaaccaatcagtcccaggcctagctcgtaaaccgagtcaagcaatctctaaagcttgtgagttaactcgtttccccgagttatgcgttgactcactcatggactttcccggctcactcgccgcttcctcctctaaagatctcatccacgtgactgtgaacatgacgctccaccacttcagccacgctctctactcctctgcttccctctccttcgtcgacatgccgccacgtgctcgctcagcttacgactcttgcgtcgagctacttgacgattccgttgacgcgctatcacgcgctctttcctccgtcgtatcctcctccgctaagccgcaagatgttacaacgtggcttagcgcggctttaacaaaccatgacacgtgtactgaaggattcgacggcgtcgacgacggtggagtgaaggatcatatgacggcggcgttacagaatctttctgagcttgttagtaactgtcttgctatattctcggcgagtcacgacggtgacgatttcgccggagttccaatacagaacaggaggctgctgggagtggaggaacgagaagagaaattcccgagatggatgagaccaaaagaacgcgagatactggaaatgccggtatctcagatacaagctgatattatcgtatcgaaagacggtaacggcacgtgcaaaactatatcggaagctatcaagaaagctcctcagaacagtactcgccggataattatctacgtcaaggccggaagatatgaagagaacaacctcaaggtcggtaggaaaaaaattaatttgatgttcgttggagatggcaagggtaaaactgttatttcgggaggcaaaagtatatttgacaacatcactactttccacacggcgtcatttgctgcgaccggagctggatttattgcaagggacatcacattcgaaaactgggccggtccagcgaagcaccaagccgtggctctccgcatcggagctgaccacgcagtgatctaccgatgcaatataatcggttaccaagacacactctacgtccattcaaaccgccaattctttcgtgaatgcgatatctacggtacagtcgattttatctttggtaacgcagccgtcgtactacaaaactgtagcatctacgcacggaagccaatggattttcagaaaaatacaatcacggctcaaaacagaaaagatccgaaccaaaacaccggaatatcaatacatgcgtctagggttcttgcagcatccgatctccaagcgacaaacggtagtacacagacgtatctaggccgaccttggaagctattctctaggacagtgtatatgatgtcgtatatcggtggtcatgtacacacgagaggttggctcgagtggaacacaacatttgctttagatactttgtattatggagagtatttgaacagtggacctgggtcgggtctcgggcaacgtgtgagctggccgggttatcgggtcatcaattcgacggccgaggcaaaccggttcactgtggcagaatttatatacggttcctcgtggttgccatcgaccggagtttcgttcttggccggattaagcatataggtagagaaaaaattgaaatgcttatttttccgatgaattgtttcattcttacggtccttatattaatggacatatcagtattccaatatatatgagtatattttaacttttaattgtaatgtctccactctccagaggtattatttaataatagatgaacactcgaggataattttcccttgttttcttg

SEQ ID NO: 103319 - protein, 609 aa, Arabidopsis thaliana; identical to SEQ ID NO: 38612
  peptide (1)..(609): Ceres Seq. ID no. 13612485

SEQ ID NO: 103320 - protein, 598 aa, Arabidopsis thaliana; identical to SEQ ID NO: 27422
  peptide (1)..(598): Ceres Seq. ID no. 13612486

SEQ ID NO: 103321 - protein, 494 aa, Arabidopsis thaliana; identical to SEQ ID NO: 27423
  peptide (1)..(494): Ceres Seq. ID no. 13612487

SEQ ID NO: 103322 - DNA, 1024 bp, Arabidopsis thaliana
  misc_feature (1)..(1024): Ceres Seq. ID no. 13612499
  misc_feature (1)..(1024): Ortholog of  Ceres SEQ ID NO 12609394 as cited in SEQ ID NO 52095
cacttggaaagaatccttcactcactttccctttaagaagcaagtctcctccacttgtacgataccaacatcatcagcatcacaaaaagtatcattatcatcttcatcgaattagatggcaccggtgaagaggagggtgttcaagacaaataatgaaatggcagtggagctggccaaatacacggctgatctttcctccaaattttgcaaagaaagaggagttttcaccgttgttctctccggcggcgacctcatagcctggctctggaaattgttagaagctccttatattgattcaattgagtggtctaagtggcacatcttttgggtcgacgagagggtttgtgcttgggatcatgcggatagcaactataaactcgcttacgatggttttctctccaaggttccagttccagctgaaaacatctacgctatcgataacggactcggggcagaaggcaacgccgagctagcagctgaaaggtacgaggagtgcctcaaacaaaaagtgaaccaaaacataatccgaacgtacaaatcttctggttttccacagttcgatcttcagcttctaggtatgggaccggacggtcacatggcgtctctattccctggacatgctcagatcaatgagaaggtgaaatgggtcacatctataaccgattcacctaagccaccgtcaaaaaggatcacattgactttaccggttatcaattgtgcttcctataatgttatggccgtatgtgataaagagcaggctgattcggttgcggctgctcttaatcataccaaagacttaccagctggtagactaaccgcggatgttgaagtggtttggttccttgaccaagctgctgcgtctaaactccctcatggctggtgctccatcctttgatttaaacgtttatgtttttgtctcactaagtcgtatggtttggtgttttgtaaaccgtgtattgcttaattacttgttatgttgtgtagcaacaccatattgtgatattgatcttggtgactttggttt

SEQ ID NO: 103323 - protein, 259 aa, Arabidopsis thaliana; identical to SEQ ID NO: 39589
  peptide (1)..(259): Ceres Seq. ID no. 13612500

SEQ ID NO: 103324 - protein, 245 aa, Arabidopsis thaliana; identical to SEQ ID NO: 39590
  peptide (1)..(245): Ceres Seq. ID no. 13612501

SEQ ID NO: 103325 - DNA, 1334 bp, Arabidopsis thaliana
  misc_feature (1)..(1334): Ceres Seq. ID no. 13612510
  misc_feature (1)..(1334): Ortholog of  Ceres SEQ ID NO 13590233 as cited in SEQ ID NO 64652
atattaaaccactgtaactgtaatttattgtttcgccgtcccggaatgttcctgttgaaatccattttcgctgattttttttcttccgtctcttcttcagcttcgaccattttcgtcttcttcattcagtgttgagtcctcgtttacctgtgagctcgaagaaagtgacgatcaatgggaaccctaggcagagcattttactcggtcggtttttggatccgtgagactggtcaagctcttgatcgcctcggttgtcgccttcaaggcaaaaattacttccgagaacaactgtcaaggcatcggacactgatgaatgtatttgataaggctccgattgtggacaaggaagcttttgtggcaccaagcgcctcagttattggggacgttcacattggaagaggatcgtccatttggtatggatgcgtattacgaggcgatgtgaacaccgtaagtgttgggtcaggaactaatattcaggacaactcacttgtgcatgtggcaaaatcaaacttaagcgggaaggtgcacccaaccataattggagacaatgtaaccattggtcatagtgctgttttacatggatgtactgttgaggatgagacctttattgggatgggtgcgacacttcttgatggggtcgttgttgaaaagcatgggatggttgctgctggtgcacttgtacgacaaaacaccagaattccttctggagaggtatggggaggaaacccagcaaggttcctcaggaagctcactgatgaggaaattgcttttatctctcagtcagcaacaaactactcaaacctcgcacaggctcacgctgcagagaatgcaaagccattaaatgtgattgagttcgagaaggttctacgcaagaagcatgctctaaaggacgaggagtatgactcaatgctcggaatagtgagagaaactccaccagagcttaacctccctaacaacatactgcctgataaagaaaccaagcgtccttctaatgtgaactgatttttcaggggtatgttttctggccgaagccctacagggtgagatactcaaggggattatgtttcggtctctggtttgaatatggcaggtagagtacattagggtagacggatttacagcttttgaagaagctatgttcaacattttttcatggtttcttagggagtattattgtctaatcaaactttgtatgttatcacttcggtcttttgaacgtaagaatcaagttcatgaaacatgagtgaatattagtctgatgcatgtgcgtatgcaaaaatccatgtgcgcctatgttgctaggcaagcatgaagaataaagatccaaactggat

SEQ ID NO: 103326 - protein, 275 aa, Arabidopsis thaliana
  peptide (1)..(275): Ceres Seq. ID no. 13612511
MGTLGRAFYSVGFWIRETGQALDRLGCRLQGKNYFREQLSRHRTLMNVFDKAPIVDKEAFVAPSASVIGDVHIGRGSSIWYGCVLRGDVNTVSVGSGTNIQDNSLVHVAKSNLSGKVHPTIIGDNVTIGHSAVLHGCTVEDETFIGMGATLLDGVVVEKHGMVAAGALVRQNTRIPSGEVWGGNPARFLRKLTDEEIAFISQSATNYSNLAQAHAAENAKPLNVIEFEKVLRKKHALKDEEYDSMLGIVRETPPELNLPNNILPDKETKRPSNVN

SEQ ID NO: 103327 - protein, 230 aa, Arabidopsis thaliana
  peptide (1)..(230): Ceres Seq. ID no. 13612512
MNVFDKAPIVDKEAFVAPSASVIGDVHIGRGSSIWYGCVLRGDVNTVSVGSGTNIQDNSLVHVAKSNLSGKVHPTIIGDNVTIGHSAVLHGCTVEDETFIGMGATLLDGVVVEKHGMVAAGALVRQNTRIPSGEVWGGNPARFLRKLTDEEIAFISQSATNYSNLAQAHAAENAKPLNVIEFEKVLRKKHALKDEEYDSMLGIVRETPPELNLPNNILPDKETKRPSNVN

SEQ ID NO: 103328 - DNA, 1463 bp, Arabidopsis thaliana
  misc_feature (1)..(1463): Ceres Seq. ID no. 13612517
  misc_feature (1)..(1463): Ortholog of  Ceres SEQ ID NO 14304654 as cited in SEQ ID NO 53301
  misc_feature (1)..(1463): Ortholog of  Ceres SEQ ID NO 15172291 as cited in SEQ ID NO 55046
  misc_feature (1)..(1463): Ortholog of  Ceres SEQ ID NO 13658153 as cited in SEQ ID NO 66326
  misc_feature (1)..(1463): Ortholog of  Ceres SEQ ID NO 14303011 as cited in SEQ ID NO 67226
agagggagagagatggaggtaatgcgagttcttcacatgaacaaaggaaacggtgaaacgagttatgccaagaactccaccgctcagagtaacataatatctctaggcagaagagtaatggacgaggccttgaagaagttaatgatgagcaattcagagatttcgagcattggaatcgccgacttaggctgctcctccggtccgaacagtctcttgtccatctccaacatagttgacacgatccacaacttgtgtcctgacctcgaccgtcctgtccctgagctcagagtctctctgaacgacctccctagcaatgacttcaactacatatgtgcttctttgccagagttttacgaccgggttaataataacaaggagggtttagggttcggtcgtggaggaggagaatcgtgttttgtgtcggccgtcccaggttcgttctacggacgtttgtttcctcgccggagccttcactttgtgcattcttcttctagtttacattggttatctcaggttccatgtcgtgaggcggagaaggaagacaggacaataacagctgatttagaaaacatggggaaaatatacatatcaaagacaagtcctaagagtgcacataaagcttatgctcttcaattccaaactgatttctgggtttttttgagatcgcgatctgaggagttggtcccgggaggccgaatggttttatcgttccttggtagaagatcactggatcccacaaccgaagagagttgctatcaatgggaactcctagctcaagctcttatgtccatggccaaagagggtatcatcgaggaagagaagatcgatgctttcaacgctccttactatgctgcgagctccgaagagttgaaaatggtgatagagaaagaagggtcattttcgatcgataggcttgagataagtccgattgattgggaaggtgggagtatcagtgaggagagttatgaccttgtaataaggtccaaacccgaagccctagctagtggccgaagagtgtctaataccataagagctgtggtcgagccgatgctagaacctactttcggtgaaaatgtgatggacgagctttttgaaaggtatgcaaagatcgtgggagagtacttctatgtaagctcgccacgatacgctattgttattctttcgctcgttagagccggttgatcgtgttataacatatgccaatatacatgtctttgggcctacaatgacatgatttggtagttttctaatcaagcatatgtaatataatttgcttcgagaataaaataataaaataaagtctgatgttacggtagacccttttttttttttttttttcatttacggtagacctatagtattaaaacaaatagaatcagctggttcggaccttgaaatgagagagcttggatgcatgtagacgcattagtcgtgaattattcaaatagaactaccttttgggc

SEQ ID NO: 103329 - protein, 393 aa, Arabidopsis thaliana
  peptide (1)..(393): Ceres Seq. ID no. 13612518
RGREMEVMRVLHMNKGNGETSYAKNSTAQSNIISLGRRVMDEALKKLMMSNSEISSIGIADLGCSSGPNSLLSISNIVDTIHNLCPDLDRPVPELRVSLNDLPSNDFNYICASLPEFYDRVNNNKEGLGFGRGGGESCFVSAVPGSFYGRLFPRRSLHFVHSSSSLHWLSQVPCREAEKEDRTITADLENMGKIYISKTSPKSAHKAYALQFQTDFWVFLRSRSEELVPGGRMVLSFLGRRSLDPTTEESCYQWELLAQALMSMAKEGIIEEEKIDAFNAPYYAASSEELKMVIEKEGSFSIDRLEISPIDWEGGSISEESYDLVIRSKPEALASGRRVSNTIRAVVEPMLEPTFGENVMDELFERYAKIVGEYFYVSSPRYAIVILSLVRAG

SEQ ID NO: 103330 - protein, 389 aa, Arabidopsis thaliana; identical to SEQ ID NO: 74636
  peptide (1)..(389): Ceres Seq. ID no. 13612519

SEQ ID NO: 103331 - protein, 386 aa, Arabidopsis thaliana; identical to SEQ ID NO: 74637
  peptide (1)..(386): Ceres Seq. ID no. 13612520

SEQ ID NO: 103332 - DNA, 1055 bp, Arabidopsis thaliana
  misc_feature (1)..(1055): Ceres Seq. ID no. 13612541
  misc_feature (1)..(1055): Ortholog of  Ceres SEQ ID NO 13656486 as cited in SEQ ID NO 69202
ttaatcacacatttgatctgagcgagggagagagagaaagagatcttgtccgaacgatgaaggcggagaagaatccgattcagtccgtaatggcgtggattcgccggcaaccgccaaaagtaaaggcttttcttggcgtggtaacggcaatgacggtgcttgttctcctcagggtgattgttcatgaacacgacaatcttttcgtcgcttctgaggctgtacatgccgttggtatcgctgttcttatctataagctcacaaaggagaagacttgtgctgggatatctctcaagacacaggagctaacggctttgtttctggctgtgagattgtattgtagctttgtaatggagtttgatcttcatacatttcttgattcagctactttggtgaccactctttgggtcgtttatatgatccgtttcaagcttagacctacttatatggaagataaagacaattttgctatctatttcgtcgtaatcccatgtgctgttctgtctttcttcattcatccatcaacacgtcaccacatcataaacaggatttcttgggcattctgtgtttatcttgaagctgtttcagttcttcctcaattaagagtcatgcagaacactaagattgtggaaccattcactgcacattacgtatttgctttgggaattgctaggttcttgagttgtgcacactggatccttcaggtgttggatacgcgagggcggttactgactgcattagggtctggactgtggcctgtaatggtcctcatctctgaaatagtccaaaccttcattcttgcagatttctgctattactatgttcagagtttaatgggtggacagctcgttcttcgactcccgtctggtgtggtgtaaaaagctctgcgaaaatggagtgcttgagcttgtggagaggtttaatgattagggattttgagacactcgtatgatttaaaagtttttgatagcaaagaagcattaatgttaattcagattttagttgtgatgacgttttgactccacgatcatatgatttgatacacaacgcttacagtt

SEQ ID NO: 103333 - protein, 290 aa, Arabidopsis thaliana
  peptide (1)..(290): Ceres Seq. ID no. 13612542
NHTFDLSEGERERDLVRTMKAEKNPIQSVMAWIRRQPPKVKAFLGVVTAMTVLVLLRVIVHEHDNLFVASEAVHAVGIAVLIYKLTKEKTCAGISLKTQELTALFLAVRLYCSFVMEFDLHTFLDSATLVTTLWVVYMIRFKLRPTYMEDKDNFAIYFVVIPCAVLSFFIHPSTRHHIINRISWAFCVYLEAVSVLPQLRVMQNTKIVEPFTAHYVFALGIARFLSCAHWILQVLDTRGRLLTALGSGLWPVMVLISEIVQTFILADFCYYYVQSLMGGQLVLRLPSGVV

SEQ ID NO: 103334 - protein, 272 aa, Arabidopsis thaliana
  peptide (1)..(272): Ceres Seq. ID no. 13612543
MKAEKNPIQSVMAWIRRQPPKVKAFLGVVTAMTVLVLLRVIVHEHDNLFVASEAVHAVGIAVLIYKLTKEKTCAGISLKTQELTALFLAVRLYCSFVMEFDLHTFLDSATLVTTLWVVYMIRFKLRPTYMEDKDNFAIYFVVIPCAVLSFFIHPSTRHHIINRISWAFCVYLEAVSVLPQLRVMQNTKIVEPFTAHYVFALGIARFLSCAHWILQVLDTRGRLLTALGSGLWPVMVLISEIVQTFILADFCYYYVQSLMGGQLVLRLPSGVV

SEQ ID NO: 103335 - protein, 261 aa, Arabidopsis thaliana
  peptide (1)..(261): Ceres Seq. ID no. 13612544
MAWIRRQPPKVKAFLGVVTAMTVLVLLRVIVHEHDNLFVASEAVHAVGIAVLIYKLTKEKTCAGISLKTQELTALFLAVRLYCSFVMEFDLHTFLDSATLVTTLWVVYMIRFKLRPTYMEDKDNFAIYFVVIPCAVLSFFIHPSTRHHIINRISWAFCVYLEAVSVLPQLRVMQNTKIVEPFTAHYVFALGIARFLSCAHWILQVLDTRGRLLTALGSGLWPVMVLISEIVQTFILADFCYYYVQSLMGGQLVLRLPSGVV

SEQ ID NO: 103336 - DNA, 1391 bp, Arabidopsis thaliana
  misc_feature (1)..(1391): Ceres Seq. ID no. 13612549
  misc_feature (1)..(1391): Ortholog of  Ceres SEQ ID NO 15176596 as cited in SEQ ID NO 55168
  misc_feature (1)..(1391): Ortholog of  Ceres SEQ ID NO 14301576 as cited in SEQ ID NO 62362
acgagatactctcttcttaaaacctcatccacccaaacacaaatgtcttgtaatccttctcttatctttctccttgtgattcctttttatattcctctgatattttctctcagtttgatctcatttgctctgcaatggcgactaccatgaatgctgctgtttctctcacatcttcaaactcttcttcttttcccgctacaagttgtgccattgctcctgaaaggatcaggtttactaagggtgctttttactacaaaagcaacaatgtagtgacaggtaaaagagtgttttccataaaagcacaaatcacaacagaaacagatactcctactcctgcaaagaaagtagagaaagtgtcaaagaagaacgaggaaggtgtgattgttaacaggtacagaccaaaagagccttacactggaaaatgccttctcaacaccaaaatcacagctgatgatgctcctggagagacctggcacatggttttcagccatcaaggagaaatcccgtacagagaaggacaatctgttggtgtgattgcagatggaattgacaagaatggaaagcctcacaaggtcagactttactccattgcaagcagcgctcttggagatctcggcaattctgaaaccgtttctttgtgtgttaaaagacttgtttatactaatgaccaaggagagactgttaaaggagtttgctcaaatttcttgtgtgatttggcacccggaagtgatgttaagctgactggtcctgtaggcaaagaaatgcttatgccaaaggatccaaacgccaccgttattatgcttgccacagggacaggaattgctcctttcaggtctttcttatggaagatgttctttgagaaacatgatgactacaagttcaatggcttagcttggttgttcttgggtgtaccaaccactagctctttgctctaccaagaggagtttgataagatgaaagcaaaggcccccgagaacttcagggtggattacgcgataagcagagaacaagcgaacgataaaggagagaaaatgtatatccagactcggatggcgcaatacgcagctgagttatgggagttgttgaagaaagacaacacttttgtttacatgtgtggactcaagggaatggagaaaggaattgatgacattatggtctcattggctgcaaatgacggtattgactggtttgattacaagaagcagttgaagaaggcagagcaatggaacgttgaagtctactgatcaaaaagcctttgacatttctgtagcaaagtatagctgaacaaaactgtaattttcgcttctgaatttctgtattttgaagataagttttttagatatgttatactaaaaaaagagttctttaatcattatcatttacttcttccc

SEQ ID NO: 103337 - protein, 369 aa, Arabidopsis thaliana; identical to SEQ ID NO: 31087
  peptide (1)..(369): Ceres Seq. ID no. 13612550

SEQ ID NO: 103338 - protein, 365 aa, Arabidopsis thaliana; identical to SEQ ID NO: 31088
  peptide (1)..(365): Ceres Seq. ID no. 13612551

SEQ ID NO: 103339 - protein, 255 aa, Arabidopsis thaliana; identical to SEQ ID NO: 31089
  peptide (1)..(255): Ceres Seq. ID no. 13612552

SEQ ID NO: 103340 - DNA, 1334 bp, Arabidopsis thaliana
  misc_feature (1)..(1334): Ceres Seq. ID no. 13612560
  misc_feature (1)..(1334): Ortholog of  Ceres SEQ ID NO 15169300 as cited in SEQ ID NO 59572
  misc_feature (1)..(1334): Ortholog of  Ceres SEQ ID NO 15176407 as cited in SEQ ID NO 59620
  misc_feature (1)..(1334): Ortholog of  Ceres SEQ ID NO 13596876 as cited in SEQ ID NO 62696
  misc_feature (1)..(1334): Ortholog of  Ceres SEQ ID NO 13655442 as cited in SEQ ID NO 64359
  misc_feature (1)..(1334): Ortholog of  Ceres SEQ ID NO 14303652 as cited in SEQ ID NO 67569
attagaaggaaaaatcatttatgagtgaaatagaaatttgatatctctttattagtttctgcatctcgaggggtttttgggattctctgattcgatcgagttctatttgtcgttgtgtacaacatctcgggtggatctttgttgatggcgaaactgagacactcgcgatttcaagcgaggaaatggtcgacattgatgctggttctgtttatgttgtttatgttaacgattgttctcttaatgcttttggctttcggagttttctctcttcctattaacaacgatgaatcctctcctatcgatctctcttatttccgacgagctgccactgagagaagtgaaggacttgggaagagaggagaccagtggactgaagtgctttcttgggaacctagagcttttgtctaccacaatttcttgtcgaaggaagaatgtgaatatttaatcagtcttgcaaaaccacatatggtgaagtcaactgttgtagatagcgaaaccggcaagagcaaagatagcagggtgcgaacaagctcagggactttccttaggagaggaagggacaaaatcattaagaccattgagaaaagaatagcagattacacctttattcctgcagatcatggtgaaggacttcaagttcttcactacgaagcagggcaaaagtatgaaccacactatgattattttgttgatgagttcaacactaaaaatggaggtcaacggatggctacaatgcttatgtatctgtcggatgttgaggaaggcggtgaaacagtgtttcctgctgccaatatgaattttagttctgtaccatggtataatgagctctctgagtgtgggaaaaagggactttccgtaaagccgagaatgggtgatgcattgcttttctggagcatgaggcctgatgctacactagatcctacaagtttgcatggtggatgtcctgtgattagagggaacaagtggtcatctaccaaatggatgcatgttggcgagtacaaaatctagcgtgtttggtttctggacagtaaactgtttcctttcatggtggatgggatgcaaagttggaactagaaattacagagagttgatgtttgttttttccctgcggctcggtgcattccttgctttgatgggattcaaggtttatcattagagaataccaaaagatagagattttgttagagtaaattaggatggcttagagtgactcttactcattggtatacccataaaggtcttgtgtctttgaacaagagttgtgaattacatagttttgtggtattcttttgttttgtttgtgattagaaacataatcaaattaaaaattgtta

SEQ ID NO: 103341 - protein, 287 aa, Arabidopsis thaliana
  peptide (1)..(287): Ceres Seq. ID no. 13612561
MAKLRHSRFQARKWSTLMLVLFMLFMLTIVLLMLLAFGVFSLPINNDESSPIDLSYFRRAATERSEGLGKRGDQWTEVLSWEPRAFVYHNFLSKEECEYLISLAKPHMVKSTVVDSETGKSKDSRVRTSSGTFLRRGRDKIIKTIEKRIADYTFIPADHGEGLQVLHYEAGQKYEPHYDYFVDEFNTKNGGQRMATMLMYLSDVEEGGETVFPAANMNFSSVPWYNELSECGKKGLSVKPRMGDALLFWSMRPDATLDPTSLHGGCPVIRGNKWSSTKWMHVGEYKI

SEQ ID NO: 103342 - protein, 270 aa, Arabidopsis thaliana
  peptide (1)..(270): Ceres Seq. ID no. 13612562
MLVLFMLFMLTIVLLMLLAFGVFSLPINNDESSPIDLSYFRRAATERSEGLGKRGDQWTEVLSWEPRAFVYHNFLSKEECEYLISLAKPHMVKSTVVDSETGKSKDSRVRTSSGTFLRRGRDKIIKTIEKRIADYTFIPADHGEGLQVLHYEAGQKYEPHYDYFVDEFNTKNGGQRMATMLMYLSDVEEGGETVFPAANMNFSSVPWYNELSECGKKGLSVKPRMGDALLFWSMRPDATLDPTSLHGGCPVIRGNKWSSTKWMHVGEYKI

SEQ ID NO: 103343 - protein, 265 aa, Arabidopsis thaliana
  peptide (1)..(265): Ceres Seq. ID no. 13612563
MLFMLTIVLLMLLAFGVFSLPINNDESSPIDLSYFRRAATERSEGLGKRGDQWTEVLSWEPRAFVYHNFLSKEECEYLISLAKPHMVKSTVVDSETGKSKDSRVRTSSGTFLRRGRDKIIKTIEKRIADYTFIPADHGEGLQVLHYEAGQKYEPHYDYFVDEFNTKNGGQRMATMLMYLSDVEEGGETVFPAANMNFSSVPWYNELSECGKKGLSVKPRMGDALLFWSMRPDATLDPTSLHGGCPVIRGNKWSSTKWMHVGEYKI

SEQ ID NO: 103344 - DNA, 1469 bp, Arabidopsis thaliana
  misc_feature (1)..(1469): Ceres Seq. ID no. 13612564
  misc_feature (1)..(1469): Ortholog of  Ceres SEQ ID NO 13495070 as cited in SEQ ID NO 53216
  misc_feature (1)..(1469): Ortholog of  Ceres SEQ ID NO 15176717 as cited in SEQ ID NO 0
agattaaaaactctttaaaaactttttgtcataaatcaggcaaagaagtaaaagagacttaaaactctctctctctctctcttggtcttcctcactcttaacgaaaatggactctttaacactcttcttcaccggtgcactcgtcgccgtcggtatctactggttcctctgcgttctcggtccagcagagcgtaaaggcaaacgagccgtagatctctctggtggctcaatctccgccgagaaagtccaagacaactacaaacagtactggtctttcttccgccgtccaaaagaaatcgaaaccgccgagaaagttccagacttcgtcgacacattctacaatctcgtcaccgacatatacgagtggggatggggacaatccttccacttctcaccatcaatccccggaaaatctcacaaagacgccacgcgcctccacgaagagatggccgtagatctgatccaagtcaaacctggtcaaaagatcctagacgtcggatgcggtgtcggcggtccgatgcgagcgattgcatctcactcgcgagctaacgtagtcgggattacaataaacgagtatcaggtgaacagagctcgtctccacaataagaaagctggtctcgacgcgctttgcgaggtcgtgtgtggtaacttcctccagatgccgttcgatgacaacagtttcgacggtgcttattccatcgaagccacgtgtcacgcgccgaagctggaagaagtgtacgcagagatctacagggtgttgaaacccggatctatgtatgtgtcgtacgagtgggttacgacggagaaatttaaggcggaggatgacgaacacgtggaggtaatccaagggattgagagaggcgatgcgttaccagggcttagggcttacgtggatatagctgagacggctaaaaaggttgggtttgagatagtgaaggagaaggatctggcgagtccaccggctgagccgtggtggactaggcttaagatgggtaggcttgcttattggaggaatcacattgtggttcagattttgtcagcggttggagttgctcctaaaggaactgttgatgttcatgagatgttgtttaagactgctgattatttgaccagaggaggtgaaaccggaatattctctccgatgcatatgattctctgcagaaaaccggagtcaccggaggagagttcttgagaaaggtagaaaggaaacatcaccggaaaaagtatggagaattttctcaatttgtttttatttttaagttaaatcaacttggttattgtactatttttgtgttttaatttggtttgtgtttcaagaattattagtttttttttgttttgttgcatatgagaatcttactcttgatttctccgccgtagtgccggcgagacataggggattattagtatttttaagtgtgtttaagattgattaacaagttagtaaaataaaatgtacttaggtgtcg

SEQ ID NO: 103345 - protein, 361 aa, Arabidopsis thaliana
  peptide (1)..(361): Ceres Seq. ID no. 13612565
MDSLTLFFTGALVAVGIYWFLCVLGPAERKGKRAVDLSGGSISAEKVQDNYKQYWSFFRRPKEIETAEKVPDFVDTFYNLVTDIYEWGWGQSFHFSPSIPGKSHKDATRLHEEMAVDLIQVKPGQKILDVGCGVGGPMRAIASHSRANVVGITINEYQVNRARLHNKKAGLDALCEVVCGNFLQMPFDDNSFDGAYSIEATCHAPKLEEVYAEIYRVLKPGSMYVSYEWVTTEKFKAEDDEHVEVIQGIERGDALPGLRAYVDIAETAKKVGFEIVKEKDLASPPAEPWWTRLKMGRLAYWRNHIVVQILSAVGVAPKGTVDVHEMLFKTADYLTRGGETGIFSPMHMILCRKPESPEESS

SEQ ID NO: 103346 - protein, 248 aa, Arabidopsis thaliana
  peptide (1)..(248): Ceres Seq. ID no. 13612566
MAVDLIQVKPGQKILDVGCGVGGPMRAIASHSRANVVGITINEYQVNRARLHNKKAGLDALCEVVCGNFLQMPFDDNSFDGAYSIEATCHAPKLEEVYAEIYRVLKPGSMYVSYEWVTTEKFKAEDDEHVEVIQGIERGDALPGLRAYVDIAETAKKVGFEIVKEKDLASPPAEPWWTRLKMGRLAYWRNHIVVQILSAVGVAPKGTVDVHEMLFKTADYLTRGGETGIFSPMHMILCRKPESPEESS

SEQ ID NO: 103347 - protein, 224 aa, Arabidopsis thaliana
  peptide (1)..(224): Ceres Seq. ID no. 13612567
MRAIASHSRANVVGITINEYQVNRARLHNKKAGLDALCEVVCGNFLQMPFDDNSFDGAYSIEATCHAPKLEEVYAEIYRVLKPGSMYVSYEWVTTEKFKAEDDEHVEVIQGIERGDALPGLRAYVDIAETAKKVGFEIVKEKDLASPPAEPWWTRLKMGRLAYWRNHIVVQILSAVGVAPKGTVDVHEMLFKTADYLTRGGETGIFSPMHMILCRKPESPEESS

SEQ ID NO: 103348 - DNA, 1243 bp, Arabidopsis thaliana
  misc_feature (1)..(1243): Ceres Seq. ID no. 13612583
  misc_feature (1)..(1243): Ortholog of  Ceres SEQ ID NO 13639514 as cited in SEQ ID NO 55736
  misc_feature (1)..(1243): Ortholog of  Ceres SEQ ID NO 14312254 as cited in SEQ ID NO 59148
  misc_feature (1)..(1243): Ortholog of  Ceres SEQ ID NO 13662804 as cited in SEQ ID NO 65394
  misc_feature (1)..(1243): Ortholog of  Ceres SEQ ID NO 13656519 as cited in SEQ ID NO 69226
agccgccgctttcacttacctcttcctcttccttcttcttcttctaccttcttctcgtaaaggttttgctacacactggagctcgcaaatctggctatcgaaaaccacaatcacaaactcaacttcggggccttcaaggccaatcacaagaaagtcatgggaccaatgataagaacagaggaagaagaagactatacaagtccaccgtggctaatgccaatgctacgagggagttacttcgtcccttgttccatccatgtcgattcaaacaaaaacgaatgcaatttgttctgtcttgattgtgctggaaatgccttttgctcttactgtttagtcaaacataaagaccatcgtgttgttcagatacgaagatcttcgtaccataacgttgtgagagtgaatgagatacagaagttcatagacatcgcttgtgttcagacatatattatcaacagcgcaaagatcgtgttcctcaatgaaagacctcagcctagaatcggtaaaggtgttacaaacacttgtgaaatctgttgcagaagtctccttgattctttcaggttctgctctctcggctgcaagcttggaggaatgaggagaggagatttatctctaaccttctctttgaaaggaaagcatgggagagagtaccttggtgggtcggaatcagatgaagctactacaccgactaagatgcgtaagaccaatgctttcaaccgtctgatgagtggtctctcgatctcaaccgttagattcgatgactacggtcccaatggtgatcaaaggtcttcaagctctggtgatgaaggtggttttagtttctctccgggaacacctccgatctataatcaccggaattcaagcagacgaaagggtgtccctcaccgtgctccgttctaagaaaagataattactaaatttccaaccccatagtaattaattatatatatatatatatagataatggtataatacaatgtataacttggggtgaaatttaggatgtagtcataatgttgtaaatgtgtattatttctttttatagtttttctaaaagataaaggtgaaataattagaacacatacataaatacattttttataagtatagaagaattaggttttatagtggaagtgtttgatgtttagtttgtttaaaaggcatggctttgtcttgtgttgtaatgtaatgtgtacattaaatttttgttcatacaataataatatcaaggtgaatgatatattat

SEQ ID NO: 103349 - protein, 246 aa, Arabidopsis thaliana; identical to SEQ ID NO: 41222
  peptide (1)..(246): Ceres Seq. ID no. 13612584

SEQ ID NO: 103350 - protein, 243 aa, Arabidopsis thaliana; identical to SEQ ID NO: 41223
  peptide (1)..(243): Ceres Seq. ID no. 13612585

SEQ ID NO: 103351 - protein, 227 aa, Arabidopsis thaliana; identical to SEQ ID NO: 41224
  peptide (1)..(227): Ceres Seq. ID no. 13612586

SEQ ID NO: 103352 - DNA, 1293 bp, Arabidopsis thaliana
  misc_feature (1)..(1293): Ceres Seq. ID no. 13612594
  misc_feature (1)..(1293): Ortholog of  Ceres SEQ ID NO 14307273 as cited in SEQ ID NO 54302
  misc_feature (1)..(1293): Ortholog of  Ceres SEQ ID NO 14315317 as cited in SEQ ID NO 58242
  misc_feature (1)..(1293): Ortholog of  Ceres SEQ ID NO 13655375 as cited in SEQ ID NO 63347
  misc_feature (1)..(1293): Ortholog of  Ceres SEQ ID NO 12626166 as cited in SEQ ID NO 64505
  misc_feature (1)..(1293): Ortholog of  Ceres SEQ ID NO 14301599 as cited in SEQ ID NO 65699
ggaaccaattggttctgatttcagatttcgaatttttttaatttgaatccaaatggagaaagcagagaacgagaagaagccatcggctgtatctgacgtcggagcatgggctatgaacgtaacgagctccgttgggatcatcatggctaataaacaactaatgtcatcatctggattcggcttcagcttcgcgacaactctcacgggatttcactttgctcttactgctctcgttggtatggtgtcgaatgcgactggtttatcagcatctaagcatgttcctctttgggagcttctttggttctcactcgttgctaatatctcaatcgctgctatgaattttagtcttatgttgaactctgttggcttctaccagatatcgaaattgagcatgattccagttgtttgtgtgatggaatgggttctacatagtaagcattactcgagagaagtgaaggcatctgtcatggttgttgttgtaggagttgggatttgtactgttactgatgtcaaagttaatgccaaaggtttcatttgtgcttgcactgccgttttctccacttctctccagcagatctcaataggttcactgcagaagaaatactcgatcggatcattcgagttgctgagtaagacagctccaatccaagccatttcactcctcatctttggtccatttgttgactatttcttgagtggcagattcatttcgacttacaagatgacttatagcgcaatgttatgcattcttctctcctgcgcattggcggttttctgcaacataagccaatatctctgcatcggaagattctctgctacctcattccaagttcttggccacatgaaaacagtctgtgtcttaacattaggatggcttatctttgattcggagatgacattcaagaacatagcagggatggtcttagccgtggtgggaatggtgatatacagttgggcagtcgagttagagaaacagagaaagtcgaaagtgataccgcatggtaaacacagtatgacagaagatgagattaaacttctcaaagaaggtatagaacatatggatttgaaagacatggagcttggaaataataaagcataaatatagctctattcaagagaaacgttttttggttatatttttggttactcatttcccccatcatgtactcttttcttttgccctttttttcgttctttgtctcaaagaacctttttagcctcttattgatgagctctcctctgcagagcacattcttttttctatagaaatatatgattcctctacttctttgc

SEQ ID NO: 103353 - protein, 348 aa, Arabidopsis thaliana
  peptide (1)..(348): Ceres Seq. ID no. 13612595
MEKAENEKKPSAVSDVGAWAMNVTSSVGIIMANKQLMSSSGFGFSFATTLTGFHFALTALVGMVSNATGLSASKHVPLWELLWFSLVANISIAAMNFSLMLNSVGFYQISKLSMIPVVCVMEWVLHSKHYSREVKASVMVVVVGVGICTVTDVKVNAKGFICACTAVFSTSLQQISIGSLQKKYSIGSFELLSKTAPIQAISLLIFGPFVDYFLSGRFISTYKMTYSAMLCILLSCALAVFCNISQYLCIGRFSATSFQVLGHMKTVCVLTLGWLIFDSEMTFKNIAGMVLAVVGMVIYSWAVELEKQRKSKVIPHGKHSMTEDEIKLLKEGIEHMDLKDMELGNNKA

SEQ ID NO: 103354 - protein, 328 aa, Arabidopsis thaliana
  peptide (1)..(328): Ceres Seq. ID no. 13612596
MNVTSSVGIIMANKQLMSSSGFGFSFATTLTGFHFALTALVGMVSNATGLSASKHVPLWELLWFSLVANISIAAMNFSLMLNSVGFYQISKLSMIPVVCVMEWVLHSKHYSREVKASVMVVVVGVGICTVTDVKVNAKGFICACTAVFSTSLQQISIGSLQKKYSIGSFELLSKTAPIQAISLLIFGPFVDYFLSGRFISTYKMTYSAMLCILLSCALAVFCNISQYLCIGRFSATSFQVLGHMKTVCVLTLGWLIFDSEMTFKNIAGMVLAVVGMVIYSWAVELEKQRKSKVIPHGKHSMTEDEIKLLKEGIEHMDLKDMELGNNKA

SEQ ID NO: 103355 - protein, 318 aa, Arabidopsis thaliana
  peptide (1)..(318): Ceres Seq. ID no. 13612597
MANKQLMSSSGFGFSFATTLTGFHFALTALVGMVSNATGLSASKHVPLWELLWFSLVANISIAAMNFSLMLNSVGFYQISKLSMIPVVCVMEWVLHSKHYSREVKASVMVVVVGVGICTVTDVKVNAKGFICACTAVFSTSLQQISIGSLQKKYSIGSFELLSKTAPIQAISLLIFGPFVDYFLSGRFISTYKMTYSAMLCILLSCALAVFCNISQYLCIGRFSATSFQVLGHMKTVCVLTLGWLIFDSEMTFKNIAGMVLAVVGMVIYSWAVELEKQRKSKVIPHGKHSMTEDEIKLLKEGIEHMDLKDMELGNNKA

SEQ ID NO: 103356 - DNA, 1593 bp, Arabidopsis thaliana
  misc_feature (1)..(1593): Ceres Seq. ID no. 13612598
  misc_feature (1)..(1593): Ortholog of  Ceres SEQ ID NO 13596554 as cited in SEQ ID NO 62818
aggagcggttgagttgaaatttgctggcgcgtactcgtcaacgtaacgcgcgtggagtgttttcgtgtccctcctcctcctcctcctcctcactaagacaaatattttgaggttctctttctcgtttgtgtgatctgtctgacaagctagaagaatcgtagatcgtgatcggattgatttgataattatggtgaaggagacggagttttacgatgtcctcggcgttagccccaccgctacggaggctgagattaagaaagcttattacatcaaggcacgccaagtgcatccagataaaaaccctaatgatcctcaggctgctcataatttccaggtattgggagaggcctaccaagtgctaagtgatccagggcaacgtcaggcctatgacacatctgggaagtcagggatttcaactgagatcattgatcctgcggctatatttgctatgctttttgggagtgaactctttgaagaatacatagggcagcttgctatggcatcaatggcttcacttgatatcttcactgaaggggatcagattgatactaaaaagattatagaaaaaatgagggctgttcagaaagaaagagaagacaaacttgctcagattcttaaggaccgcctcaacctatatatgacgaacaaagatgaatttactagcaatgctgaagctgaagtaacaagactctcaaatgcagcatacggggtggaaatgttgaacacaatcggatatatatatgtcagacaagcggcaaaagagcttgggaagaaagctatttatctcggtgtgccattcgtagctgaatggtttaggacgaaaggtcacttcatcaaatcccaagtaacagctgcaacaggtgcatacgctttattccagctgcaagaggaaatgaaaaggcaactaagtgctgaaggcaattataccgagaaggaacttgaagagtacatgaagacccataagaaagtaatgattgattctctgtggaagctcaatgttgctgatatcgaaagcactatctcccgtgtttgtgagcaggtacttcaagatcccactgccaagagagaggagcttcgtgcaagggccaaggggttaaaaactctgggaaagatcttccagaagaacaagatagccagtgagagtgatcctttagtaagagccgaacttcacaaactaaacggaaatggtcaagaacatgatcattcatccacatcaccaaaatctgatgaagcatctcgctctaccgttggacctcaggaaccgcaaagcccttatgtggaagcaccgaaacttggagaagagcaaatcaactattacttcccaaggcctgcgccgcctccaggagcacagagacactcttaaactggcaatggattgattcacagatgaacgaaaaggttattttttcctttttttgctatataatataagtctttatgcatatttgatatatttgcaggcgttggtattaccattatgtaatttttattattgttagaagaagaaattattggatctttgaaaaaagcacatgttatctcatcttagacaatgtataatgtttttattctatttatatatttgatgtttgg

SEQ ID NO: 103357 - protein, 391 aa, Arabidopsis thaliana; identical to SEQ ID NO: 24955
  peptide (1)..(391): Ceres Seq. ID no. 13612599

SEQ ID NO: 103358 - protein, 304 aa, Arabidopsis thaliana; identical to SEQ ID NO: 24956
  peptide (1)..(304): Ceres Seq. ID no. 13612600

SEQ ID NO: 103359 - protein, 288 aa, Arabidopsis thaliana; identical to SEQ ID NO: 24957
  peptide (1)..(288): Ceres Seq. ID no. 13612601

SEQ ID NO: 103360 - DNA, 1356 bp, Arabidopsis thaliana
  misc_feature (1)..(1356): Ceres Seq. ID no. 13612605
  misc_feature (1)..(1356): Ortholog of  Ceres SEQ ID NO 13598513 as cited in SEQ ID NO 64102
atactaaatcatcaacactacaaagaagaaacacactatctctctctctctctcaatacatctttcctcacttctgatcagtgtgatcacgtagagtgccttgaaggagaagaaagaaacaaaaagaaataaaaatgggataccttctagaagaaaccttaagctctaactctaaaaccccaattgttatcgatgatgataacgagttgggtttgatggccgtgagactagccaatgctgctgcctttccgatggttctcaaagccgccctcgagctcggtgtctttgacactctctatgctgaagcctctcgcagcgactcgttcctttcaccatctgaaatagcgagtaagctaccaactacacctcgtaaccctgaggctccggttttgttggaccgtatgcttcgtctactcgctagctattctgtggtcaagtgtggtaaggtctcagaaggaaagggtgagagggtctacagagcagagccaatttgcaggtttttcttgaaggataacattcaagatattggatcccttgcttctcaagtcattgtcaatttcgatagcgtcttcctcaatacttgggcacaattgaaagacgtggttctagaaggaggagatgcatttggccgcgcacatggtggtatgaagctctttgactatatgggtacagatgagagattcagcaaactatttaaccagaccggttttaccattgcggttgtgaagaaggctcttgaagtttaccaaggcttcaaaggtgtgaatgttttagttgatgtgggaggaggagttggtaacactcttggtgttgttgcttctaagtatccaaatattaagggtatcaactttgatctaacctgtgccttggcacaagcaccttcttatcccggtgtggagcatgttgccggagatatgtttgtggatgtcccaaccggagatgccatgatcttgaaacgtatacttcatgattggaccgatgaagattgtgtcaagattcttaagaattgttggaaatcactaccagaaagcggtaaagtagttgttatagaattagtcactcctgatgaggcagagaatggagacatcaacgcaaacattgcctttgacatggacatgttaatgttcacacaatgttccggaggaaaagagagatcaagagctgagtttgaagctttggctgcagcttctggctttacccattgcaagttcgtttgccaagcttatcactgctggattattgagttctgtaaataaaatgtgtgaaatgtaaaacaaaatcgtcgttaattatatatttccatctttgttgccattctttcttgatatctttgtcttcgagtaataaaagtgtttt

SEQ ID NO: 103361 - protein, 373 aa, Arabidopsis thaliana
  peptide (1)..(373): Ceres Seq. ID no. 13612606
MGYLLEETLSSNSKTPIVIDDDNELGLMAVRLANAAAFPMVLKAALELGVFDTLYAEASRSDSFLSPSEIASKLPTTPRNPEAPVLLDRMLRLLASYSVVKCGKVSEGKGERVYRAEPICRFFLKDNIQDIGSLASQVIVNFDSVFLNTWAQLKDVVLEGGDAFGRAHGGMKLFDYMGTDERFSKLFNQTGFTIAVVKKALEVYQGFKGVNVLVDVGGGVGNTLGVVASKYPNIKGINFDLTCALAQAPSYPGVEHVAGDMFVDVPTGDAMILKRILHDWTDEDCVKILKNCWKSLPESGKVVVIELVTPDEAENGDINANIAFDMDMLMFTQCSGGKERSRAEFEALAAASGFTHCKFVCQAYHCWIIEFCK

SEQ ID NO: 103362 - protein, 346 aa, Arabidopsis thaliana
  peptide (1)..(346): Ceres Seq. ID no. 13612607
MAVRLANAAAFPMVLKAALELGVFDTLYAEASRSDSFLSPSEIASKLPTTPRNPEAPVLLDRMLRLLASYSVVKCGKVSEGKGERVYRAEPICRFFLKDNIQDIGSLASQVIVNFDSVFLNTWAQLKDVVLEGGDAFGRAHGGMKLFDYMGTDERFSKLFNQTGFTIAVVKKALEVYQGFKGVNVLVDVGGGVGNTLGVVASKYPNIKGINFDLTCALAQAPSYPGVEHVAGDMFVDVPTGDAMILKRILHDWTDEDCVKILKNCWKSLPESGKVVVIELVTPDEAENGDINANIAFDMDMLMFTQCSGGKERSRAEFEALAAASGFTHCKFVCQAYHCWIIEFCK

SEQ ID NO: 103363 - protein, 334 aa, Arabidopsis thaliana
  peptide (1)..(334): Ceres Seq. ID no. 13612608
MVLKAALELGVFDTLYAEASRSDSFLSPSEIASKLPTTPRNPEAPVLLDRMLRLLASYSVVKCGKVSEGKGERVYRAEPICRFFLKDNIQDIGSLASQVIVNFDSVFLNTWAQLKDVVLEGGDAFGRAHGGMKLFDYMGTDERFSKLFNQTGFTIAVVKKALEVYQGFKGVNVLVDVGGGVGNTLGVVASKYPNIKGINFDLTCALAQAPSYPGVEHVAGDMFVDVPTGDAMILKRILHDWTDEDCVKILKNCWKSLPESGKVVVIELVTPDEAENGDINANIAFDMDMLMFTQCSGGKERSRAEFEALAAASGFTHCKFVCQAYHCWIIEFCK

SEQ ID NO: 103364 - DNA, 2399 bp, Arabidopsis thaliana
  misc_feature (1)..(2399): Ceres Seq. ID no. 13612613
  misc_feature (1)..(2399): Ortholog of  Ceres SEQ ID NO 13654989 as cited in SEQ ID NO 63117
  misc_feature (1)..(2399): Ortholog of  Ceres SEQ ID NO 13584744 as cited in SEQ ID NO 69137
aggagattagcgaaaactcaaaacaggaacaaagttaaaagagtgagagagaaagaaagagagaagatgaaggtacaggagggtttgttcgtggtggctgttttctaccttgcttatacgcagctagtcaaggggcaacctcgcaaggagtgccaaactagatgtggcaatgtcgcagttgagtacccttttggtacttctccaggttgttactatcccggagatgaaagtttcaatcttacttgcaacgagcaagagaagctcttctttggcaacatgccagtcatcaacatgtctctcagcggccagcttcgtgttcggctagttagatccagagtttgctacgatagtcaaggaaaacagactgactacattgcccagcggaccaccctgggtaatttcactctctctgaacttaacagatttactgtagtaggttgtaacagttacgcatttctccgcacatctggagttgaaaaatactcaactggatgcatatcaatatgtgattctgccacaacgaaaaacggatcatgttctggtgaaggttgctgccagatccctgtccctagaggatactcttttgtcagagtaaaaccacatagctttcacaaccatcctactgtgcatctgtttaatccttgcacctacgcctttctcgttgaagatggtatgtttgacttccatgctttggaagatctcaacaatctgcgaaatgttactacgttccctgtagtactagattggtctatcggagacaagacttgcaaacaagtagaatacaggggcgtgtgtggtggtaacagcacatgtttcgattctactggtggaaccgggtataactgcaaatgtttagaaggttttgaggggaatccataccttccaaacggttgtcaagacatcaatgaatgtattagtagtagacataactgttcggagcatagtacctgtgaaaacacgaaggggagcttcaactgtaactgcccatctggttaccgcaaagattcccttaatagctgtactcgtaaagtcaggcctgaatactttagatggactcaaatttttcttggaaccaccatcggcttctcggttatcatgcttgggattagctgtctacaacagaaaattaagcaccggaagaacacagagctccgacaaaaattcttcgagcaaaatggtggaggcatgttgatacagcgagtctcgggagcagggccatcaaatgttgatgtcaaaatcttcactgagaaaggaatgaaggaagcaactaatggttaccatgagagcagaatcctgggtcagggaggccaaggaacagtgtacaaagggatattgccggacaactccatagttgctataaagaaagctcggcttggaaaccgtagccaagtagagcagttcatcaacgaagtgctagtgctttcacaaatcaaccataggaacgtggtcaaggtcttggggtgttgtttagagacagaagtccccttgttggtctatgagttcattaacagtggtacccttttcgatcacttgcacggttccttgtatgattcttcacttacatgggagcaccgtctgaggatagcaacagaagtagcaggaagtcttgcatatcttcactcttctgcttctattccaatcatccaccgagatatcaagactgctaatattctcctggataaaaacttaactgcaaaagtagctgactttggtgcatcaagattgataccgatggataaagagcagctcacaacaatagtgcaaggcactctaggttacctagacccagaatattacaacacagggttgttaaacgaaaagagcgatgtttatagttttggggtcgtcctaatggaactgctctcaggtcaaaaggcattgtgtttcgaaagaccacattgcccaaaaaatcttgtgagttgttttgcttctgccacaaagaataataggttccatgaaattattgatgggcaagtgatgaatgaggataaccagagagagatccaggaagctgcaagaattgctgcagagtgtacaaggctaatgggagaggaaaggccaaggatgaaagaagtagctgcagagttagaggccttgagagttaaaacaactaaatataagtggtcggatcagtatcgtgagacaggggagattgaacacttgctcggcgttcaaatcttgtcagcacaaggcgaaaccagtagcagcattggctatgacagcatcagaaatgtaacaacattggacattgaagctggccgttgatattaatgctctgacaaaatcacatgtatatcttttgtttgtaaaaaaagaaagtcatttccttgttgcttcatcaataatgctttgacagatttgtttgtacatcatcaataatcatgttcatattttccttt

SEQ ID NO: 103365 - protein, 754 aa, Arabidopsis thaliana
  peptide (1)..(754): Ceres Seq. ID no. 13612614
RRLAKTQNRNKVKRVREKEREKMKVQEGLFVVAVFYLAYTQLVKGQPRKECQTRCGNVAVEYPFGTSPGCYYPGDESFNLTCNEQEKLFFGNMPVINMSLSGQLRVRLVRSRVCYDSQGKQTDYIAQRTTLGNFTLSELNRFTVVGCNSYAFLRTSGVEKYSTGCISICDSATTKNGSCSGEGCCQIPVPRGYSFVRVKPHSFHNHPTVHLFNPCTYAFLVEDGMFDFHALEDLNNLRNVTTFPVVLDWSIGDKTCKQVEYRGVCGGNSTCFDSTGGTGYNCKCLEGFEGNPYLPNGCQDINECISSRHNCSEHSTCENTKGSFNCNCPSGYRKDSLNSCTRKVRPEYFRWTQIFLGTTIGFSVIMLGISCLQQKIKHRKNTELRQKFFEQNGGGMLIQRVSGAGPSNVDVKIFTEKGMKEATNGYHESRILGQGGQGTVYKGILPDNSIVAIKKARLGNRSQVEQFINEVLVLSQINHRNVVKVLGCCLETEVPLLVYEFINSGTLFDHLHGSLYDSSLTWEHRLRIATEVAGSLAYLHSSASIPIIHRDIKTANILLDKNLTAKVADFGASRLIPMDKEQLTTIVQGTLGYLDPEYYNTGLLNEKSDVYSFGVVLMELLSGQKALCFERPHCPKNLVSCFASATKNNRFHEIIDGQVMNEDNQREIQEAARIAAECTRLMGEERPRMKEVAAELEALRVKTTKYKWSDQYRETGEIEHLLGVQILSAQGETSSSIGYDSIRNVTTLDIEAGR

SEQ ID NO: 103366 - protein, 732 aa, Arabidopsis thaliana
  peptide (1)..(732): Ceres Seq. ID no. 13612615
MKVQEGLFVVAVFYLAYTQLVKGQPRKECQTRCGNVAVEYPFGTSPGCYYPGDESFNLTCNEQEKLFFGNMPVINMSLSGQLRVRLVRSRVCYDSQGKQTDYIAQRTTLGNFTLSELNRFTVVGCNSYAFLRTSGVEKYSTGCISICDSATTKNGSCSGEGCCQIPVPRGYSFVRVKPHSFHNHPTVHLFNPCTYAFLVEDGMFDFHALEDLNNLRNVTTFPVVLDWSIGDKTCKQVEYRGVCGGNSTCFDSTGGTGYNCKCLEGFEGNPYLPNGCQDINECISSRHNCSEHSTCENTKGSFNCNCPSGYRKDSLNSCTRKVRPEYFRWTQIFLGTTIGFSVIMLGISCLQQKIKHRKNTELRQKFFEQNGGGMLIQRVSGAGPSNVDVKIFTEKGMKEATNGYHESRILGQGGQGTVYKGILPDNSIVAIKKARLGNRSQVEQFINEVLVLSQINHRNVVKVLGCCLETEVPLLVYEFINSGTLFDHLHGSLYDSSLTWEHRLRIATEVAGSLAYLHSSASIPIIHRDIKTANILLDKNLTAKVADFGASRLIPMDKEQLTTIVQGTLGYLDPEYYNTGLLNEKSDVYSFGVVLMELLSGQKALCFERPHCPKNLVSCFASATKNNRFHEIIDGQVMNEDNQREIQEAARIAAECTRLMGEERPRMKEVAAELEALRVKTTKYKWSDQYRETGEIEHLLGVQILSAQGETSSSIGYDSIRNVTTLDIEAGR

SEQ ID NO: 103367 - protein, 662 aa, Arabidopsis thaliana
  peptide (1)..(662): Ceres Seq. ID no. 13612616
MPVINMSLSGQLRVRLVRSRVCYDSQGKQTDYIAQRTTLGNFTLSELNRFTVVGCNSYAFLRTSGVEKYSTGCISICDSATTKNGSCSGEGCCQIPVPRGYSFVRVKPHSFHNHPTVHLFNPCTYAFLVEDGMFDFHALEDLNNLRNVTTFPVVLDWSIGDKTCKQVEYRGVCGGNSTCFDSTGGTGYNCKCLEGFEGNPYLPNGCQDINECISSRHNCSEHSTCENTKGSFNCNCPSGYRKDSLNSCTRKVRPEYFRWTQIFLGTTIGFSVIMLGISCLQQKIKHRKNTELRQKFFEQNGGGMLIQRVSGAGPSNVDVKIFTEKGMKEATNGYHESRILGQGGQGTVYKGILPDNSIVAIKKARLGNRSQVEQFINEVLVLSQINHRNVVKVLGCCLETEVPLLVYEFINSGTLFDHLHGSLYDSSLTWEHRLRIATEVAGSLAYLHSSASIPIIHRDIKTANILLDKNLTAKVADFGASRLIPMDKEQLTTIVQGTLGYLDPEYYNTGLLNEKSDVYSFGVVLMELLSGQKALCFERPHCPKNLVSCFASATKNNRFHEIIDGQVMNEDNQREIQEAARIAAECTRLMGEERPRMKEVAAELEALRVKTTKYKWSDQYRETGEIEHLLGVQILSAQGETSSSIGYDSIRNVTTLDIEAGR

SEQ ID NO: 103368 - DNA, 1839 bp, Arabidopsis thaliana
  misc_feature (1)..(1839): Ceres Seq. ID no. 13612617
  misc_feature (1)..(1839): Ortholog of  Ceres SEQ ID NO 14314536 as cited in SEQ ID NO 52436
gtagctactgtgtcacgcttttctctagcgaatactttgatgcttcttcatgactctttaacaagattattctgagcttttcctctggccttctaattattaaagtcttcctttttatctattgttaagtgatggctactgaagagaagcctcttaattctcttgatttaagccatgatgattcttcccctgcttcaaatcaggctgaaggatcatctgctataactgaagacacttctgcgaatgttcaacaatggaggcgaaagaatctctctttacagataccctctagagcagctggtctctctcctgaagattcggttgttatcaaaatgcctccaacgcctagtccaactccaagaagagtcaactttgctttgacttcgagttctccaggtcctactcctacttcttcttctgttcttcctcgtggcaaatcgtccctgaagaatctattgccaaaagctgggtgtaaaccaaaaacctctaacactgatatcgagaagggacaagggaatgcctgttctcctcctgcatcgcaggagaaggcttcgatatcgaggtcattatcactttcaaagctatttacacctaggatcaagagaacttcgtccctacctgtgactcctgttattctttcaaactcagagtcagctcacggaggaaccagtgttgctcctcaaactccaaacagaaaagggagtgtacacatagctcgctctcgctctgtgccccttaacgacaaggaattaagcctgaagggaatggattcatttttcagagtaattccttcgactcctcgtgttaaggaaggagacgttttctcaaatgcatcagaggctggtaatactgaaacaggtgatgctgatggagaagacatacctgaggatgaagcagtttgtaggatttgtttggtagagctctgtgaaggaggagaaaccttaaaaatggagtgtagttgcaaaggcgaacttgctcttgcccacaaagattgtgctcttaaatggttcaccataaagggtaacaagacttgtgaggtgtgtaaacaagaagttaagaacttacctgtaacactcttacgcatccaaagccttcgaaattctggtgttcctcagctagatgtctctggctatagggtgtggcaggaggtaccggttctagtaatcatcagcatgctcgcttacttctgcttcctcgagcagctcctggttgagaatatgggtacaggtgccatcgctatatcactgccgttttcttgtattcttggtcttcttgcatccatgaccgcatcaaccatggtaatgagaagatttgtctggatttacgcatctgtccagtttgcgttggtcgttctcttcgcccatatattttactctgtggtgaagttgcaaccagttctgtcagttcttctgtcaacatttgctggatttggtgtatgcatatgcggaagttcagtgatggttgagtttgtgagatggagacgaagatggcgagccagaaggctagagcaacagctgaaccatgctttgactctgtcacaaccgccgcaaccactggatccaacaacctctctgcatcattcaaatacctcatagagagccaagaagtggacagatgattttacatttatacagtgtagtttggttaatgtttatgtaatgatttgtataaaagaaaaagagaaagtgatccaaggaatgcttaaagattgttccttttgtttgttttacatacacatttgtattgttgtaagtttgtaactttgatttgctcaatctctgcaaatgaaatgtttgtagcagtattggtttctctgtataataaaaagatttaaaattg

SEQ ID NO: 103369 - protein, 487 aa, Arabidopsis thaliana; identical to SEQ ID NO: 42080
  peptide (1)..(487): Ceres Seq. ID no. 13612618

SEQ ID NO: 103370 - protein, 420 aa, Arabidopsis thaliana; identical to SEQ ID NO: 42081
  peptide (1)..(420): Ceres Seq. ID no. 13612619

SEQ ID NO: 103371 - protein, 276 aa, Arabidopsis thaliana; identical to SEQ ID NO: 42082
  peptide (1)..(276): Ceres Seq. ID no. 13612620

SEQ ID NO: 103372 - DNA, 1997 bp, Arabidopsis thaliana
  misc_feature (1)..(1997): Ceres Seq. ID no. 13612629
  misc_feature (1)..(1997): Ortholog of  Ceres SEQ ID NO 14314404 as cited in SEQ ID NO 57421
  misc_feature (1)..(1997): Ortholog of  Ceres SEQ ID NO 13493536 as cited in SEQ ID NO 58515
  misc_feature (1)..(1997): Ortholog of  Ceres SEQ ID NO 12618461 as cited in SEQ ID NO 64349
acatatcactctttctccttcacgagggatttttgttccgatctacttctccggcttatcaccgatttagatctaagcctgaggtttccttttgcattttagagattccgagaatgagacaacggcaactattttccgtgtttttgcttctcttagctttcgtttcgttccagaagctttgctactgtgacgatcaaacggttctgtatgaatcgttcgatgagccttttgatggccgctggatcgtttcgaagaatagtgattacgaaggtgtatggaagcatgcaaagagtgaaggacatgaggattatggacttctcgtgagtgagaaggctaggaagtatggaattgtgaaagagcttgacgagcctctaaacctcaaggaaggaactgttgttcttcagtacgaggttcgtttccaggaaggacttgagtgtggtggtgcttacttgaagtacctccgtcctcaggaagctggatggacacctcagggattcgatagtgaatccccttactctatcatgtttgggcctgacaagtgtggaggtacgaacaaagtgcatttcatcttgaagcacaagaatcccaagagtggcgagtacgttgaacaccatctgaagttccctccctctgttccttatgacaagctttcccatgtctacaccgccatcttgaaacccgacaacgaggttagaattttggttgatggagaggagaagaaaaaggccaatttactctctggtgaagactttgagcctgcattgatccctgccaagaccatccctgaccctgaagacaagaaaccagaggattgggacgaaagagccaagattcctgatccaaatgccgtgaagcctgaggactgggatgaggatgcacctatggagattgaagatgaggaagctgagaaacccgaaggatggttagatgatgagcctgaggaggtcgacgaccccgaagcgaccaagcctgaagattgggatgatgaggaagatggtatgtgggaggctcctaaaattgacaaccccaagtgtgaagcagcacctggttgtggtgaatggaagagaccaatgaagaggaatcctgcttacaagggcaaatggagctcacctcttattgataacccggcttacaagggaatctggaaacccagagatatccctaaccctgactactttgagctagacagacccgattacgaacccattgcagccatcggtattgagatctggacaatgcaagatggtatcttgtttgacaacatcttgatagcgaaagacgagaaggtcgctgagacttacagacagaccacttggaagcccaaattcgatgttgagaaagagaaacaaaaggcagaagaggaagctgctggctctgcagatggtctcaagagctaccagaaggttgtattcgacctcttgaacaaggttgcagatttatctttcctaagtgcctacaagtctaagatcacggaactgattgagaaagccgagcaacaaccaaacttaaccattggtgtcctcgtcgccattgtggttgtattcttctcgctcttcctcaagcttatctttggtggcaaaaaggcggcggcacctgtggaaaagaagaaaccagaagtagcggagagttcaaagagtggggatgaggcggagaagaaggaagaaaccgcggcaccacgcaaaaggcaaccgagacgtgataattagaacaagattttaaagtagttttcgaagatgtgaaagaaaagttcagatttatttttctgtttttggttttgggttgaatgttgttttctgctgtagcctataatggtgtaacaccaagtttgagaaatttttgtctttgggcgaagaaaagaaaggaggaatatgtatgtgaagacggtttgttgacagccaaattgtagcttctatttctttttcatccccttcagtagtaacaactggttgcttgaaacattagagttttcttatttgaatcaaaagagtttttataac

SEQ ID NO: 103373 - protein, 567 aa, Arabidopsis thaliana; identical to SEQ ID NO: 26469
  peptide (1)..(567): Ceres Seq. ID no. 13612630

SEQ ID NO: 103374 - protein, 530 aa, Arabidopsis thaliana; identical to SEQ ID NO: 26470
  peptide (1)..(530): Ceres Seq. ID no. 13612631

SEQ ID NO: 103375 - protein, 394 aa, Arabidopsis thaliana; identical to SEQ ID NO: 26471
  peptide (1)..(394): Ceres Seq. ID no. 13612632

SEQ ID NO: 103376 - DNA, 2156 bp, Arabidopsis thaliana
  misc_feature (1)..(2156): Ceres Seq. ID no. 13612633
  misc_feature (1)..(2156): Ortholog of  Ceres SEQ ID NO 15176298 as cited in SEQ ID NO 58961
aattaccacaaagaagaacttgcaaatcccttctcttttgttcaagtcgtacgacagagcctttgaaagaaagaactggtggggaagcgttaagctacagataactccaagatacgggtctttgtttgttttgaagatcagattcattttacgataattccgttactcgttattgtgtatatatatctctttcccggaaatttcggttcttgttgtacaaaaactccaaaaaaacgcataaaaaatattctgtaaatggttgaaattctctgggaatttcaacgggtcttgtggtatcatgtcacagaagagagagtttgaagaagggaaaggtcgaattgagggcggctcatccgaagacaagcgtagaagattcaaaagtgtggttcaggaggtaatgagattacaaaccgtcaaacattttctcgaacctgttctcgagcccttaattcgtaaagtggtcaaagaagaagttgaattagctcttggaaagcatctagcaggcatcaagtggatttgtgagaaagagactcatcctttggaatcaaggaatctacagttaaagttcttgaacaatctatcgcttcccgtgtttacttcagctcggatagaaggagatgaaggccaagctataagagttggattaatagacccttcaactggccaaattttctcttctggtcctgcatcatccgccaaactcgaagtttttgtcgttgagggtgattttaacagtgttagtgattggactgatgaggatatcaggaataacattgtaagagagagagaaggaaagaaacctctactcaatgggaatgtatttgcggttcttaatgatggcattggtgttatggatgaaatctcatttacagataactctagctggactaggagcaggaagttcagactcggggtacgaatagtggatcagtttgattatgtcaaaattagagaggcaataacagagtcctttgtcgtaagagatcatcgaggagagttgtacaaaaagcatcatcctccttctcttttcgatgaagtatggagattggaaaagatagggaaagatggagcatttcacagacgactgaatttgtcaaatataaacactgtcaaggatttcttaacacatttccatttaaactcttcaaaactccgacaagttcttggtacgggtatgtcttcaaagatgtgggaaattactttggaccatgctcgatcatgtgttctagatagtagcgtccatgtgtaccaagctcctggatttcagaagaaaacagctgttgtcttcaacgtcgtagctcaagtgcttggactgctcgtggattttcagtatattcctgctgaaaagttatcagagattgaaaaggctcaagcggaggtgatggtaattgatgcattgagtcacctaaatgaagtaatctcgtatgatgatgaggtttccatgatgaggaacgttctcaatgccccggcttctcaaggcagtgttgccgggattgattattcgggtctgagtttgaccagtttggacggatacggttttgtgtcaagtcttcacaacacagcagaatgtagtggcaagcacagtgatgatgttgacatggaagttactccacatggtttatatgaagactacgacaatctctggaactgctctcacattctaggcttagaagaaccgcaatctgagttgcagagtgcgcttgacgatttcatgtcacagaagaatgcttcggtcggtggtaaggctcacagcaaaagatggacaaagcttttcagtgtctcgagatggctctctgttttcaagtatgtcaagttaggaaaaatataaaatgagtttagtacacaaaagaacaaaacgactcgctgcgccgcgccctggacagattcgtgtatatatatactcggggaaagcttgggtttctgatgatccagaggcgttcaaaagtgttttctttcttcttcttcttctggttgtctccatctttgtgttaaagatgtgaatatatgttttaggacagcttcatttttgttgaaagcttaaaaaacagggtcttttataatctctgtgattagtaccaaattgcagatttgcagaactacgtttttcttggtttgtcaggtaatgtgaaactgaataaaatgaatattatttgaat

SEQ ID NO: 103377 - protein, 509 aa, Arabidopsis thaliana
  peptide (1)..(509): Ceres Seq. ID no. 13612634
MSQKREFEEGKGRIEGGSSEDKRRRFKSVVQEVMRLQTVKHFLEPVLEPLIRKVVKEEVELALGKHLAGIKWICEKETHPLESRNLQLKFLNNLSLPVFTSARIEGDEGQAIRVGLIDPSTGQIFSSGPASSAKLEVFVVEGDFNSVSDWTDEDIRNNIVREREGKKPLLNGNVFAVLNDGIGVMDEISFTDNSSWTRSRKFRLGVRIVDQFDYVKIREAITESFVVRDHRGELYKKHHPPSLFDEVWRLEKIGKDGAFHRRLNLSNINTVKDFLTHFHLNSSKLRQVLGTGMSSKMWEITLDHARSCVLDSSVHVYQAPGFQKKTAVVFNVVAQVLGLLVDFQYIPAEKLSEIEKAQAEVMVIDALSHLNEVISYDDEVSMMRNVLNAPASQGSVAGIDYSGLSLTSLDGYGFVSSLHNTAECSGKHSDDVDMEVTPHGLYEDYDNLWNCSHILGLEEPQSELQSALDDFMSQKNASVGGKAHSKRWTKLFSVSRWLSVFKYVKLGKI

SEQ ID NO: 103378 - protein, 476 aa, Arabidopsis thaliana
  peptide (1)..(476): Ceres Seq. ID no. 13612635
MRLQTVKHFLEPVLEPLIRKVVKEEVELALGKHLAGIKWICEKETHPLESRNLQLKFLNNLSLPVFTSARIEGDEGQAIRVGLIDPSTGQIFSSGPASSAKLEVFVVEGDFNSVSDWTDEDIRNNIVREREGKKPLLNGNVFAVLNDGIGVMDEISFTDNSSWTRSRKFRLGVRIVDQFDYVKIREAITESFVVRDHRGELYKKHHPPSLFDEVWRLEKIGKDGAFHRRLNLSNINTVKDFLTHFHLNSSKLRQVLGTGMSSKMWEITLDHARSCVLDSSVHVYQAPGFQKKTAVVFNVVAQVLGLLVDFQYIPAEKLSEIEKAQAEVMVIDALSHLNEVISYDDEVSMMRNVLNAPASQGSVAGIDYSGLSLTSLDGYGFVSSLHNTAECSGKHSDDVDMEVTPHGLYEDYDNLWNCSHILGLEEPQSELQSALDDFMSQKNASVGGKAHSKRWTKLFSVSRWLSVFKYVKLGKI

SEQ ID NO: 103379 - protein, 325 aa, Arabidopsis thaliana
  peptide (1)..(325): Ceres Seq. ID no. 13612636
MDEISFTDNSSWTRSRKFRLGVRIVDQFDYVKIREAITESFVVRDHRGELYKKHHPPSLFDEVWRLEKIGKDGAFHRRLNLSNINTVKDFLTHFHLNSSKLRQVLGTGMSSKMWEITLDHARSCVLDSSVHVYQAPGFQKKTAVVFNVVAQVLGLLVDFQYIPAEKLSEIEKAQAEVMVIDALSHLNEVISYDDEVSMMRNVLNAPASQGSVAGIDYSGLSLTSLDGYGFVSSLHNTAECSGKHSDDVDMEVTPHGLYEDYDNLWNCSHILGLEEPQSELQSALDDFMSQKNASVGGKAHSKRWTKLFSVSRWLSVFKYVKLGKI

SEQ ID NO: 103380 - DNA, 1252 bp, Arabidopsis thaliana
  misc_feature (1)..(1252): Ceres Seq. ID no. 13612639
  misc_feature (1)..(1252): Ortholog of  Ceres SEQ ID NO 15169195 as cited in SEQ ID NO 55200
  misc_feature (1)..(1252): Ortholog of  Ceres SEQ ID NO 13581611 as cited in SEQ ID NO 59028
  misc_feature (1)..(1252): Ortholog of  Ceres SEQ ID NO 14301693 as cited in SEQ ID NO 69246
attatcactacccacatctgtcttaccttctccgatctctctctctatttgtccacctcacacacaaccctataaacaagacaagacctcgcaaagctcaaaccttttccttctttttttctatcaagttcctcacttctcggatccgggtcctaaatctgggtcaaccctttttacgatcatcggaaatggaccctccactagtgaacgattcctccttctctgcagctaatccttcttcttacactctctccgagatttggcctttccctgtaaacgacgccgttcgctctggtctccgtttagctgttaactccggtcgagtctttactcgctctgaacattccggcaataaagacgtctccgcggctgaggaatctacagtcaccgatctaactgctggctggggaagtagaaagactagagatttgaactctgaggatgattcttcaaagatggtttcttccagcagcagtggtaatgaattgaaagaatcaggggataagaaaagaaaactgtgtggatctgaaagtggaaatggagatggttcgatgagacctgaaggcgaaacaagttcgggtggtggtggaagcaaagcaacggaacagaagaacaaacctgagccaccaaaggattatattcatgtgagagcaagaagaggacaagctactgaccggcatagtttagcagagcgagctagaagagaaaagatcagtgagaagatgacagctcttcaagatataattccaggatgtaataagataatcggaaaagcccttgtgctcgatgagattatcaattatattcagtcattgcagcggcaagttgagtttctatcaatgaagctagaagttgttaactcgggtgcaagtactggtccgacaataggagtttttccttccggtgatctcgggactttaccgattgacgttcatcgaacaatatacgagcaacaagaagctaatgaaacccgagtatctcaaccggagtggctccatatgcaggttgatgggaactttaaccgaaccacataaaaaagagtctttctctgattgatggatgtgttttgtaggcagtaaaaatgaatgcaaccctttattttttatcctatgcgtgtgtatcattttgctgttatatcataagatagaatatgagagtgaccagagagattaacactttataaaacattgttgtattgtcctattatataacttgtaacaattgattcagtaacatatgttggtcttaaatc

SEQ ID NO: 103381 - protein, 343 aa, Arabidopsis thaliana; identical to SEQ ID NO: 40052
  peptide (1)..(343): Ceres Seq. ID no. 13612640

SEQ ID NO: 103382 - protein, 281 aa, Arabidopsis thaliana; identical to SEQ ID NO: 40053
  peptide (1)..(281): Ceres Seq. ID no. 13612641

SEQ ID NO: 103383 - protein, 192 aa, Arabidopsis thaliana; identical to SEQ ID NO: 40054
  peptide (1)..(192): Ceres Seq. ID no. 13612642

SEQ ID NO: 103384 - DNA, 1338 bp, Arabidopsis thaliana
  misc_feature (1)..(1338): Ceres Seq. ID no. 13612654
  misc_feature (1)..(1338): Ortholog of  Ceres SEQ ID NO 15169655 as cited in SEQ ID NO 64922
  misc_feature (1)..(1338): Ortholog of  Ceres SEQ ID NO 13596004 as cited in SEQ ID NO 68212
agaatctgtttctttcttcacccaccaaaagtagcaaacctttgccacctaaaaatcttaccagttgggtgaaagttgccaaaatagagcttgcttttgtcgcaatcctatatttttcagattgattgttggtgggtttgtgtaaatggcggctcttttaggcagatcctgccggaaactgagttttccgagcttgagtcacggagctaggagggtatcgacggaaactggaaaaccattgaatctatactctgctattaatcaagcgcttcacatcgctttggacaccgatcctcggtcttatgtctttggggaagacgttggctttggtggagtctttcgctgtacaacaggtttagctgaacgattcgggaaaaaccgtgtcttcaatactcctctttgtgagcagggcattgttggatttggcattggtctagcagcaatgggtaatcgagcaattgtagagattcagtttgcagattatatatatcctgcttttgatcagattgttaatgaagctgcaaagttcagataccgaagtggtaaccaattcaactgtggaggacttacgataagagcaccatatggagcagttggtcatggtggacattaccattcacaatcccctgaagctttcttttgccatgtccctggtattaaggttgttatccctcggagtccacgagaagcaaagggactgttgttgtcatgtatccgtgatccaaatcccgttgttttcttcgaaccaaagtggctgtatcgtcaagcagtagaagaagtccctgagcatgactatatgatacctttatcagaagcagaggttataagagaaggcaatgacattacactggttggatggggagctcagcttaccgttatggaacaagcttgtctggacgcggaaaaggaaggaatatcatgtgaactgatagatctcaagacactgcttccttgggacaaagaaaccgttgaggcttcagttaaaaagactggcagacttcttataagccatgaagctcctgtaacaggaggttttggagcagagatctctgcaacaattctggaacgttgctttttgaagttagaagctccagtaagcagagtttgtggtctggatactccatttcctcttgtgtttgaaccattctacatgcccaccaagaacaagatattggatgcaatcaaatcgactgtgaattactagccgtactatctgtagtttactgtttacactaggactaatgtaatcgcatgtctttgttatcaattcgtctaatgtaacactaccgattaactttaatgaatttcaagataacgaaaacatgttataataggact

SEQ ID NO: 103385 - protein, 352 aa, Arabidopsis thaliana
  peptide (1)..(352): Ceres Seq. ID no. 13612655
MAALLGRSCRKLSFPSLSHGARRVSTETGKPLNLYSAINQALHIALDTDPRSYVFGEDVGFGGVFRCTTGLAERFGKNRVFNTPLCEQGIVGFGIGLAAMGNRAIVEIQFADYIYPAFDQIVNEAAKFRYRSGNQFNCGGLTIRAPYGAVGHGGHYHSQSPEAFFCHVPGIKVVIPRSPREAKGLLLSCIRDPNPVVFFEPKWLYRQAVEEVPEHDYMIPLSEAEVIREGNDITLVGWGAQLTVMEQACLDAEKEGISCELIDLKTLLPWDKETVEASVKKTGRLLISHEAPVTGGFGAEISATILERCFLKLEAPVSRVCGLDTPFPLVFEPFYMPTKNKILDAIKSTVNY

SEQ ID NO: 103386 - protein, 253 aa, Arabidopsis thaliana; identical to SEQ ID NO: 35113
  peptide (1)..(253): Ceres Seq. ID no. 13612656

SEQ ID NO: 103387 - DNA, 1153 bp, Arabidopsis thaliana
  misc_feature (1)..(1153): Ceres Seq. ID no. 13612661
  misc_feature (1)..(1153): Ortholog of  Ceres SEQ ID NO 13594308 as cited in SEQ ID NO 57706
agacactcctccaatggcgcctcagcttctctcctccagtaacttcaaatctctctttgactctgtcgatacgttcctcttcgactgcgatggtgttatatggaagggtgaaacgctcatcgatggcgtctcccaaactctcgaccttatccgttctaagggtaaaaatgttgtctttgtgaccaacaattccgtaaaatcgaggaggcaatacgctgaaaagttccgatctttgggtgtcacttctattactcaggatgagatcttctcttcgtcatttgcggcagctatgtatctcaaagtcaataactttcctaaggacaagaaggtttatgtgattggtggagagggtgttcttgaggagctgcagattgccggttttacaggtcttggtggtcctgaagatggtgaaaagaaggcacaatggaaatcaaactctctctttgaacatgataaaagtgtgggagcagttgtagttggactagaccccaacattaactactataagcttcagtacgggactctctgtgtacgcgagaatccgggatgtctcttcattgcgaccaaccgtgatgcagtaggacatatgacggatctgcaagagtggcctggtgctgggtgtatggttgctgccatgtgtggatcgactgaaagagaaccaatagttgttgggaaaccatctactttcatgatggactttctgctacaaaaatttgggacggaaacgtcaagaatgtgcatggtaggtgataggctagatactgatatcttgtttgggcagaatgctggctgcaaaactctcctcgtcctaacaggggtgacaagtgaatctaatctactagataagggcaacaagatagaaccagactattacacaagcacagtctctgatatcataaaactgatggagtccccctagtaagtaagggcatcatcattcatcatcttgctttacactttggaacagtgatttacgtcctgttgcaagatgaaatttttctgattctttgtcttggttagtaatctgatgaagcatcagaaaacatgatttcattttgttatgttgctgaataaaggatttgagaagtcgatgaagagttgaaagaatggtaataagcaaatagtaagattatcatggggaaagtccaaaagc

SEQ ID NO: 103388 - protein, 305 aa, Arabidopsis thaliana
  peptide (1)..(305): Ceres Seq. ID no. 13612662
DTPPMAPQLLSSSNFKSLFDSVDTFLFDCDGVIWKGETLIDGVSQTLDLIRSKGKNVVFVTNNSVKSRRQYAEKFRSLGVTSITQDEIFSSSFAAAMYLKVNNFPKDKKVYVIGGEGVLEELQIAGFTGLGGPEDGEKKAQWKSNSLFEHDKSVGAVVVGLDPNINYYKLQYGTLCVRENPGCLFIATNRDAVGHMTDLQEWPGAGCMVAAMCGSTEREPIVVGKPSTFMMDFLLQKFGTETSRMCMVGDRLDTDILFGQNAGCKTLLVLTGVTSESNLLDKGNKIEPDYYTSTVSDIIKLMESP

SEQ ID NO: 103389 - protein, 301 aa, Arabidopsis thaliana; identical to SEQ ID NO: 23774
  peptide (1)..(301): Ceres Seq. ID no. 13612663

SEQ ID NO: 103390 - protein, 209 aa, Arabidopsis thaliana; identical to SEQ ID NO: 23775
  peptide (1)..(209): Ceres Seq. ID no. 13612664

SEQ ID NO: 103391 - DNA, 842 bp, Arabidopsis thaliana
  misc_feature (1)..(842): Ceres Seq. ID no. 13612665
  misc_feature (1)..(842): Ortholog of  Ceres SEQ ID NO 14309148 as cited in SEQ ID NO 0
accactctcttctcctgttttcctcttccccaactctcaattttgctcagacaaaaaatcaatggctttgcaagtgcagcaaacttcagcagccttcacaatctcctcaccatccaccgccgctgcacgcatcaaactctcccctttcagaaccgtggcggttaaccgcggagttagatgcagcggcggtggagtcggaggcggagatgccgggaagaaaaaagcagttcctaattcgaattatgtagttcctattgacaaattctcgtcttcttcgtcgattactaggcctttgattgagatacttcgtgaccttaataagaagattcctgataacattgttaagagtcatgatcctccttctacttctgctgctacttctggttttatcccttggtaccatgcaaatcggatgcttagcttctatgctcctggttggtgtggtgaagttagagatgttattttctctgagaatggaaatgttactgttgtttatcgtctcactattcgtggctctgatggtgaggcacatcgtgaatcaactgggacagtaacgacgactgatgatcacatcgaggatccagttactgcagctgaggaaatagcattctgcagagcatgtgctcgatttggtctcggcttgtatctataccacgaatagttcaccgatcatatcaagtttccttactgtttttcaagaccctcaattccgtgatctgtttgttttttcttccttctttttgacatccttgtgttatctagagtaccaaaacatgcaattaacaggagtttttatgtataaccaaactcttcatgttataatatatacagttacattacat

SEQ ID NO: 103392 - protein, 219 aa, Arabidopsis thaliana
  peptide (1)..(219): Ceres Seq. ID no. 13612666
PLSSPVFLFPNSQFCSDKKSMALQVQQTSAAFTISSPSTAAARIKLSPFRTVAVNRGVRCSGGGVGGGDAGKKKAVPNSNYVVPIDKFSSSSSITRPLIEILRDLNKKIPDNIVKSHDPPSTSAATSGFIPWYHANRMLSFYAPGWCGEVRDVIFSENGNVTVVYRLTIRGSDGEAHRESTGTVTTTDDHIEDPVTAAEEIAFCRACARFGLGLYLYHE

SEQ ID NO: 103393 - protein, 199 aa, Arabidopsis thaliana
  peptide (1)..(199): Ceres Seq. ID no. 13612667
MALQVQQTSAAFTISSPSTAAARIKLSPFRTVAVNRGVRCSGGGVGGGDAGKKKAVPNSNYVVPIDKFSSSSSITRPLIEILRDLNKKIPDNIVKSHDPPSTSAATSGFIPWYHANRMLSFYAPGWCGEVRDVIFSENGNVTVVYRLTIRGSDGEAHRESTGTVTTTDDHIEDPVTAAEEIAFCRACARFGLGLYLYHE

SEQ ID NO: 103394 - DNA, 1708 bp, Arabidopsis thaliana
  misc_feature (1)..(1708): Ceres Seq. ID no. 13612672
  misc_feature (1)..(1708): Ortholog of  Ceres SEQ ID NO 13639663 as cited in SEQ ID NO 57850
atcttctacacagttctgaagcaacaaaacagggttttggctagggttttaactttggctgctctgtctcaatccctcgagacttaaacccacttagtacaatctccatataatttgagtagaacctaaaagatcgaagcttgaggaaaatggtcccttccaatggcgcaaaggttcttcgcttgttgagtcgtcgatgtctctcttcatcgcttattcaagatttagccaatcagaaactgagaggagtatgtattgggagttataggagattgaatacgagtgttggcaatcatgctaacgtgattggagattacgcttcaaaatctggacatgatcggaaatggatcaactttggaggttttaatactaattttggttctacaaggtcttttcatggaacaggttcttcgtttatgtctgctaaggactactatagtgttcttggagtgagtaagaatgctcaagaaggtgaaatcaagaaggcttattatgggcttgctaagaaactccatcctgatatgaataaagatgatccagaagctgagacgaagttccaggaagtctcaaaagcatatgaaattttgaaagataaggagaagcgtgacctttatgaccaggttggtcatgaagcatttgagcaaaatgctagtggtggatttccaaatgatcaaggcttcggtggtggtggtggtggtgggtttaacccatttgatatctttgggagcttcaatggcgatatttttaacatgtaccggcaagatattggaggtcaagatgtcaaggttttgcttgatctttctttcatggaagctgttcaaggatgctccaaaactgtgacttttcaaaccgagatggcttgtaatacttgtggtggacaaggtgttcctcctggtaccaaacgagagaaatgcaaagcctgtaatggctctgggatgacctcactgaggaggggtatgttaagcatccaaacaacttgccagaagtgtggtggagctggtcaaacgttctcaagtatttgcaaatcctgtagaggggctagagtggttcgaggacagaagtcagtgaaagtcactattgatccaggggttgacaatagtgatacattaaaggtggcaagggtgggtggggctgatcctgaaggtgaccagcctggagatctttatgttactctcaaggttcgtgaagatcctgtgttccgcagagaaggatcggatattcatgtggacgcggttctcagtgttacccaggccattcttggaggaaccattcaagttccaaccctcactggtgatgttgtcgtgaaggtccgtcctggaacccaacctggtcacaaagtagtgctaagaaataaaggaattagagcaagaaagtcgactaaatttggggatcagtatgtgcatttcaacgtcagcatccctgcaaatataacgcagagacagcgtgaactgcttgaggaatttagtaaagcagaacaaggtgaatacgagcagcgcacagcaactggatcttcccagtgaaaaatgcaaatgctgctataagcctaaaaagctattgttgtggctgtatcaatggatatataatcaatcagacaatgattgagattatattgcgtaggattagtggagagtattgtctgggttttacttttaactaattctacaatgctacaagataaaaagaaggaaaagcctgtgctgttattgcc

SEQ ID NO: 103395 - protein, 456 aa, Arabidopsis thaliana; identical to SEQ ID NO: 29406
  peptide (1)..(456): Ceres Seq. ID no. 13612673

SEQ ID NO: 103396 - protein, 367 aa, Arabidopsis thaliana; identical to SEQ ID NO: 29407
  peptide (1)..(367): Ceres Seq. ID no. 13612674

SEQ ID NO: 103397 - protein, 332 aa, Arabidopsis thaliana; identical to SEQ ID NO: 29408
  peptide (1)..(332): Ceres Seq. ID no. 13612675

SEQ ID NO: 103398 - DNA, 1464 bp, Arabidopsis thaliana
  misc_feature (1)..(1464): Ceres Seq. ID no. 13612680
  misc_feature (1)..(1464): Ortholog of  Ceres SEQ ID NO 15178909 as cited in SEQ ID NO 0
ataaaaaataaaaaatactgtaaaataaatagatagtcataactagtgtattacaaaaaaaaaataaagtaaataaaagtaatcactagctagtgactaaactaaatcccaattatgggtcgtgtacattttggtgtatcagcattctttgttttttgtttgttaggtttatcagctaatgcaaagatcttcaatattaattctcctccaggttctgatatcactaacgcattgttgaaagcattcaatgaggcatgccaattcccgacaaagagcaccgttatgatcccaaaaggtgaatacaagcttggggagatcgtgatgatgggtccatgcaaagctcctataaggattgctcttctaggtaccgtgaaagctgacggtaacgctaatggaaaggagaaatgggtcgctttccgcaacattaatgggtttaagttgaacggaggtggtgttttcgacggtgaaggaaacgcagcttggagggtcaacaactgccacaagactttcaactgcaagaagctccccatcagcattaggtttgatttcgtcaccgacgcgaaaattagaggcattacctccttagatgcaaagcacttccacattaacgtcattggagcaaagaacgtgacattcgaagacgtcaagatcattgcccctgcagagagtcccaacaccgatggtatccacgttggaagaagtgacggaatcaagatcatcaattcatttatctccacaggagatgactgtgtctctgttggagatgggatgaagaaccttcttgtcgaaagagttacatgcggtccgggacatggaatcagtattggaagtcttggaaggtacagccacgaggaaaacgttagtggcatcaagatcatcaactgcactctccaagagactgacaatggtctaaggatcaagacatggccttctgctgcttgtaccacaaccgcctccgatatccatttcgagaacatcctcctcaagaacgtcagcaaccccatcctcatcgaccaagagtactgcccatggaaccaatgcaacaagcagaaaccatcaacgatcaagttggccaacattagcttcaagaagatcagaggaacatcaggaaacaaagacgcagtgaagcttttgtgtagcaagggatatccatgtcagaacgttgaggttggtgacgtgaacatccagtataccggagcagatggtccagcgactttccaatgctctaacgtatcaccaaagcttgtgggaactcagattccaaaagcgtgtagcagcccggtgacaaagccaccaaagtagaatgtgtatatattataaactcaatacacaatctaaatgtacacccttagtgtatgctgtatgcttcaattgatatctttgtgaaatgacctatttttttgagcttttggtatattgtaagaaatgaaccattcttgaaaaaaaaaaacatctaactaattt

SEQ ID NO: 103399 - protein, 395 aa, Arabidopsis thaliana; identical to SEQ ID NO: 30029
  peptide (1)..(395): Ceres Seq. ID no. 13612681

SEQ ID NO: 103400 - protein, 339 aa, Arabidopsis thaliana; identical to SEQ ID NO: 30030
  peptide (1)..(339): Ceres Seq. ID no. 13612682

SEQ ID NO: 103401 - protein, 326 aa, Arabidopsis thaliana; identical to SEQ ID NO: 30031
  peptide (1)..(326): Ceres Seq. ID no. 13612683

SEQ ID NO: 103402 - DNA, 1869 bp, Arabidopsis thaliana
  misc_feature (1)..(1869): Ceres Seq. ID no. 13612691
  misc_feature (1)..(1869): Ortholog of  Ceres SEQ ID NO 14308221 as cited in SEQ ID NO 60363
aatcacaagacaaccacaaaactctcactccaaaactctcaattttgccttcctttgatcgaatactacaatggcgtctgtatctgcaattggagttctcaaggtacctcctgcttcgacttccaattccaccggaaaagccacggaggcggttcccacgaggactctttctttctcctcctctgttacttcatccgacgacaagatttcactcaaatccaccgtctcccgtctttgtaaatctgttgttcgcaggaatccgatcatcgtctctcccaaagccgtctcagattctcaaaactctcaaacttgtctcgatcctgatgctagcagcagtgttttggggataatcttaggaggtggagctggaactcgtctttatccacttacgaagaagagagcgaaaccagctgtgcctcttggtgctaactataggcttattgatattcctgtgagcaactgtttgaatagcaacatatccaagatctatgttcttactcagttcaattccgcgtctttgaatcgtcatctttcacgagcttatgctagtaacatgggaggttataagaatgaaggattcgttgaagttctcgctgctcaacagagtcctgaaaaccccaactggttccaggggacagctgatgccgtcaggcaatacttgtggttgttcgaggagcataatgtcttggagtatctcattcttgctggggatcatttgtatagaatggactatgagaagtttattcaagcacatagggagactgatgctgatatcacagtagctgcattaccaatggacgagcaacgagccactgcttttgggctgatgaagattgatgaggaaggacgtattattgaatttgctgaaaaaccaaaaggggagcacctaaaggccatgaaggttgacacaacaattctaggtcttgatgatcagagagccaaggagatgcctttcattgctagtatgggtatttatgttgtaagcagagatgtaatgctagacttactacggaatcagtttcctggagctaatgactttggaagtgaagtcattcccggtgccacttcccttggactgagggtgcaagcttacctatatgatggttactgggaagacattggtactatagaggcattttataacgctaatcttggaatcaccaagaaaccagttcctgattttagtttctatgaccgttctgctccgatctacacacagccgcgttatttaccaccgtctaagatgcttgatgctgatgttactgacagtgtcatcggagagggctgtgttatcaagaactgcaaaattcatcactctgtggttggactccgttcctgcatatcagaaggtgctattattgaagattcgttattaatgggagctgattattacgagactgctacggaaaagagcctcttaagcgcgaaaggaagtgtacccataggtattgggaaaaactcgcacatcaaaagggccatcatcgacaaaaacgcacgtatcggtgacaatgtcaagatcataaacagcgacaacgtgcaagaggcagcgagagagactgatggatatttcataaagagcggaattgtaacggttatcaaagacgccttaatcccaaccggcactgtcatctgaagtacacataatgctcctttgtttatttcttcatctttctaatgccctatcaataagttttctttatggctttttaagccccaataaatctactactagttgtaatgctgcttacgaaagagattacgaaatcatgttttcacaataccattgtctcttttgagaaaaaagaagaccctatgaatttcactaaatttatcttttgtagcttattatcaataaaattaagtttcttc

SEQ ID NO: 103403 - protein, 520 aa, Arabidopsis thaliana; identical to SEQ ID NO: 27025
  peptide (1)..(520): Ceres Seq. ID no. 13612692

SEQ ID NO: 103404 - protein, 359 aa, Arabidopsis thaliana; identical to SEQ ID NO: 27026
  peptide (1)..(359): Ceres Seq. ID no. 13612693

SEQ ID NO: 103405 - protein, 302 aa, Arabidopsis thaliana; identical to SEQ ID NO: 27027
  peptide (1)..(302): Ceres Seq. ID no. 13612694

SEQ ID NO: 103406 - DNA, 840 bp, Arabidopsis thaliana
  misc_feature (1)..(840): Ceres Seq. ID no. 13612703
  misc_feature (1)..(840): Ortholog of  Ceres SEQ ID NO 15178424 as cited in SEQ ID NO 1107
  misc_feature (1)..(840): Ortholog of  Ceres SEQ ID NO 13661185 as cited in SEQ ID NO 61118
  misc_feature (1)..(840): Ortholog of  Ceres SEQ ID NO 14309350 as cited in SEQ ID NO 0
  misc_feature (1)..(840): Ortholog of  Ceres SEQ ID NO 15175181 as cited in SEQ ID NO 0
acacgaaacgattccgcttctccgcttccttcataaatatctcactcatcgtctctagattgttctttcacacgcaattttcatttctctcttaaccgtaaacgaatctctcttctcaaagttttattttctctctgcgatggctcaagaagatgttactgctgttgctactaacggtgctggtccggtggagacgcatcttgtcttcactgagttcaagcagatgttgctcgttgaagctcaaaaggtcggtgacgctgttactttctacaaatctgcttttggtgcgatcgagtctggtcattctctttaccctaagcgtaagcttgaccaagagcttcctcatgttctctcttctgagcttaatctcgctggctcttccttcgttgtttgcgacgtttcctctctccctggtttttctactgcgaaatcggaaggttcgggagtgacttttcttctcggaactaaggatgctgaagccgccgttgcgaaagctgttgacgccggagctgtgaaagtggaggttacggaggcagaagttgaactgggattcaaaggaaaagttacggatccttttggtgtcacttggatcttcgcggagaagaagaccgtgatcaccgacgagaacaaagaggtttagaatctgtcgtcggatctaattcttcgtcggtttctgaacaaaaaaaactatctattatcctaggtttatgcttttattttgtcttttgtggaatccggtaatcagtaaaccggatcgagtaggctaatgactttcggattctaatttcaccccttttgacaaactctaatcttggtgaaattgcatattaatctcgggct

SEQ ID NO: 103407 - protein, 166 aa, Arabidopsis thaliana; identical to SEQ ID NO: 21805
  peptide (1)..(166): Ceres Seq. ID no. 13612704

SEQ ID NO: 103408 - protein, 138 aa, Arabidopsis thaliana; identical to SEQ ID NO: 21806
  peptide (1)..(138): Ceres Seq. ID no. 13612705

SEQ ID NO: 103409 - protein, 98 aa, Arabidopsis thaliana
  peptide (1)..(98): Ceres Seq. ID no. 13612706
MLLLLLLTVLVRWRRILSSLSSSRCCSLKLKRSVTLLLSTNLLLVRSSLVILFTLSVSLTKSFLMFSLLSLISLALPSLFATFPLSLVFLLRNRKVRE

SEQ ID NO: 103410 - DNA, 1246 bp, Arabidopsis thaliana
  misc_feature (1)..(1246): Ceres Seq. ID no. 13612717
  misc_feature (1)..(1246): Ortholog of  Ceres SEQ ID NO 15171275 as cited in SEQ ID NO 51428
aaaaaatctcacaatcgttttttgcttatctctttcaatggacacctctctctcccaccacggatctctcccgtttcccccatcgcgccgcaatttcgttaaacaaaaccgcggcggcgattgcgtttttctcccctcgcgtcgtaagttccgatacgattcgttggtggtggtttccgctgcgtcttcgggacagagcatcgacgcgcctctagttccacggtcgcctcagggaaggtttctaagttccgtcttggtgaaaaaacggcagctctttcatttcgccgtcgctgatttgcttaaacagctcgctgatgataaggaagcttccttatctcgtatgttccttagttatggttccgatgaagcttccctccacagaaggatagctcaacttaaggagagtgattgccaaattgcaattgaagacataatgtacatgttgatcttgtacaaattctcagagataagagtgcctcttgttccaaagcttcccagttgcatttacaacggaagactcgagatctcgccttcgaaagactgggaacttgagtcaatccatagctttgacgttcttgaactcatcaaagaacatagtaacgcagtcatcagtttaagagtgaattcgagtttgactgacgattgtgcgacaacggagatagataagaatcgtctcagtaaagtatacacagcttcggtcttatatggatactttttaaaatctgcttctcttagacaccaactcgaatgctcattatcacaacaccatggaagtttcactaagcaactgaggcattacatttctgagttcgatcccaagatattgcggagatgcgcaaaaccaaggtcacatgaagcaaaaagcctgatagaaaagcagagtttagctctttttggtcctgaggaaagcagcaaagagagcattgtgacatcgttttctagcctgaagaggttgcttcttgaggctgtggcgtttggtacgtttctatgggacacagaggagtatgtagatggcgcgtttaagctcaaggagaatgagaatgcagaggaagaaacaaatagcagtgtttgaagtatgtatgaaccagtttgctagaagaaaacttgaatatcttttttggtggacattgcatataatatatagattaaatcagggtcaatggctatatgaaattatttttgtctatagtttgagtaatcatatgtatagtgtataatggatgatttaatagagagattggttttg

SEQ ID NO: 103411 - protein, 356 aa, Arabidopsis thaliana
  peptide (1)..(356): Ceres Seq. ID no. 13612718
KNLTIVFCLSLSMDTSLSHHGSLPFPPSRRNFVKQNRGGDCVFLPSRRKFRYDSLVVVSAASSGQSIDAPLVPRSPQGRFLSSVLVKKRQLFHFAVADLLKQLADDKEASLSRMFLSYGSDEASLHRRIAQLKESDCQIAIEDIMYMLILYKFSEIRVPLVPKLPSCIYNGRLEISPSKDWELESIHSFDVLELIKEHSNAVISLRVNSSLTDDCATTEIDKNRLSKVYTASVLYGYFLKSASLRHQLECSLSQHHGSFTKQLRHYISEFDPKILRRCAKPRSHEAKSLIEKQSLALFGPEESSKESIVTSFSSLKRLLLEAVAFGTFLWDTEEYVDGAFKLKENENAEEETNSSV

SEQ ID NO: 103412 - protein, 344 aa, Arabidopsis thaliana; identical to SEQ ID NO: 27936
  peptide (1)..(344): Ceres Seq. ID no. 13612719

SEQ ID NO: 103413 - protein, 243 aa, Arabidopsis thaliana; identical to SEQ ID NO: 27937
  peptide (1)..(243): Ceres Seq. ID no. 13612720

SEQ ID NO: 103414 - DNA, 952 bp, Arabidopsis thaliana
  misc_feature (1)..(952): Ceres Seq. ID no. 13612725
  misc_feature (1)..(952): Ortholog of  Ceres SEQ ID NO 13595271 as cited in SEQ ID NO 56058
  misc_feature (1)..(952): Ortholog of  Ceres SEQ ID NO 14315170 as cited in SEQ ID NO 60009
  misc_feature (1)..(952): Ortholog of  Ceres SEQ ID NO 13656105 as cited in SEQ ID NO 65310
aagtttctgagatttccggatttagatttagggttttgtaactttggagagctcaagttcggtttcgttcatctccctcttaattcactttaattcagggtttagggtttcatttattttgttttccccaattcgatatgtattctgatctagtggtggctgaaactaaaatcagcaaaacgttcaagaaccgtctcaatggtggttccggtgacttctcttctcgcggcaaacaacaacaagtcacaaggaagagaggaaggcaagatgatgataagtgggagcatgatcttttcgaagacgatgacgagcctcggctttcaaaacgtagagttgaccctaaagatcttcgcttgaagctccaaaagaaacgtcatggctcgcaaattggtggacgagtatttagtgtaagcgtggcggatctacgagataagttatccaggacagtgaatccacaaacaaagaacagtaaaagggaggctgttagaccagccataaagaaggtttcagtgggaaccaaacccgagactagagcggctccgaatagagctaccaagaaggatccacagcagaatgatgcatcggttgatagcttcctggaatcattgggtctcgagaaatattcgactgcatttcaagtggaagaagttgatatggatgctcttaggcatatgacagatgatgacctcaaagctttgctcataccaatgggacctaggaagaagatacttcttgctttgggagataaccgtggatagtccagcttcgagcttaggtgcatgatgatacacatctcggatattgtcagaaagatgctgcattttgacttttcattgtctttttatctttctcatatgtatctcaagagacaacaagtagttagagttttgagattaaacagttgtaaccttttaacatagagagacaagaggagcaatgttggaatgtgttt

SEQ ID NO: 103415 - protein, 206 aa, Arabidopsis thaliana
  peptide (1)..(206): Ceres Seq. ID no. 13612726
MYSDLVVAETKISKTFKNRLNGGSGDFSSRGKQQQVTRKRGRQDDDKWEHDLFEDDDEPRLSKRRVDPKDLRLKLQKKRHGSQIGGRVFSVSVADLRDKLSRTVNPQTKNSKREAVRPAIKKVSVGTKPETRAAPNRATKKDPQQNDASVDSFLESLGLEKYSTAFQVEEVDMDALRHMTDDDLKALLIPMGPRKKILLALGDNRG

SEQ ID NO: 103416 - DNA, 2870 bp, Arabidopsis thaliana
  misc_feature (1)..(2870): Ceres Seq. ID no. 13612727
  misc_feature (1)..(2870): Ortholog of  Ceres SEQ ID NO 13654989 as cited in SEQ ID NO 63117
  misc_feature (1)..(2870): Ortholog of  Ceres SEQ ID NO 13584744 as cited in SEQ ID NO 69137
aatatagaacaattagttatatatgttcttcagatttcaatcaggaaattagaacatgctcttttgggttttgctcagtagtttctgtgtgttttgtttctccagtccagatggtttcttgagcttatcatgtggcggctcaagttacaccgctgcttataacatctcatgggtttcagacaacgattatatcgaaacaggtaacactaccacggttacttacgccgaggggaattctacttccagtgttcccatcagattattcccggatcctcaaggtcgccaatgttacaagttacctgtgaggaaagacttgtcttcagttctgattcgtgctacattcgtttatagaaactatgatagccagaatagtcctccagcatttcatgtctctcttggaaggagaatcactagtactgttgatcttagaaccaatgatccttggattgaagagttagtttggccagtcaacaatgattctcttttgctttgcttgcttgcggttaaaggaagaggtattccggttatctcttctctagaagtacggccacttcctttaggttcttacaaatacagcctggagggttcaccagatataattctcaggagaagttaccgaatcaatagcggatacacaaatgggactatccggtatccttcagatccatttgatcgaatatgggatccggatcaaagttattcaccgtttcacgcctcttggagcttcaatggactcacaaaattgaattccttcaatattactgagaatccaccagcttctgttcttaagacagcaagaattcttgctcgcaaagaaagtctttcatatactctttctctacatacaccaggggactactacattatcctctactttgctgggatactctcactctccccttcttttagtgtgacgatcaatgatgaagtcaaacaatctgattacaccgtaactagctcagaagctggtaccttgtactttacgcaaaaaggaatcagtaagttaaacatcaccctcagaaaaatcaagttcaatcctcaagtgagtgctcttgaggtatatgaaatcctccaaatccctcctgaagcttcttctaccacagtttcggcacttaaagtcatagagcaatttaccgggcaagaccttggatggcaagacgacccatgcacaccgcttccttggaaccacatcgaatgtgaaggaaaccgtgttacatcattgttcctttcaaaaatcaacctgaggtccattagtccaacattcggagacttgctcgatctcaaaacactcgacttgcataatacatcacttacaggagcaatacagaatgtaggcagccttaaggatctccagaaactgaatttgagcttcaatcagttagaatcttttggctccgagctggaagatctggttaaccttgaagttctggacctgcaaaacaacagcttacaaggatcagttcctgaaacattaggaaagctgaagaaacttcgtctcctgaatctggaaaacaataacttagtaggtcccttgccacagtctcttaacataacgggtctggaagtcaggataacgggaaatccatgcctttcgttctcttcaatatcatgcaacaatgtgtcttcaacaattgacacaccacaagtcactatccctatcaataagaaacaaagaaaacagaaccgtatagcgatcttgcttggagtttctggtggagccttgtttgccacctttcttgtctttgttttcatgtcgatcttcacgaggagacagagaaacaaagagagagatataaccagagcacaactgaaaatgcagaactggaacgcttcaagaatcttttctcacaaagagatcaagtcagctactagaaatttcaaggaagtgattggtcgtggaagttttggagctgtataccgtggaaaactaccagatggaaaacaagttgcggtcaaagtgcgatttgatagaactcaacttggagctgattctttcatcaatgaggtgcaccttttgtctcagatccgccaccaaaatctagtttcatttgagggcttctgctatgaaccaaaacgtcaaatactggtgtatgagtatctgtctggtggatccttagctgatcacctttacggtccacgtagcaaaaggcattcattgaactgggtttcaagactaaaagttgctgttgatgctgcaaaaggattggactacctgcataatggaagtgagccgagaattatacatcgggatgtaaagagcagtaacatacttttagacaaggatatgaacgcgaaagtttctgattttggcctgtcaaaacaatttacaaaagcagatgcatctcatattactactgttgttaaaggcaccgcaggctaccttgaccccgaatattactctaccctgcagctgacagagaaaagtgatgtctatagctttggtgtggttctgttggagcttatctgtggaagagaacccttaagtcactcaggatcaccagattcgtttaacttggtcttatgggctaggccaaacttacaagcaggagcttttgagattgtggatgatatcttgaaggagacatttgatccagcgagcatgaaaaaagctgcttcgattgctataagatgtgtgggaagagatgcatctggaagaccgtctatcgccgaagttttgactaaactgaaagaagcgtacagtcttcaactctcatatctagctgcttcagcacatacagactgataacacatcacaaacaagagtaaatacataacttgtattatttttttttgtttttccgtttgtgttacatatatttgtaatccaactgaaaatgtatttactcttatactaactacattttatcatt

SEQ ID NO: 103417 - protein, 895 aa, Arabidopsis thaliana
  peptide (1)..(895): Ceres Seq. ID no. 13612728
MLFWVLLSSFCVFCFSSPDGFLSLSCGGSSYTAAYNISWVSDNDYIETGNTTTVTYAEGNSTSSVPIRLFPDPQGRQCYKLPVRKDLSSVLIRATFVYRNYDSQNSPPAFHVSLGRRITSTVDLRTNDPWIEELVWPVNNDSLLLCLLAVKGRGIPVISSLEVRPLPLGSYKYSLEGSPDIILRRSYRINSGYTNGTIRYPSDPFDRIWDPDQSYSPFHASWSFNGLTKLNSFNITENPPASVLKTARILARKESLSYTLSLHTPGDYYIILYFAGILSLSPSFSVTINDEVKQSDYTVTSSEAGTLYFTQKGISKLNITLRKIKFNPQVSALEVYEILQIPPEASSTTVSALKVIEQFTGQDLGWQDDPCTPLPWNHIECEGNRVTSLFLSKINLRSISPTFGDLLDLKTLDLHNTSLTGAIQNVGSLKDLQKLNLSFNQLESFGSELEDLVNLEVLDLQNNSLQGSVPETLGKLKKLRLLNLENNNLVGPLPQSLNITGLEVRITGNPCLSFSSISCNNVSSTIDTPQVTIPINKKQRKQNRIAILLGVSGGALFATFLVFVFMSIFTRRQRNKERDITRAQLKMQNWNASRIFSHKEIKSATRNFKEVIGRGSFGAVYRGKLPDGKQVAVKVRFDRTQLGADSFINEVHLLSQIRHQNLVSFEGFCYEPKRQILVYEYLSGGSLADHLYGPRSKRHSLNWVSRLKVAVDAAKGLDYLHNGSEPRIIHRDVKSSNILLDKDMNAKVSDFGLSKQFTKADASHITTVVKGTAGYLDPEYYSTLQLTEKSDVYSFGVVLLELICGREPLSHSGSPDSFNLVLWARPNLQAGAFEIVDDILKETFDPASMKKAASIAIRCVGRDASGRPSIAEVLTKLKEAYSLQLSYLAASAHTD

SEQ ID NO: 103418 - DNA, 1595 bp, Arabidopsis thaliana
  misc_feature (1)..(1595): Ceres Seq. ID no. 13612737
  misc_feature (1)..(1595): Ortholog of  Ceres SEQ ID NO 15174752 as cited in SEQ ID NO 53279
  misc_feature (1)..(1595): Ortholog of  Ceres SEQ ID NO 14308389 as cited in SEQ ID NO 55226
  misc_feature (1)..(1595): Ortholog of  Ceres SEQ ID NO 15226087 as cited in SEQ ID NO 58655
  misc_feature (1)..(1595): Ortholog of  Ceres SEQ ID NO 13597162 as cited in SEQ ID NO 63955
  misc_feature (1)..(1595): Ortholog of  Ceres SEQ ID NO 14308049 as cited in SEQ ID NO 66203
  misc_feature (1)..(1595): Ortholog of  Ceres SEQ ID NO 14313292 as cited in SEQ ID NO 67393
  misc_feature (1)..(1595): Ortholog of  Ceres SEQ ID NO 14313567 as cited in SEQ ID NO 68074
agatcaaactcaaaacaaaatttgtttgttcgtttgatctttcttaaaaatatgaaaattaacatcagagattccaccatggtccggcctgccaccgagacaccaatcactaatctttggaactccaacgtcgaccttgtcatccccagattccatacccctagtgtctacttctacagacccaccggcgcttccaatttctttgaccctcaggtcatgaaggaagctctttccaaagcccttgtccctttttaccctatggctggtcgcttgaagagagacgatgatggtcgtattgagatcgattgtaacggtgctggtgttctcttcgttgtggctgatactccttctgttatcgatgattttggtgattttgctcctacccttaatctccgtcagcttattcccgaagttgatcactccgctggcattcactctttcccgcttctcgttttgcaggtgactttctttaaatgtgggggagcttcacttggggttgggatgcaacatcacgcggcagatggtttctctggtcttcattttatcaacacatggtctgatatggctcgtggtcttgacctaaccattccacctttcattgatcgaacactcctccgagctagggacccgccacagcctgcttttcatcatgttgaatatcagcctgcaccaagtatgaagatacctcttgatccgtctaaatcaggacctgagaataccactgtctctatattcaaattaacacgagaccagcttgttgctcttaaggcgaaatccaaggaggatgggaacactgtcagctacagctcatacgagatgttggcagggcatgtgtggagatcagtgggaaaggcgcgagggcttccaaacgaccaagagacgaaactgtacattgcaactgatggaaggtctagactacgtccgcagctgcctcctggttactttgggaatgtgatattcactgcaacaccattggctgttgcaggggatttgttatctaagccaacatggtatgctgcaggacagattcatgatttcttggttcgtatggatgataactatctgaggtcagctcttgactacctggagatgcagcctgatctgtcagcccttgtccgcggtgcacatacctacaagtgcccaaatttgggaatcacaagctgggttagattacctatttatgatgcagactttggttggggtcgtcctatctttatgggacctggtggaattccatacgagggtttgtcttttgtgctaccaagtcctactaatgatggcagcttatccgttgccattgccctccaatctgaacacatgaaactgtttgagaagtttttgtttgagatatgagagcgttaagccctcgtttttccctcagtaaatttgggcaaatttgcttcttgtcatcatcctgtgttttagagggtacaacaaatcataaggtgtgcttatggtctgtaactttggactatgtcgtataggaacttttgctttatgttaatacagatgataagtgttgttctataacacatgccgtgattgttttgtgtctcattggttatatccaccatgctgtatgattttcagcttcc

SEQ ID NO: 103419 - protein, 450 aa, Arabidopsis thaliana
  peptide (1)..(450): Ceres Seq. ID no. 13612738
RSNSKQNLFVRLIFLKNMKINIRDSTMVRPATETPITNLWNSNVDLVIPRFHTPSVYFYRPTGASNFFDPQVMKEALSKALVPFYPMAGRLKRDDDGRIEIDCNGAGVLFVVADTPSVIDDFGDFAPTLNLRQLIPEVDHSAGIHSFPLLVLQVTFFKCGGASLGVGMQHHAADGFSGLHFINTWSDMARGLDLTIPPFIDRTLLRARDPPQPAFHHVEYQPAPSMKIPLDPSKSGPENTTVSIFKLTRDQLVALKAKSKEDGNTVSYSSYEMLAGHVWRSVGKARGLPNDQETKLYIATDGRSRLRPQLPPGYFGNVIFTATPLAVAGDLLSKPTWYAAGQIHDFLVRMDDNYLRSALDYLEMQPDLSALVRGAHTYKCPNLGITSWVRLPIYDADFGWGRPIFMGPGGIPYEGLSFVLPSPTNDGSLSVAIALQSEHMKLFEKFLFEI

SEQ ID NO: 103420 - protein, 433 aa, Arabidopsis thaliana
  peptide (1)..(433): Ceres Seq. ID no. 13612739
MKINIRDSTMVRPATETPITNLWNSNVDLVIPRFHTPSVYFYRPTGASNFFDPQVMKEALSKALVPFYPMAGRLKRDDDGRIEIDCNGAGVLFVVADTPSVIDDFGDFAPTLNLRQLIPEVDHSAGIHSFPLLVLQVTFFKCGGASLGVGMQHHAADGFSGLHFINTWSDMARGLDLTIPPFIDRTLLRARDPPQPAFHHVEYQPAPSMKIPLDPSKSGPENTTVSIFKLTRDQLVALKAKSKEDGNTVSYSSYEMLAGHVWRSVGKARGLPNDQETKLYIATDGRSRLRPQLPPGYFGNVIFTATPLAVAGDLLSKPTWYAAGQIHDFLVRMDDNYLRSALDYLEMQPDLSALVRGAHTYKCPNLGITSWVRLPIYDADFGWGRPIFMGPGGIPYEGLSFVLPSPTNDGSLSVAIALQSEHMKLFEKFLFEI

SEQ ID NO: 103421 - protein, 424 aa, Arabidopsis thaliana
  peptide (1)..(424): Ceres Seq. ID no. 13612740
MVRPATETPITNLWNSNVDLVIPRFHTPSVYFYRPTGASNFFDPQVMKEALSKALVPFYPMAGRLKRDDDGRIEIDCNGAGVLFVVADTPSVIDDFGDFAPTLNLRQLIPEVDHSAGIHSFPLLVLQVTFFKCGGASLGVGMQHHAADGFSGLHFINTWSDMARGLDLTIPPFIDRTLLRARDPPQPAFHHVEYQPAPSMKIPLDPSKSGPENTTVSIFKLTRDQLVALKAKSKEDGNTVSYSSYEMLAGHVWRSVGKARGLPNDQETKLYIATDGRSRLRPQLPPGYFGNVIFTATPLAVAGDLLSKPTWYAAGQIHDFLVRMDDNYLRSALDYLEMQPDLSALVRGAHTYKCPNLGITSWVRLPIYDADFGWGRPIFMGPGGIPYEGLSFVLPSPTNDGSLSVAIALQSEHMKLFEKFLFEI

SEQ ID NO: 103422 - DNA, 690 bp, Arabidopsis thaliana
  misc_feature (1)..(690): Ceres Seq. ID no. 13612745
  misc_feature (1)..(690): Ortholog of  Ceres SEQ ID NO 13595613 as cited in SEQ ID NO 59866
tctctctctctctctctctttgtctccgccatgacaagctcttcatctccttcacgcaaggcgttaagcaagatcgcgtgtaataggttacaaaaggagttatcagagtggcaagtaaatccaccgactgggtttaagcacagagttactgataatcttcaaaaatgggtaattgaggtaacaggagcacctggtacgctttacgctaatgaaacttataatcttcaggttgagtttcctcaacattatcctatggaagctcctcaggtgatttttgttccaccagcaccgttacatcctcatatttacagcaatggacatatttgtttagatattctgtatgactcatggtctccagcaatgacagtgagttcagtctgcatcagcatcctctcaatgctatcaagttcccccgaaaagcaacgcccgactgataacgatcgatatgtgaagaactgcaagaacgggaggtctcctaaagagacaaggtggtggttccatgacgacaaggtttaatgatgacgaccgtaagatgtctctcctttcagttacaaaagaggtttatataatttcccaagactgataatactaattgaaattcctcatggcctcccacttttttttctgtaacggatcattatgtataaatgacatctgaaatgtttcagtgtctgaattaacaccttgtgc

SEQ ID NO: 103423 - protein, 171 aa, Arabidopsis thaliana
  peptide (1)..(171): Ceres Seq. ID no. 13612746
SLSLSLFVSAMTSSSSPSRKALSKIACNRLQKELSEWQVNPPTGFKHRVTDNLQKWVIEVTGAPGTLYANETYNLQVEFPQHYPMEAPQVIFVPPAPLHPHIYSNGHICLDILYDSWSPAMTVSSVCISILSMLSSSPEKQRPTDNDRYVKNCKNGRSPKETRWWFHDDKV

SEQ ID NO: 103424 - protein, 161 aa, Arabidopsis thaliana; identical to SEQ ID NO: 25474
  peptide (1)..(161): Ceres Seq. ID no. 13612747

SEQ ID NO: 103425 - protein, 87 aa, Arabidopsis thaliana; identical to SEQ ID NO: 25475
  peptide (1)..(87): Ceres Seq. ID no. 13612748

SEQ ID NO: 103426 - DNA, 675 bp, Arabidopsis thaliana
  misc_feature (1)..(675): Ceres Seq. ID no. 13612749
  misc_feature (1)..(675): Ortholog of  Ceres SEQ ID NO 12557654 as cited in SEQ ID NO 12
  misc_feature (1)..(675): Ortholog of  Ceres SEQ ID NO 15175150 as cited in SEQ ID NO 0
aaatttcaaaatccctaaaaagctttcaaacaaataaactcagaaaaaatggccgaaaccgaaacggagtcgatcaccacctcttctccaccgccgatctcagaaaccgaaaactccaccacattaccaacaacggagacggagaagaatcccaatccggtaaccatttccctcagaatctggccaccgactcaaaaaactcgcgacgccgtgattaaccgtctgatcgaaacactgtcaaccgaatcaatcctctccaagagattcggatctcttgaatccgaagaagcttcctccgtcgcgaaatcaatcgaagacgaagcttacgccatcgcttctgccaccgtattcggtgatgacgacgggatcgagattcttaaagcttattctaaagagattagtaaacgtatgcttgaatctgttaaggctaagagtaatgtggcttctcctccaccgaaggatggtgatggaattgaatcagctgttgattcgaagattgattcaagtgaagcttgacgaggcttgaatatggtgttgttctcttatctctaactatctttttatttgttttagattggtatgcgattatctatctcagagttttgtttgttgtataacttgtggatttgggacctgttactaatatgattttgtggttgatttggttttgacgtt

SEQ ID NO: 103427 - protein, 155 aa, Arabidopsis thaliana
  peptide (1)..(155): Ceres Seq. ID no. 13612750
MAETETESITTSSPPPISETENSTTLPTTETEKNPNPVTISLRIWPPTQKTRDAVINRLIETLSTESILSKRFGSLESEEASSVAKSIEDEAYAIASATVFGDDDGIEILKAYSKEISKRMLESVKAKSNVASPPPKDGDGIESAVDSKIDSSEA

SEQ ID NO: 103428 - DNA, 1276 bp, Arabidopsis thaliana
  misc_feature (1)..(1276): Ceres Seq. ID no. 13612751
  misc_feature (1)..(1276): Ortholog of  Ceres SEQ ID NO 12337669 as cited in SEQ ID NO 20493
  misc_feature (1)..(1276): Ortholog of  Ceres SEQ ID NO 13597524 as cited in SEQ ID NO 64782
atgaatatcgttggattgagcaaacgtttcttctccgatcgtcgctctcttcacgggatcaacaatgctctcttgaaaacagtgttcaccggtcggaaaccgattctcggattctccggccgatcgattcacgagctacgcaaaactgggaatttcgtaatccctcgtgttttctccgtgtcgcgaaatctaacgacgaaggcttcgtcttcttcttcgaaacaacctgcgtttctacgatggtatttgagaaagctcgaatcacatccttttatgactaagagtatcactacttctgtcatctatatggctgcagatctcacttctcagatgatcacaatggagccaactggttcttttgacttgataagaacagcgagaatggcgagctttgggttgatatttctcgggccgtctcagcatctgtggttcagttatctttcgaagatattgccaaagcgcgacgtgttgacaacctttaagaaaataatgatggggcaggttcttttcggacctgttagcaacacagtcttctattcctacaatgctgctttacaaggcgaaaattctgaggaaattgtggcgagattgaagagagatcttctgccaacattgaaaaatggacttatgtattggccggtctgtgattttgttacattcaagtatgtgccagttcatctacagttattgcttgtaacgtcagtttttgggggttgggtttcttctcccttcctacatcctctctcttctctttctctacactttcatctaatggccggcctgagatggagagagtggtggaacacgatggccttccccacccggcgtatctggaatcgtttcaccgttcgcgtcgggtttcgacacagcggacttttgaggttagaacatgacgtgagttcttgcgagtatgaagacatacacataatgtggaatttgttacacaagaatgaagatcttacacgcgtaccaatccaacaacaacaacaacagaggaagaaaccttgttggaatcttcttggttcgtatctttgccaaagattctgatccgttttatgatataaaccaaaccattgttgtatttgagagagccttgacgggtcccttgcagtgtggtgtggttttattgacaaatttcgcaaataatgaatccgaggttgcagagttttaaattagctgttatatattccattgcatacctctatgtacttatcatcacatgagtgttgtatatatattacaaaatgctttacatagtttgatactacctatgttc

SEQ ID NO: 103429 - protein, 348 aa, Arabidopsis thaliana
  peptide (1)..(348): Ceres Seq. ID no. 13612752
MNIVGLSKRFFSDRRSLHGINNALLKTVFTGRKPILGFSGRSIHELRKTGNFVIPRVFSVSRNLTTKASSSSSKQPAFLRWYLRKLESHPFMTKSITTSVIYMAADLTSQMITMEPTGSFDLIRTARMASFGLIFLGPSQHLWFSYLSKILPKRDVLTTFKKIMMGQVLFGPVSNTVFYSYNAALQGENSEEIVARLKRDLLPTLKNGLMYWPVCDFVTFKYVPVHLQLLLVTSVFGGWVSSPFLHPLSSLSLHFHLMAGLRWREWWNTMAFPTRRIWNRFTVRVGFRHSGLLRLEHDVSSCEYEDIHIMWNLLHKNEDLTRVPIQQQQQQRKKPCWNLLGSYLCQRF

SEQ ID NO: 103430 - protein, 257 aa, Arabidopsis thaliana
  peptide (1)..(257): Ceres Seq. ID no. 13612753
MTKSITTSVIYMAADLTSQMITMEPTGSFDLIRTARMASFGLIFLGPSQHLWFSYLSKILPKRDVLTTFKKIMMGQVLFGPVSNTVFYSYNAALQGENSEEIVARLKRDLLPTLKNGLMYWPVCDFVTFKYVPVHLQLLLVTSVFGGWVSSPFLHPLSSLSLHFHLMAGLRWREWWNTMAFPTRRIWNRFTVRVGFRHSGLLRLEHDVSSCEYEDIHIMWNLLHKNEDLTRVPIQQQQQQRKKPCWNLLGSYLCQRF

SEQ ID NO: 103431 - protein, 246 aa, Arabidopsis thaliana
  peptide (1)..(246): Ceres Seq. ID no. 13612754
MAADLTSQMITMEPTGSFDLIRTARMASFGLIFLGPSQHLWFSYLSKILPKRDVLTTFKKIMMGQVLFGPVSNTVFYSYNAALQGENSEEIVARLKRDLLPTLKNGLMYWPVCDFVTFKYVPVHLQLLLVTSVFGGWVSSPFLHPLSSLSLHFHLMAGLRWREWWNTMAFPTRRIWNRFTVRVGFRHSGLLRLEHDVSSCEYEDIHIMWNLLHKNEDLTRVPIQQQQQQRKKPCWNLLGSYLCQRF

SEQ ID NO: 103432 - DNA, 1239 bp, Arabidopsis thaliana
  misc_feature (1)..(1239): Ceres Seq. ID no. 13612762
  misc_feature (1)..(1239): Ortholog of  Ceres SEQ ID NO 14315223 as cited in SEQ ID NO 52527
  misc_feature (1)..(1239): Ortholog of  Ceres SEQ ID NO 14307085 as cited in SEQ ID NO 54749
atcttttcttacaaagactttttgacatctccccctccagctattatatagtctccttttttcttttctgcattcacataatatttcccctatatagtttacacaacatcatacccaccaacatatataatcttgatcatagagagataaacagaggccgctatcaagaacaagactaagaacaagacttcactaggagtacaagtatgggaagagcaccgtgttgtgacaaagcaaacgtgaagaaagggccttggtctcctgaggaagatgcaaaactcaaatcttacattgaaaatagtggcaccggaggcaattggatcgctttgcctcaaaagattggtttaaagagatgtggaaagagttgcaggctgaggtggcttaactatcttagaccaaacatcaaacatggtggcttctctgaggaagaagaaaacatcatttgtagcctttaccttacaattggtagcaggtggtctataatcgctgctcaattgccgggacgaacagacaacgatataaaaaactattggaacacgaggctcaagaagaaactcattaacaaacaacgcaaggagcttcaagaagcttgtatggagcagcaagagatgatggtgatgatgaagagacaacaccaacaacaacaaatccaaacttcttttatgatgagacaagaccaaacaatgttcacatggccactacatcatcataatgttcaagttccagctcttttcatgaatcaaaccaactcgttttgcgaccaagaagatgttaagccagtgctcatcaagaacatggtcaagatcgaagatcaagaactggagaaaacaaaccctcatcatcatcaagattcaatgacaaacgcttttgatcatctctctttctctcaactcttgttagatcctaatcataaccacttaggatcaggcgagggtttctccatgaactctatcttgagcgccaacacaaactctccattgcttaatacaagtaatgataatcagtggttcgggaatttccaggccgaaaccgtaaacttgttctcaggagcctccacaagtacttcggcagatcaaagcactataagttgggaagacataagctctcttgtttattctgattcaaagcaatttttttaattataataatatattattcttaagatgaaacgtacatcattattattaattgggggtacgtaacgtatatatggaataacgatctagtttgtttaaattt

SEQ ID NO: 103433 - protein, 310 aa, Arabidopsis thaliana; identical to SEQ ID NO: 43028
  peptide (1)..(310): Ceres Seq. ID no. 13612763

SEQ ID NO: 103434 - protein, 181 aa, Arabidopsis thaliana; identical to SEQ ID NO: 43029
  peptide (1)..(181): Ceres Seq. ID no. 13612764

SEQ ID NO: 103435 - protein, 176 aa, Arabidopsis thaliana; identical to SEQ ID NO: 43030
  peptide (1)..(176): Ceres Seq. ID no. 13612765

SEQ ID NO: 103436 - DNA, 1130 bp, Arabidopsis thaliana
  misc_feature (1)..(1130): Ceres Seq. ID no. 13612766
  misc_feature (1)..(1130): Ortholog of  Ceres SEQ ID NO 12633565 as cited in SEQ ID NO 1190
  misc_feature (1)..(1130): Ortholog of  Ceres SEQ ID NO 15171390 as cited in SEQ ID NO 51650
  misc_feature (1)..(1130): Ortholog of  Ceres SEQ ID NO 13594845 as cited in SEQ ID NO 51940
gtgatattaacacttcgaagcttcttcttcctttagtaaattcaagtgtgaggtgtgtttattgataaagtgctcattttctcggatctcagatcttagatccaaaccctcattatttcattgatccaagatctaatagcttgagcttgctgggattttagttatggcgagacggcaagtaggttcaacaagacgtgttggcgatggtggaagcttcccttttgcaggagctttacactcaaagtctcgatcttctccactactatctatttgccttgttcttgtgggggcttgtcttctcattggttatgcttacagtggtccaggtatatttaaaagtatcaaagaagttagcaaagttacaggtgactattcttgcacagcagaagtccaaagagccattcctgtacttaagaaggcttatggagatggcatgcgcaaagtcttgcatgtgggccctgacacatgctcagtggtttccagtctattgaaagaagaagagactgaagcatggggtgttgaaccatatgatattgaggatgcagattctcactgcaagagttttgtgagcaaaggtcttgtacgtgttgctgatatcaagtttcctctgccctaccgggcaaaatccttctctcttgtgattgtgtcagatgctctggattatctctcacccaagtacctgaacaagaccgttcctgaactcgcaagggtggcttcagacggtgtggttctttttgcaggtctccctggtcagcagagagctaaagttgctgaactctctaaattcggccgacccgctaaaatgcgtagcgcatcgtggtggaaccgctttttcgtccagacaaacttagaagaaaacgatgcaccaagcaagaagttcgaacaggctgtttccaaaggattatacaaaccagcctgccaagtcttccacctcaagccattacattaaccagccaccaccaaagcctactggttccacaccaaagcatatttacacgtagagccgcacgcgaaaaaaaaaaatagcgtaatcgatatttctccttgtattttgtaacaggtcagtttttatccttcaatgttgtatccgccaacacaatttttcctattcaattaaatcataattatta

SEQ ID NO: 103437 - protein, 261 aa, Arabidopsis thaliana; identical to SEQ ID NO: 23144
  peptide (1)..(261): Ceres Seq. ID no. 13612767

SEQ ID NO: 103438 - protein, 171 aa, Arabidopsis thaliana; identical to SEQ ID NO: 23145
  peptide (1)..(171): Ceres Seq. ID no. 13612768

SEQ ID NO: 103439 - DNA, 1831 bp, Arabidopsis thaliana
  misc_feature (1)..(1831): Ceres Seq. ID no. 13612773
  misc_feature (1)..(1831): Ortholog of  Ceres SEQ ID NO 14314319 as cited in SEQ ID NO 57500
agattgtgttgttgttgttgttttaacgcttctttctgagataaagacatgcgtttctttttcagctcacattattttcccaaatgttgtgagtttgagaagaaaagtctgtttttttattgagatttttttgtttctatagattctatcgaaatgccgatgtttcagccgttaaagagagatgggttaataggatttgaaggtggtggtgatgggcaagtcttagatctggatactgcagtgaaagatggagttctcggtggtgttaatggtggtggtgttggagttgttgatgagaaattggatctgaagaagatgataaaggagctagatttacaagatataccttctgttttcatttgtcctatctccttagagccgatgcaagatcctgtgactttgtgtactggtcaaacctatgaaaggttaaacattcacaaatggtttaacctaggtcacttgacttgtcctactacaatgcaagagctttgggatgatacggtaactcctaataaaactcttcatcatttgatctatacttggttctctcagaagtatgtgttgatgaagaaacgttctgaggatgttcaaggacgagctattgagattttggggactttgaagaaagctaaaggtcaagctagggttcatgctttgagtgagcttaaacagattgttattgctcatcttatggcgaggaagactgttgttgaagaaggtggtgtctctgtgatctcttctcttttgggtccttttacttctcatgctgttggatctgaggttgttgctattcttgtgagtcttgatcttgattctgattcgaaatccggcttgatgcaaccagctaaggtttctttgattgttgatatgttgaatgatggatctaatgagactaagatcaattgtgctagattgattagaggattggtggaagagaaagggtttagagcagagcttgtttcaagtcatagtttgcttgttgggttaatgagattggttaaggataagagacatagaaatggagtatctcctgcacttcggttgcttaaaccgatttcggttcataaacaagttcgaagcttgatggttagcattggagcagtgcctcaattagttgatatcttaccgtctttagacccggaatgtttggagttagctctgtttgttcttgatgctttgtgtacagacgtggaaggaagagttgctgtcaaagactctgcaaacacaataccttatacagttagggtgctgatgagggtgtctgagaattgcactaactacgcgctgtcgattctttggtctgtctgcaaattagctccagaagaatgttcaccacttgctgttgaggttggtcttgctgcaaagctgttactcgtgatccagagcgggtgtgatgcagcgttgaagcagcggtcagcagagctacttaagctttgtagtctacattattcagacaccatgtttatttccaaatgcaaactcacaaggacaatccaatagcattggcactgattgatcacaggattcagcgggttatccatgaaacggtaaatgtgcattgcattacgaatctgcctttgccctgatgtatatatagatgatgagtttgaagattgagctattggttttggtggtaacaattcaaaggaagaggcaatcagctgatggaaacatggggaagacgaagaaaccgggtggttgagggatcggtatgtaatgttaccatattggttcgttttgcaataagcattgggaattagaaaaaaactgtgtaaagttaccgcctctggctcaaatcaatttcagaagaacaaagaaaaagaagaatttg

SEQ ID NO: 103440 - protein, 448 aa, Arabidopsis thaliana
  peptide (1)..(448): Ceres Seq. ID no. 13612774
MPMFQPLKRDGLIGFEGGGDGQVLDLDTAVKDGVLGGVNGGGVGVVDEKLDLKKMIKELDLQDIPSVFICPISLEPMQDPVTLCTGQTYERLNIHKWFNLGHLTCPTTMQELWDDTVTPNKTLHHLIYTWFSQKYVLMKKRSEDVQGRAIEILGTLKKAKGQARVHALSELKQIVIAHLMARKTVVEEGGVSVISSLLGPFTSHAVGSEVVAILVSLDLDSDSKSGLMQPAKVSLIVDMLNDGSNETKINCARLIRGLVEEKGFRAELVSSHSLLVGLMRLVKDKRHRNGVSPALRLLKPISVHKQVRSLMVSIGAVPQLVDILPSLDPECLELALFVLDALCTDVEGRVAVKDSANTIPYTVRVLMRVSENCTNYALSILWSVCKLAPEECSPLAVEVGLAAKLLLVIQSGCDAALKQRSAELLKLCSLHYSDTMFISKCKLTRTIQ

SEQ ID NO: 103441 - protein, 446 aa, Arabidopsis thaliana
  peptide (1)..(446): Ceres Seq. ID no. 13612775
MFQPLKRDGLIGFEGGGDGQVLDLDTAVKDGVLGGVNGGGVGVVDEKLDLKKMIKELDLQDIPSVFICPISLEPMQDPVTLCTGQTYERLNIHKWFNLGHLTCPTTMQELWDDTVTPNKTLHHLIYTWFSQKYVLMKKRSEDVQGRAIEILGTLKKAKGQARVHALSELKQIVIAHLMARKTVVEEGGVSVISSLLGPFTSHAVGSEVVAILVSLDLDSDSKSGLMQPAKVSLIVDMLNDGSNETKINCARLIRGLVEEKGFRAELVSSHSLLVGLMRLVKDKRHRNGVSPALRLLKPISVHKQVRSLMVSIGAVPQLVDILPSLDPECLELALFVLDALCTDVEGRVAVKDSANTIPYTVRVLMRVSENCTNYALSILWSVCKLAPEECSPLAVEVGLAAKLLLVIQSGCDAALKQRSAELLKLCSLHYSDTMFISKCKLTRTIQ

SEQ ID NO: 103442 - protein, 394 aa, Arabidopsis thaliana
  peptide (1)..(394): Ceres Seq. ID no. 13612776
MIKELDLQDIPSVFICPISLEPMQDPVTLCTGQTYERLNIHKWFNLGHLTCPTTMQELWDDTVTPNKTLHHLIYTWFSQKYVLMKKRSEDVQGRAIEILGTLKKAKGQARVHALSELKQIVIAHLMARKTVVEEGGVSVISSLLGPFTSHAVGSEVVAILVSLDLDSDSKSGLMQPAKVSLIVDMLNDGSNETKINCARLIRGLVEEKGFRAELVSSHSLLVGLMRLVKDKRHRNGVSPALRLLKPISVHKQVRSLMVSIGAVPQLVDILPSLDPECLELALFVLDALCTDVEGRVAVKDSANTIPYTVRVLMRVSENCTNYALSILWSVCKLAPEECSPLAVEVGLAAKLLLVIQSGCDAALKQRSAELLKLCSLHYSDTMFISKCKLTRTIQ

SEQ ID NO: 103443 - DNA, 959 bp, Arabidopsis thaliana
  misc_feature (1)..(959): Ceres Seq. ID no. 13612781
  misc_feature (1)..(959): Ortholog of  Ceres SEQ ID NO 13594163 as cited in SEQ ID NO 60426
caagatcgtcaagagacagtaaacctaaaatggcgaactcagacaaaagattattcgagaaggtagctataataaccggaggagcaagagggataggagcggccacggcgagattgttcacagagaatggcgcgtatgtgatagtcgcggatatccttgagaatgaaggcatccttgtggcggaatcgatcggtgggtgttacgttcattgtgacgtatcgaaggaggctgatgttgaggcggcagtggagctagcaatgagacgtaaaggtagactagatgtgatgttcaacaatgccgggatgtcgcttaacgaaggtagtatcatggggatggacgtggacatggttaacaaacttgtctcggttaatgtcaatggtgttttgcatggtatcaaacatgccgctaaggccatgatcaaagggggacgaggaggctcgataatatgcacatcgagctcatcagggctaatgggaggacttggaggacatgcgtatacgctctccaaaggagccatcaacggggtggtgaggacaacggcgtgcgagcttgggtctcacggcatccgtgtgaatagcatctctcctcatggagttcccactgacatcttggttaatgcgtaccgtaagttccttaaccatgacaaactcaacgtcgctgaggtcaccgacattattgctgagaaagggagtttgctgaccggaagagccggtactgtggaggacgtagctcaagcagctttgtttcttgcaagccaagaatcgtcggggttcattaccggacataacttggttgttgatggtggttacacatctgccactagtactatgagatttatctacaactagttttcgtttggtggtgtttccttttcaaagttgttctttgaaaaaagaaaaaaaaaaagagtttatcttaattgctaacttgtcaatctttcttaattcggttgaataatc

SEQ ID NO: 103444 - protein, 281 aa, Arabidopsis thaliana
  peptide (1)..(281): Ceres Seq. ID no. 13612782
RSSRDSKPKMANSDKRLFEKVAIITGGARGIGAATARLFTENGAYVIVADILENEGILVAESIGGCYVHCDVSKEADVEAAVELAMRRKGRLDVMFNNAGMSLNEGSIMGMDVDMVNKLVSVNVNGVLHGIKHAAKAMIKGGRGGSIICTSSSSGLMGGLGGHAYTLSKGAINGVVRTTACELGSHGIRVNSISPHGVPTDILVNAYRKFLNHDKLNVAEVTDIIAEKGSLLTGRAGTVEDVAQAALFLASQESSGFITGHNLVVDGGYTSATSTMRFIYN

SEQ ID NO: 103445 - protein, 272 aa, Arabidopsis thaliana
  peptide (1)..(272): Ceres Seq. ID no. 13612783
MANSDKRLFEKVAIITGGARGIGAATARLFTENGAYVIVADILENEGILVAESIGGCYVHCDVSKEADVEAAVELAMRRKGRLDVMFNNAGMSLNEGSIMGMDVDMVNKLVSVNVNGVLHGIKHAAKAMIKGGRGGSIICTSSSSGLMGGLGGHAYTLSKGAINGVVRTTACELGSHGIRVNSISPHGVPTDILVNAYRKFLNHDKLNVAEVTDIIAEKGSLLTGRAGTVEDVAQAALFLASQESSGFITGHNLVVDGGYTSATSTMRFIYN

SEQ ID NO: 103446 - protein, 196 aa, Arabidopsis thaliana
  peptide (1)..(196): Ceres Seq. ID no. 13612784
MRRKGRLDVMFNNAGMSLNEGSIMGMDVDMVNKLVSVNVNGVLHGIKHAAKAMIKGGRGGSIICTSSSSGLMGGLGGHAYTLSKGAINGVVRTTACELGSHGIRVNSISPHGVPTDILVNAYRKFLNHDKLNVAEVTDIIAEKGSLLTGRAGTVEDVAQAALFLASQESSGFITGHNLVVDGGYTSATSTMRFIYN

SEQ ID NO: 103447 - DNA, 1405 bp, Arabidopsis thaliana
  misc_feature (1)..(1405): Ceres Seq. ID no. 13612791
  misc_feature (1)..(1405): Ortholog of  Ceres SEQ ID NO 13598282 as cited in SEQ ID NO 68138
aaatgaacaaatatatcaaataataatagtgtaattaagtcggaggaaaacaacaagaacccagaaagaggaacgaagaaactaattcaaaggatcaagttcaccgcttcattttagtcattaaacaaagatggtgatgggaggagaagcatccatggaactggaccagtgttttcagaagatgaagatggaaggaatctcgatcaaagagtggaaagatatccctgtggagcttctgatgaggatcctttcccttgttgatgatcgtaatgtcattgttgcttctggtgtttgcactggctggagagatgctatctcttttggcctcactcgtctccgtctatcttggtgcaacaacaacatgaacagcttggttctttctcttgttcccaagtttgtaaagctgcagactttaaatctaaggcaggacaaaccgcaactagaggacaatgcagtggaggccatagcaaatcactgccatgagttacaagaacttgatctcagcaaaagcttgaaaattacagaccgttcactttatgcacttgctcatggttgcccagacctcacaaaactcaaccttagtggctgcacttcattcagcgacactgctattgcgtatttgaccagattctgcagaaagcttaaagttttgaatctttgcggatgtgtcaaagctgtaactgacaatgccttggaggctattgggaataactgcaatcagatgcagtcactaaacttgggatggtgtgagaatatcagtgatgatggggtaatgagtttagcttatggctgtccagatctcaggacccttgacctctgcggctgtgttcttattacagatgagagtgtggtagctctagcagactggtgtgtccacttgaggtcactggggctatactattgcagaaacataacagacagagcaatgtactcgctagctcaaagcggggtaaagaacaaaccgggatcgtggaaatcggttaagaaaggtaaatacgatgaagaaggactgagaagtctcaacattagccaatgcactgcccttacaccttcagcggttcaagctgtttgcgattcatttcccgcacttcacacatgctcaggaaggcattcgcttgtcatgagcggctgtctgaacttaacaactgtgcactgtgcttgtatccttcaggctcatcgtgcacacaatgcggttcctcatcctgctcattaagacagaggaatagttatgttgtatatataaacatcatgttgatggagattagtattataaacgaagtagcttttttaaggtttatgtgaaaccttagaagcttttgagttgttctttctttgtcttgaaagatcttttgtatattttggtgctatgttcataacttctttagtaagacctctcgttgttacc

SEQ ID NO: 103448 - protein, 360 aa, Arabidopsis thaliana; identical to SEQ ID NO: 30881
  peptide (1)..(360): Ceres Seq. ID no. 13612792

SEQ ID NO: 103449 - protein, 358 aa, Arabidopsis thaliana; identical to SEQ ID NO: 30882
  peptide (1)..(358): Ceres Seq. ID no. 13612793

SEQ ID NO: 103450 - protein, 352 aa, Arabidopsis thaliana; identical to SEQ ID NO: 30883
  peptide (1)..(352): Ceres Seq. ID no. 13612794

SEQ ID NO: 103451 - DNA, 1249 bp, Arabidopsis thaliana
  misc_feature (1)..(1249): Ceres Seq. ID no. 13612795
  misc_feature (1)..(1249): Ortholog of  Ceres SEQ ID NO 13654583 as cited in SEQ ID NO 68599
acgattgatatatactgatctcttgtcttcttcactctccaacggttctgtactatcttcagagcttcgagaatgtcgatgttaatggcggccaaatccacttcactctttagctcaaaccctacaatttcagctaaaatagggcaaaaccctcgcggcgtcagatcggtttatccgacggtgagaatgcagtcacgtgttcaccgtctgattgaagagcaaggtgctgtgcttattcccggagtctacgacgcattatctgcggctattgtgcagcagaccggattctccgccgcattaatctccggttacgccctctccgccgtaactttgggaaaaccagatttcggtttgataacacctccggagatggcagcaacggcgagatcagtgtgtgctgcggctccaaagattccaatcattgcagatgcagatactggtggaggaaatgctctcaatgttcaaagaaccgtcaaggacttaatcgcagcaggtgctgctggttgcttccttgaggaccaggcatggccaaagaggtgtggacatatgcgtggcaaagaggtcatacctgcggaggaacacgctgctaaaatagcatcagcaagagacgctattggagatgctgacttttttctaatcgctaggactgatgctcgtgcactttccgcaaaaacaggactttcagacgccattgaccgtgctaatctttatatggaggcaggagctgatgcttcctttgttgaggcaccgagggacgatgacgagcttaaggaaatcggaaggcgcacaaaaggttacagactgtgtaacatgcttgaaggtggacgcacgccattgcatacgcctgatgagcttaaagaaatgggttttcacttgatcgcacacccacttacctcgctctatgcgtcgactcgagctcttgtcgatgttcttaagattctcaaggagaaaggaaccaccaaagaccacttagaaaagatgataactttcgaagagtttaaccgtttggtgaacttggattcatggtatgagctcgaaaccaagtactctaacctcagaaacgctctaggggaaacaaaataatgagattctgattactctgtccacaatcgaagctcttgcaatgtatcatcaataatgttatcttcttttttcacttgtttgtatcaatattcaataattgtgtgttttgacatgtaaaaactcaaaaaaagttctaatttatttggaaagcttgttcttgctgctt

SEQ ID NO: 103452 - protein, 336 aa, Arabidopsis thaliana; identical to SEQ ID NO: 24914
  peptide (1)..(336): Ceres Seq. ID no. 13612796

SEQ ID NO: 103453 - protein, 334 aa, Arabidopsis thaliana; identical to SEQ ID NO: 24915
  peptide (1)..(334): Ceres Seq. ID no. 13612797

SEQ ID NO: 103454 - protein, 332 aa, Arabidopsis thaliana; identical to SEQ ID NO: 24916
  peptide (1)..(332): Ceres Seq. ID no. 13612798

SEQ ID NO: 103455 - DNA, 2171 bp, Arabidopsis thaliana
  misc_feature (1)..(2171): Ceres Seq. ID no. 13612799
  misc_feature (1)..(2171): Ortholog of  Ceres SEQ ID NO 15169072 as cited in SEQ ID NO 53955
  misc_feature (1)..(2171): Ortholog of  Ceres SEQ ID NO 15224912 as cited in SEQ ID NO 63475
  misc_feature (1)..(2171): Ortholog of  Ceres SEQ ID NO 13659394 as cited in SEQ ID NO 67049
aaaaatcagaacccaaagccaaagcgtttttatcatttctgtcttcttctgtgtaaacagtaagaccccaaaggtcaaacctttaggctttgtttcttcctttaaggcttttttccgacgtttatatcagatttcttcttgtcaatttcttcatttggacaacctccataatccaagaccgacccttttcctctaatctctcctgttgcagctgaatggtggaacaaactgtggttagagaacatatcaaagcgagagtcatgtcattagtgaggtctgcagagccatcctcatataggaacccgaagctttacacgttgaatgagaatggtaataacaatggtgtcagttctgctcaaatctttgatccagataggtcaaagaatccttgtctgactgatgattcttacccaagccaaagttatgagaagtactttcttgattcgccaactgatgagtttgttcaacatcctattggctctggtgcctcggttagctcatttggctctttagactcatttccttatcagtcaagaccagttcttggatgttccatggaatttcagttaccgttggattcaacctctacttcatctacaaggcttttgggagattaccaagcggtttcttacagtccgagcatggatgtagtggaggagtttgatgatgagcaaatgagatcaaagattcaagagcttgaaagagcgcttctcggcgatgaagatgataaaatggttggaatagataacctcatggagattgacagcgaatggtcgtaccaaaacgaaagcgaacagcatcaagactcgcccaaagaatcatcgtctgcagattccaactctcatgtaagtagcaaagaagtggtgtctcaagccactccaaagcaaatcttgatatcttgtgctcgtgcgctatctgaaggaaaattagaagaagctttgtcaatggtaaatgagctgaggcagatagtttctatccaaggagacccttctcagagaatcgcagcttacatggtggaaggtctagctgcaagaatggccgcttcaggaaaattcatctacagagcattgaaatgcaaagagcctccttcggatgagaggcttgcagctatgcaagtcctgtttgaagtctgcccttgtttcaagttcgggtttttagcagctaatggtgcgatacttgaagcaatcaaaggtgaagaagaagttcacataatcgatttcgatataaaccaagggaaccaatacatgacactgatacgaagcattgctgagttgcctggtaaacgacctcgcctgaggttaacaggaattgatgaccctgaatcagtccaacgctccattggagggctaagaatcatcggtctaagactcgagcaactcgcagaggataatggagtatccttcaaattcaaagcaatgccttcaaagacttcgattgtctctccatcaacactcggttgcaaaccaggagaaaccttaatagtgaactttgcattccaacttcaccacatgcctgacgagagtgtcacaacagtaaaccagcgggacgagctacttcacatggtcaaaagcttaaacccaaagcttgtcacggtcgttgaacaagacgtgaacacaaacacttcaccgttctttcccagattcatagaggcttacgaatactactcagcagttttcgagtctctagacatgacacttccaagagaaagccaagagaggatgaatgtagaaagacagtgtctcgctagagacatagtcaacattgttgcttgcgaaggagaagaacggatagagagatacgaggctgcgggaaaatggagagcaaggatgatgatggctggattcaatccaaaaccaatgagtgctaaagtaaccaacaatatacaaaacctgataaagcaacaatattgcaataagtacaagcttaaagaagaaatgggtgagctccatttttgctgggaggagaaaagcttaatcgttgcttcagcttggaggtaagataagtgacaagagcatatagtctttatgtttcataaaacataattatgtttttactgtaatcttgggttattgtgtaactggttaaatcatctccatgtattattaccagaggttaggggtgatcacaggtactaaaagctaatctaacacttatggaagaatttttctttc

SEQ ID NO: 103456 - protein, 593 aa, Arabidopsis thaliana; identical to SEQ ID NO: 39767
  peptide (1)..(593): Ceres Seq. ID no. 13612800

SEQ ID NO: 103457 - protein, 578 aa, Arabidopsis thaliana; identical to SEQ ID NO: 39768
  peptide (1)..(578): Ceres Seq. ID no. 13612801

SEQ ID NO: 103458 - protein, 480 aa, Arabidopsis thaliana; identical to SEQ ID NO: 39769
  peptide (1)..(480): Ceres Seq. ID no. 13612802

SEQ ID NO: 103459 - DNA, 1637 bp, Arabidopsis thaliana
  misc_feature (1)..(1637): Ceres Seq. ID no. 13612803
  misc_feature (1)..(1637): Ortholog of  Ceres SEQ ID NO 13597511 as cited in SEQ ID NO 64735
aagatctaagcgaaaacaaaaaaaaatgccttaaaacatttgaagaagcaaaacgaagaaacagtgagagagatagaaatggcgagcttaactagtaataagcctagaaattttggtgcgtatagtcactacgctactccctgcactcgcacgcaccagattggagctctttttctcgtcgtctctaccttcttcgtcactaggcttttcgatcagtggttctcggaatccaattccgttactccggtgattgatctccgtcgtacttcttcttcttacggaatcaaaactgataacggtattatacggtggccggagcgaggttatgggtctcacctctcgctgaagatctacgtttatgatgagaatgagatcgacggtcttaaagagctgttgtacggtagggatggtagtgttaagaccaccgcatgcttgaaaggtcaatggggatctcaggttaaaattcacaagttgcttttggagtccaaatttaggacgattaagaaagatgaagcggatttgttctttgtgccagcttatgttaaatgtgtgagaatgttgggaggtcttaatgacaaggagatcaatcagacctatgtcaaggttttgagtcaaatgccgtatttccgaagatctggtggtcgtgatcatatatttgtttttccgagtggtgctggagctcacttgtttagatcctggtcaacatttatcaaccgctctattatcctcactcccgaggctgaccggactgacaagaaagacacaactgcctttaattcatggaaagatataatcataccaggaaacgtcgatgatgctatgactaaaaatggacaacctgatgttcagcctttgcctctgtcaaagaggaagtatttagcaaattatttaggtcgtgcacaagggaaggctggtcgacttaaattgattgacctatcaaagcaatttccagataagctagaatgtccagatttgaagtttagcggaactgaaaagtttggaaggacaacatattttgaacatctgaggaatgccaagttctgcctcgctcctcgtggggaatcatcatggacacttcgcttttatgaatcattctttgtggaatgtgtcccggttcttttatctgaccacgccgagctgcctttccagaatgttatcgactatgcccaagtatcgatcaaatggccatcaactcgaataggctcagagtttcttgattacttagcttcaatatcagatagagacatagaaggaatgatagcccgaggtcggaagattagatgtttgtttgtgtacggtccagattccgcaccctgcagtgcggttaaagggattctatgggagcttcaacgcaaagttagacatttccagcaatcgactgagacgttttggctgcacaatggcagttttgtgaatagagaactggtccagttcagtagctggagacctcctatgcctctaccttgaccggtttcaacattccactagaatatcttgtgtttacgaaacaaaatgaatgatacatttgagtacagtttttttgtgaacttgatttttttgtacatatcactcttcagtggaatttgtttgactaaaatttgatagaaaaatgacgaaccaacaaaattgatggcttc

SEQ ID NO: 103460 - protein, 462 aa, Arabidopsis thaliana
  peptide (1)..(462): Ceres Seq. ID no. 13612804
MASLTSNKPRNFGAYSHYATPCTRTHQIGALFLVVSTFFVTRLFDQWFSESNSVTPVIDLRRTSSSYGIKTDNGIIRWPERGYGSHLSLKIYVYDENEIDGLKELLYGRDGSVKTTACLKGQWGSQVKIHKLLLESKFRTIKKDEADLFFVPAYVKCVRMLGGLNDKEINQTYVKVLSQMPYFRRSGGRDHIFVFPSGAGAHLFRSWSTFINRSIILTPEADRTDKKDTTAFNSWKDIIIPGNVDDAMTKNGQPDVQPLPLSKRKYLANYLGRAQGKAGRLKLIDLSKQFPDKLECPDLKFSGTEKFGRTTYFEHLRNAKFCLAPRGESSWTLRFYESFFVECVPVLLSDHAELPFQNVIDYAQVSIKWPSTRIGSEFLDYLASISDRDIEGMIARGRKIRCLFVYGPDSAPCSAVKGILWELQRKVRHFQQSTETFWLHNGSFVNRELVQFSSWRPPMPLP

SEQ ID NO: 103461 - protein, 303 aa, Arabidopsis thaliana; identical to SEQ ID NO: 25984
  peptide (1)..(303): Ceres Seq. ID no. 13612805

SEQ ID NO: 103462 - protein, 283 aa, Arabidopsis thaliana; identical to SEQ ID NO: 25985
  peptide (1)..(283): Ceres Seq. ID no. 13612806

SEQ ID NO: 103463 - DNA, 1180 bp, Arabidopsis thaliana
  misc_feature (1)..(1180): Ceres Seq. ID no. 13612811
  misc_feature (1)..(1180): Ortholog of  Ceres SEQ ID NO 14315162 as cited in SEQ ID NO 60005
  misc_feature (1)..(1180): Ortholog of  Ceres SEQ ID NO 15169727 as cited in SEQ ID NO 60328
  misc_feature (1)..(1180): Ortholog of  Ceres SEQ ID NO 13659881 as cited in SEQ ID NO 66938
aatctagaacaagaaaccaaaacatacaccacttctgtttttaaaaaggtaaaaaagatcaagaagaaaccaaagaaaatcagacagcaacaagaaaagatcagttgttaagagaaggaaagtaggaaacgggtcagattgttagatagagagaggaagcgaagaaaaagagtcgcagtgttctttttccactgcgtggttttggtataatcagctgtggctacaacgaggaggcataatctaccgacgtcggattccggtgcgttcaccgactgggcggccacgacgacgacaccttcccgtgccaccgaggatctctctcttggtttcaatgctggttcctccgtcatccacggtggtttaggctcagcttccgtcgccgccggcgttccatcatggcctccgggatcttctgtccgttacggcctaccttcttcggcggcggcgacggagatgggcatggttggtctaagagatgtattccttgttgctccggcttatcaccaccagaacgccggagtgatatctggatccgatcatatgaacagtaatgcagctgcggcggcggcgctcggtgtcggagtgattcctctactcacggcgggtacaccgcagcaaaacgtggaagactccgacattaacttcctcggaaacaaccggagatggcagaataacaacaacaaccacgaaacgcagtatcttcacttcaagagtactaaccagacaacggtcggaacgagctcgaacaactcggggtctggctcaggcgcatcaggaaccgccacgtgtcaagactgtggaaatcaggcgaagaaagagtgtaagcagaggcggtgtaggacttgctgcaagagccgtggctttgattgttctactcacgtgaagagcacgtgggtctctgctgctcggcggagagagaggcaggtcatgcctaccggcgctaatccaacggctggctcgtctctttcgacctcctccgggacgaagaagccgaggatcgtagggtctcaacaacaacaacaacaacaagccacttctcatacttcaacttctaacacaccacctcaaagtttcgagaccagctccagccgacaaggtagttttacattttcattagtatacatagctacatgattttatgtatgtatatacatgcatataacactattagcccttcttg

SEQ ID NO: 103464 - protein, 226 aa, Arabidopsis thaliana
  peptide (1)..(226): Ceres Seq. ID no. 13612812
MGMVGLRDVFLVAPAYHHQNAGVISGSDHMNSNAAAAAALGVGVIPLLTAGTPQQNVEDSDINFLGNNRRWQNNNNNHETQYLHFKSTNQTTVGTSSNNSGSGSGASGTATCQDCGNQAKKECKQRRCRTCCKSRGFDCSTHVKSTWVSAARRRERQVMPTGANPTAGSSLSTSSGTKKPRIVGSQQQQQQQATSHTSTSNTPPQSFETSSSRQGSFTFSLVYIAT

SEQ ID NO: 103465 - protein, 224 aa, Arabidopsis thaliana
  peptide (1)..(224): Ceres Seq. ID no. 13612813
MVGLRDVFLVAPAYHHQNAGVISGSDHMNSNAAAAAALGVGVIPLLTAGTPQQNVEDSDINFLGNNRRWQNNNNNHETQYLHFKSTNQTTVGTSSNNSGSGSGASGTATCQDCGNQAKKECKQRRCRTCCKSRGFDCSTHVKSTWVSAARRRERQVMPTGANPTAGSSLSTSSGTKKPRIVGSQQQQQQQATSHTSTSNTPPQSFETSSSRQGSFTFSLVYIAT

SEQ ID NO: 103466 - protein, 197 aa, Arabidopsis thaliana
  peptide (1)..(197): Ceres Seq. ID no. 13612814
MNSNAAAAAALGVGVIPLLTAGTPQQNVEDSDINFLGNNRRWQNNNNNHETQYLHFKSTNQTTVGTSSNNSGSGSGASGTATCQDCGNQAKKECKQRRCRTCCKSRGFDCSTHVKSTWVSAARRRERQVMPTGANPTAGSSLSTSSGTKKPRIVGSQQQQQQQATSHTSTSNTPPQSFETSSSRQGSFTFSLVYIAT

SEQ ID NO: 103467 - DNA, 1574 bp, Arabidopsis thaliana
  misc_feature (1)..(1574): Ceres Seq. ID no. 13612819
  misc_feature (1)..(1574): Ortholog of  Ceres SEQ ID NO 15172426 as cited in SEQ ID NO 59156
gtcaaatcattttcgacgactgttattaataattaattcgttaatgacgcaccgttagtcaactccgcttcgtattaattactcctccgatctctttcttattcttctccggcgacacttcccttgcttctccctcttaggactctctctacgaatctgtaagcttcaaattcttacgccacactccgagattcgcttctgattattgtatgaatttttgagctccaaggatccactgccatgtatttatgctgctaaagcttgaaggcagtagtggaatcaccattaagttctttgctttgtaatttagcttgatttgagaataaacaaatgggaaaagcatcaggcttgcttctgtttctcttgggttttgggttctttgttgtcacatataatcttctgacacttatagttcacaatagatctggtgtgagtaattcagatggaagtccacttctggatcctgttgttcagatgcctctaaatattaggaaagccaagagttctccagcaccttttcatgttgccttaacagctacagatgcaccttataataagtggcagtgtcgtattatgtattattggtataagcagaagaaagctcttcctggttctgatatgggtggcttcacccgtattttgcattccggtaattctgataacttgatggatgaaatacccacatttgtggttgatcctcttcctccaggtcttgatcgggggtatgttgtcttgaatagaccatgggcattcgtgcaatggcttgaaagagctaccatcaaggaagactatgtgctcatggcagagcctgatcatgtatttgttaatccccttcccaatttggctgttggaggattcccagccgcttttccgtttttctatattactcctgaaaagtatgaaaacatagtcagaaagtattatccagcggagatggggccagtaacaaatatcgaccccattggcaactctcctgttatcataagcaaggaatcacttgaaaagattgctcctacatggatgaatgtctcgctgacaatgaaaaacgatccagaaactgataaggcatttggatgggtgctggaaatgtacggttacgcaattgcatctgctatacatggggtgcgtcacatacttcggaaggatttcatgcttcagcctccgtgggatttgtctaccaaggggaagtttatcattcattacacttatggatgcgactacaacatgaagggggagctgacatatggcaaaataggagagtggcgattcgataagagatcacatttgcggggtcctcctccaaggaacatgtccttgccgcctcccggtgttcccgaaagtgtggtgacacttgtgaagatggtgaatgaagctactgcgactatccctaattgggacactctctaactcacatccacacacaaaacacaaaccatagggacaaatccatacagcaacaatattttgcctaatttttttttccttctccctttacttcccttcttgtctgttttttcttgtaatggttaaattatgaacttgagtagtaaattacaaaattatttgtttgacac

SEQ ID NO: 103468 - protein, 358 aa, Arabidopsis thaliana; identical to SEQ ID NO: 27550
  peptide (1)..(358): Ceres Seq. ID no. 13612820

SEQ ID NO: 103469 - protein, 310 aa, Arabidopsis thaliana; identical to SEQ ID NO: 27551
  peptide (1)..(310): Ceres Seq. ID no. 13612821

SEQ ID NO: 103470 - protein, 277 aa, Arabidopsis thaliana; identical to SEQ ID NO: 27552
  peptide (1)..(277): Ceres Seq. ID no. 13612822

SEQ ID NO: 103471 - DNA, 1703 bp, Arabidopsis thaliana
  misc_feature (1)..(1703): Ceres Seq. ID no. 13612825
  misc_feature (1)..(1703): Ortholog of  Ceres SEQ ID NO 13590739 as cited in SEQ ID NO 66960
aaaacttcaccaaccccatttttaagcccctttctttgtttttatcctccgatcgatcaaaccaagaaaaaacactttcgtatttccctcgacgaaaaaaatggcaaccatttcgaatctcgctaatcttccccgcgccacctgcgtcgactccaaatcttcttcctcttcctccgtcttacctagatccttcgtcaatttccgcgctttgaatgcaaagctttcctcttctcagctttctcttcgttataaccaacgatcaataccttccctctctgtgaggtgttcagtgtctggtggaaatggaactgctggaaagagaacgactcttcatgatctatatgagaaggaaggtcagagtccttggtatgataatctttgccgtccagtcacagatcttctcccgttgattgctcgtggtgttagaggtgttactagcaaccctgcgatcttccaaaaagccatttccacttcaaatgcttataatgatcaattcaggacacttgtggaatcgggaaaggacattgaaagtgcgtattgggaacttgtggtgaaggatattcaggatgcctgcaaactttttgagccaatctatgaccagacagaaggtgcggatggctatgtctctgttgaagtttcacctaggcttgctgatgatacccaaggaactgttgaagctgctaaatatcttagcaaggttgtcaaccgtcgtaatgtctacattaagattcctgctactgctccatgcattccttccatcagggatgtcattgcagctggaataagtgtcaatgtcacgcttatattctcaatcgccagatatgaagcagtgatcgatgcatatttggatggcctcgaggcgtctggacttgatgacctctcaagagttaccagtgttgcttccttctttgtcagtcgggtggatactctcatggacaagatgcttgagcaaattggtacccctgaagccttagatctccgtgggaaggcggctgtggctcaagctgcattagcatacaagctataccagcagaaattctctggcccaagatgggaagctctggtaaagaaaggtgccaagaaacagagacttctctgggcatcaacaagtgtaaagaacccagcttactctgacaccttatatgtcgctcctctcatcggacctgacactgtatcaaccatgccggatcaagccctggaagcattcgcagatcatggaatagtgaagaggacaatagatgcgaatgtgtcagaagcagaagggatttacagtgcactagagaagctgggaatagactggaacaaagtaggagaacagttggaagacgaaggagtagattccttcaagaagagtttcgagagtctgctcggtacactgcaagacaaggccaacactctcaaactagccagccattgaggaaatgagtcatcattatgtttttggttacgctaaaataaaaagaagaacctttggcttttgttcttcaatccttatgcatgctttctaaagtggttatgatggattttgcttgatgttccacattatgggttattctattttctttgttcttgtaagatgatgcttcagaagagtttgttactttttaccgtatttgtaatttacattttcactgaaaacaattggcgagtaaaaaagtgtccttgtcttcttctttgttcggattatatgaacaattgttcct

SEQ ID NO: 103472 - protein, 438 aa, Arabidopsis thaliana; identical to SEQ ID NO: 21905
  peptide (1)..(438): Ceres Seq. ID no. 13612826

SEQ ID NO: 103473 - DNA, 978 bp, Arabidopsis thaliana
  misc_feature (1)..(978): Ceres Seq. ID no. 13612827
  misc_feature (1)..(978): Ortholog of  Ceres SEQ ID NO 12610607 as cited in SEQ ID NO 56214
  misc_feature (1)..(978): Ortholog of  Ceres SEQ ID NO 13664294 as cited in SEQ ID NO 61328
  misc_feature (1)..(978): Ortholog of  Ceres SEQ ID NO 13596425 as cited in SEQ ID NO 62039
gctctcgacaaagcagctgagcgacttttgcacatttctagggttccaatcaaaatctatctgcaacaaaaatggctaatcgtttcagatcagggatctccttcttcaagaccatcgccgtaacagattctgtctcctccgttagatccaagtcgcttttcccagcgttgagaacttatgcaactgcttctgctcaaacaaccgctaatgttaaggtgcctattgctttagttggtgaaaatgggaactttgcttcatggctatacattgcagctgtgaaaatgaattccttggaaaagattgagacggatctttctgagatgattgaggcaatgaagacagctcctatttttgctcagtttacaaaggatccctctgttcctagagggacaagattggctgctattagggatgcttgtgatcaagcaaagtttgccgaacccactaagaacttcctctctttgttagctgagaatggaaagctgaagaacctagatgccattgtgaagaaatttatgcagctgacaaacgcacataggggagatgtcaaagttttggttaccacagtcattccgcttccccctgctgaggagaaagaactgactgagacgcttcaggagatcattggagcagggaagaaaatcactgtggaacaaaagattgatccaagtatctacggtggactaatcgtagagttccaacaaaaggtgttggacatgtcaatcaggacaagggcacaacagatggagaggctcctccgtgaacctgttgacttcaacaacctctgaaaatcttgagagaaatttcccccaagaaaacatgcttgtgatgaatgccaccaattgacaaataaatatggaccctcctgggaaacaatataatagctggccacttctctccctttgaattttgtcatttgctttttacatattgttgtttgcttcgaaataaagcttttcgagacatcaaatttcaatg

SEQ ID NO: 103474 - protein, 238 aa, Arabidopsis thaliana; identical to SEQ ID NO: 28758
  peptide (1)..(238): Ceres Seq. ID no. 13612828

SEQ ID NO: 103475 - protein, 168 aa, Arabidopsis thaliana; identical to SEQ ID NO: 28759
  peptide (1)..(168): Ceres Seq. ID no. 13612829

SEQ ID NO: 103476 - protein, 155 aa, Arabidopsis thaliana; identical to SEQ ID NO: 28760
  peptide (1)..(155): Ceres Seq. ID no. 13612830

SEQ ID NO: 103477 - DNA, 870 bp, Arabidopsis thaliana
  misc_feature (1)..(870): Ceres Seq. ID no. 13612836
  misc_feature (1)..(870): Ortholog of  Ceres SEQ ID NO 14302000 as cited in SEQ ID NO 52175
acctttgaaagcaatcaattccattccatcaaaggggtttttagggtttcgtcactcgccgataatcctctctctctagaaaacatgactgccgaacagaaagtggagctcgccgccaaattggaagagcagaagatcgatcttgataaacctgaggttgaagatgatgatgacaatgatgaggatgattccgaggacgatgacgaggcggagggacatgatggggaggccggtggccggtcaaagcaaagcagaagtgagaaaaagagtcgtaaagctatgttgaagcttgggatgaaaccaatcactggtgttagccgtgtcaccgtcaaaaagagcaagaatatcttgtttgtgatatcaaaacctgatgtgttcaagagtccagcttcagatacatatgtgatctttggtgaggccaagatagaggatttgagctcgcagctgcagagtcaagccgcagagcagttcaaggctcccaacctcagcaacgtgatttcacaggagaaacatcgagtgctgcaactgcagctgctgttcaagatgatgatgatgaagaggtagacgaggagggagtagagccaaaggacatcgagcttgtgatgacccaagcaggagtgtctaagccaagggcagttaaggcgctcaagctcgctaatggagatatagtctctgccatcatggagcttaccacctaaatccgaaacttttcctactttgatgtgcttttcgtgtttttgttttcccattttcctttcaagtgattttgcatgttgtatcattatatactatacgtttggactcatttcatattttagaaatttgagtggattttcatgagtttatactctgtttattcacttatcatcc

SEQ ID NO: 103478 - protein, 187 aa, Arabidopsis thaliana
  peptide (1)..(187): Ceres Seq. ID no. 13612837
TFESNQFHSIKGVFRVSSLADNPLSLENMTAEQKVELAAKLEEQKIDLDKPEVEDDDDNDEDDSEDDDEAEGHDGEAGGRSKQSRSEKKSRKAMLKLGMKPITGVSRVTVKKSKNILFVISKPDVFKSPASDTYVIFGEAKIEDLSSQLQSQAAEQFKAPNLSNVISQEKHRVLQLQLLFKMMMMKR

SEQ ID NO: 103479 - protein, 159 aa, Arabidopsis thaliana
  peptide (1)..(159): Ceres Seq. ID no. 13612838
MTAEQKVELAAKLEEQKIDLDKPEVEDDDDNDEDDSEDDDEAEGHDGEAGGRSKQSRSEKKSRKAMLKLGMKPITGVSRVTVKKSKNILFVISKPDVFKSPASDTYVIFGEAKIEDLSSQLQSQAAEQFKAPNLSNVISQEKHRVLQLQLLFKMMMMKR

SEQ ID NO: 103480 - protein, 94 aa, Arabidopsis thaliana
  peptide (1)..(94): Ceres Seq. ID no. 13612839
MLKLGMKPITGVSRVTVKKSKNILFVISKPDVFKSPASDTYVIFGEAKIEDLSSQLQSQAAEQFKAPNLSNVISQEKHRVLQLQLLFKMMMMKR

SEQ ID NO: 103481 - DNA, 1616 bp, Arabidopsis thaliana
  misc_feature (1)..(1616): Ceres Seq. ID no. 13612840
  misc_feature (1)..(1616): Ortholog of  Ceres SEQ ID NO 13654166 as cited in SEQ ID NO 68381
  misc_feature (1)..(1616): Ortholog of  Ceres SEQ ID NO 13599720 as cited in SEQ ID NO 0
atagattagttttgtacttctgttacgtggtgattattaaaacttgtaataacagtataatctggttttgttggtgtagattgatgatttcaacattgcaaagaaggaagaggacattgggttctacgctggatttgttggttgctctttcatgctcggacgagcttttacatctgtggcatggggacttgttgctgatcgttatggtagaaaacctgtaatcctcataggaaccgcttcagtggtcgtttttaatactctgtttggcctaagtttaaatttctggatggctattatcacaagattttgcctcggtagtttcaacggtttacttggtcctatcaaggcttacgcaatggaaatattccgtgatgagtatcaaggtttagcactctcagcagttagtacagcttggggaattggactcatcattggccctgctataggaggttttcttgctcagcctgcaaagcaatatccaagtttattctcacaggactccatttttggcaaatttcccttctttttgccatgcttagcaatatccgtttttgcattcttggtgaccatagtttcatcaaggattccggaaacattgcacaatcacaagtttaatgatgatgagtcttatgatgctctcaaagatttgtctgatgaccctgaatctaataaagtggcagagagaaatggaaaaagttctctcttgaacaactggccattaatttcatctatcatcgtatactgcgtcttttcactacatgatatggcttacacagagatcttttcattgtgggcaaacagtccgaggaaatatggaggtttgggatactccactgcagatgttggttctgttcttgccttttcaggctttggtctccttatctttcagctttcgctctactcttacgcagagaggcttttaggacctatcatagttacacgtatatctgggagcctagcaatggtcgtcttatcatgttacccactaatagcaaagttatctggtttagcccttaccgtgactgtaacttctgcatccgtagcaaagagtgttttaggtacttctgctataactggattattcatccttcaaaacaaggctgtgagacaagaccaaagaggagcagctaatggaattgccatgacagcgatgtctcttttcaaagccataggtccagcagcagcaggaatcattttttcgtggagcgagaaacgtcagggtgctgcttttctccctggcacccaaatggtattctttatactgaatgtggttttggcacttggagttgtattgacattcaaaccatttctagctgaaacacaacagtagaaaatgatgaagattttgatggtattcaaattacataatcagaatgtattgtataatatatagatttgtatgtctgatccaaagttagattagaaaaatggcaagagaaaaagaaaaaaaacttgttagaattgttgtcatcatcctttgtatgttataggacaagttgttcacaaaattttgtctaatgtgtcagaaccattgtaagaaggattcaataatgttttttgtacatgatgtttcgcgaataatattgacaagtcgtcaaatcctatcctgagattcc

SEQ ID NO: 103482 - protein, 392 aa, Arabidopsis thaliana
  peptide (1)..(392): Ceres Seq. ID no. 13612841
MLGRAFTSVAWGLVADRYGRKPVILIGTASVVVFNTLFGLSLNFWMAIITRFCLGSFNGLLGPIKAYAMEIFRDEYQGLALSAVSTAWGIGLIIGPAIGGFLAQPAKQYPSLFSQDSIFGKFPFFLPCLAISVFAFLVTIVSSRIPETLHNHKFNDDESYDALKDLSDDPESNKVAERNGKSSLLNNWPLISSIIVYCVFSLHDMAYTEIFSLWANSPRKYGGLGYSTADVGSVLAFSGFGLLIFQLSLYSYAERLLGPIIVTRISGSLAMVVLSCYPLIAKLSGLALTVTVTSASVAKSVLGTSAITGLFILQNKAVRQDQRGAANGIAMTAMSLFKAIGPAAAGIIFSWSEKRQGAAFLPGTQMVFFILNVVLALGVVLTFKPFLAETQQ

SEQ ID NO: 103483 - protein, 347 aa, Arabidopsis thaliana
  peptide (1)..(347): Ceres Seq. ID no. 13612842
MAIITRFCLGSFNGLLGPIKAYAMEIFRDEYQGLALSAVSTAWGIGLIIGPAIGGFLAQPAKQYPSLFSQDSIFGKFPFFLPCLAISVFAFLVTIVSSRIPETLHNHKFNDDESYDALKDLSDDPESNKVAERNGKSSLLNNWPLISSIIVYCVFSLHDMAYTEIFSLWANSPRKYGGLGYSTADVGSVLAFSGFGLLIFQLSLYSYAERLLGPIIVTRISGSLAMVVLSCYPLIAKLSGLALTVTVTSASVAKSVLGTSAITGLFILQNKAVRQDQRGAANGIAMTAMSLFKAIGPAAAGIIFSWSEKRQGAAFLPGTQMVFFILNVVLALGVVLTFKPFLAETQQ

SEQ ID NO: 103484 - protein, 324 aa, Arabidopsis thaliana
  peptide (1)..(324): Ceres Seq. ID no. 13612843
MEIFRDEYQGLALSAVSTAWGIGLIIGPAIGGFLAQPAKQYPSLFSQDSIFGKFPFFLPCLAISVFAFLVTIVSSRIPETLHNHKFNDDESYDALKDLSDDPESNKVAERNGKSSLLNNWPLISSIIVYCVFSLHDMAYTEIFSLWANSPRKYGGLGYSTADVGSVLAFSGFGLLIFQLSLYSYAERLLGPIIVTRISGSLAMVVLSCYPLIAKLSGLALTVTVTSASVAKSVLGTSAITGLFILQNKAVRQDQRGAANGIAMTAMSLFKAIGPAAAGIIFSWSEKRQGAAFLPGTQMVFFILNVVLALGVVLTFKPFLAETQQ

SEQ ID NO: 103485 - DNA, 2027 bp, Arabidopsis thaliana
  misc_feature (1)..(2027): Ceres Seq. ID no. 13612844
  misc_feature (1)..(2027): Ortholog of  Ceres SEQ ID NO 14301944 as cited in SEQ ID NO 0
atggcgactccgacggagctaggtttctcttcacctggtggtggtggtgacgactctgacgataaccctccacagaagcgtacttcaaaacgtactgcttccgaaacagcaacagaagaagaaacgaagaagaagaaaaagaagaagacgaagcacaacacaaaaatggcttctcctccgagcaaccggatctggaacgaagaagacgagctctctatcttaaagggattggtggattttcgagctaaaacaggactcgaatccaaaattgattgggatgcgttttattgttacgtcaaaggttccattcatgtgaaagtttccaagtgccagcttatgagtaagaccaggaagttgaagaagaagttccttgatcaaatggagaaaatcgatcaaggaaatgatccacattttactaggtctagtgaaactgaagcttttggatattccatgatgatttggcgtaaaattgatgctgaatacactaatggtgttatggataaagcacatcaaagcgagagtggagaggaggtgtttgaggaggatgaggaagtggccttaattgacaaaggggctgcgaaaagtggcaagtcacctcatgaagctgttgttgttgttgacaaaataactacgaagaagaacgggactgctggaaaagagagtgatgatgatgatgatgatgtgttgtgtgctgtgcgggatgcgtttgagaccaccatgatgtcgcaaggattaagtgattatcaaaagaagttgcagcttgagaagctgatgaaccttggaactggtaaaagaagagagttgagcaatgaatggaaagcactatgtgttgaggaactaaaattgaatatcaacaagcttcgattttccgccaagcttgcagaggcagcaaatgatgatattttgatacatgtgtctatcagtctatcgtttaagctaaaactcaacgagacgacagacgataaaaagggattaagtttcttctgtgtagattattcttcttcttcttcttcttccattgtctcttgggttgagattccgatctcaatgtcgatcaatatcggagaaatctcaattccagaccttcctatcttcttctccatgttcttaaccatctacctaatcgcttacttcatcgtcttccgcaattggaaaccacaaatccgtcccgaagcttcaagctgcctgatctcaatcttccatggatctccagcggttttcctcgccacacgcgcagttttctcctcctccgaacgctccttcgcctccgcaaacaccgccgcacaaaacaccgtcctcgatttcagcgtcgcttacttcctcaccgatctcttccactacatcgtcttcaaccctaacgacgtactcttcatcggccatcacgtagccactctattcgtcttcctaacctgcagattcctcgtcttccacggggcttgcgccatcttaggcctcctgattctagctgaagtaacaagcgcgtgtcagaacgcgtggacgctcgccggagcaaggaagaatgatccggaatcacgattagctgtgaaagtgtacgatctcttgtctcctccgttttacgccttctacagtatcgttaggggtgtgttgggacctttgtttttcgggaaaatggtagcgttttacgctcgaggtggtgctcatggtgtgatacctaattggttgtggatttcttgggcaattgttgttggaattgctattactgttagtatactttggatttggaatctctggatagaattgtttagtgaaaggaaagctaacaaaatcagagtagacaagaaaattagatagtttcttctttcttctctagatcattgtttgatcttccttttcatgtactatatataatatatataccattattattctcaccttttagaattcctctaaatgatgtatgttttggaataatagatttgcttttgggtaagcagtatgtgcaaaatgcacttttaattcaactctgtattgttcagaagttcttctcttaagagtttcttccatac

SEQ ID NO: 103486 - protein, 603 aa, Arabidopsis thaliana
  peptide (1)..(603): Ceres Seq. ID no. 13612845
MATPTELGFSSPGGGGDDSDDNPPQKRTSKRTASETATEEETKKKKKKKTKHNTKMASPPSNRIWNEEDELSILKGLVDFRAKTGLESKIDWDAFYCYVKGSIHVKVSKCQLMSKTRKLKKKFLDQMEKIDQGNDPHFTRSSETEAFGYSMMIWRKIDAEYTNGVMDKAHQSESGEEVFEEDEEVALIDKGAAKSGKSPHEAVVVVDKITTKKNGTAGKESDDDDDDVLCAVRDAFETTMMSQGLSDYQKKLQLEKLMNLGTGKRRELSNEWKALCVEELKLNINKLRFSAKLAEAANDDILIHVSISLSFKLKLNETTDDKKGLSFFCVDYSSSSSSSIVSWVEIPISMSINIGEISIPDLPIFFSMFLTIYLIAYFIVFRNWKPQIRPEASSCLISIFHGSPAVFLATRAVFSSSERSFASANTAAQNTVLDFSVAYFLTDLFHYIVFNPNDVLFIGHHVATLFVFLTCRFLVFHGACAILGLLILAEVTSACQNAWTLAGARKNDPESRLAVKVYDLLSPPFYAFYSIVRGVLGPLFFGKMVAFYARGGAHGVIPNWLWISWAIVVGIAITVSILWIWNLWIELFSERKANKIRVDKKIR

SEQ ID NO: 103487 - protein, 548 aa, Arabidopsis thaliana
  peptide (1)..(548): Ceres Seq. ID no. 13612846
MASPPSNRIWNEEDELSILKGLVDFRAKTGLESKIDWDAFYCYVKGSIHVKVSKCQLMSKTRKLKKKFLDQMEKIDQGNDPHFTRSSETEAFGYSMMIWRKIDAEYTNGVMDKAHQSESGEEVFEEDEEVALIDKGAAKSGKSPHEAVVVVDKITTKKNGTAGKESDDDDDDVLCAVRDAFETTMMSQGLSDYQKKLQLEKLMNLGTGKRRELSNEWKALCVEELKLNINKLRFSAKLAEAANDDILIHVSISLSFKLKLNETTDDKKGLSFFCVDYSSSSSSSIVSWVEIPISMSINIGEISIPDLPIFFSMFLTIYLIAYFIVFRNWKPQIRPEASSCLISIFHGSPAVFLATRAVFSSSERSFASANTAAQNTVLDFSVAYFLTDLFHYIVFNPNDVLFIGHHVATLFVFLTCRFLVFHGACAILGLLILAEVTSACQNAWTLAGARKNDPESRLAVKVYDLLSPPFYAFYSIVRGVLGPLFFGKMVAFYARGGAHGVIPNWLWISWAIVVGIAITVSILWIWNLWIELFSERKANKIRVDKKIR

SEQ ID NO: 103488 - protein, 491 aa, Arabidopsis thaliana
  peptide (1)..(491): Ceres Seq. ID no. 13612847
MSKTRKLKKKFLDQMEKIDQGNDPHFTRSSETEAFGYSMMIWRKIDAEYTNGVMDKAHQSESGEEVFEEDEEVALIDKGAAKSGKSPHEAVVVVDKITTKKNGTAGKESDDDDDDVLCAVRDAFETTMMSQGLSDYQKKLQLEKLMNLGTGKRRELSNEWKALCVEELKLNINKLRFSAKLAEAANDDILIHVSISLSFKLKLNETTDDKKGLSFFCVDYSSSSSSSIVSWVEIPISMSINIGEISIPDLPIFFSMFLTIYLIAYFIVFRNWKPQIRPEASSCLISIFHGSPAVFLATRAVFSSSERSFASANTAAQNTVLDFSVAYFLTDLFHYIVFNPNDVLFIGHHVATLFVFLTCRFLVFHGACAILGLLILAEVTSACQNAWTLAGARKNDPESRLAVKVYDLLSPPFYAFYSIVRGVLGPLFFGKMVAFYARGGAHGVIPNWLWISWAIVVGIAITVSILWIWNLWIELFSERKANKIRVDKKIR

SEQ ID NO: 103489 - DNA, 608 bp, Arabidopsis thaliana
  misc_feature (1)..(608): Ceres Seq. ID no. 13612860
  misc_feature (1)..(608): Ortholog of  Ceres SEQ ID NO 12556956 as cited in SEQ ID NO 78
gtttcttcgacagtggcaatgttttcatcttcgattaggttaatcgtatctgggttccaccggactcaacccctaaaatcgccggtaaattctccgagcgtcttcatctccgtacctaaattcttcaactctgagtcaaaatcgacgggaactggttcaagatccgtagcaatgagcagcgttgagaaaaccgggtcggattctggagcaatagagaatcgagcgagcaggatgagagagaagcttcaaaaagagctcgaaccagtggagttagtgatcgaagatgtttcgtatcagcacgctggtcacgccggaatgaaaggtagaaccgacgatgagacgcatttcaatgtgaagatcgtttctaaaggattcgagggaatgaatttggtgaagagacacaggttggtctatcatttgctccgggaagagttggatactggattgcacgctctttctatcgtctccaagacgccgtctgagtctccttctaaagactagtgtactggtactgtttaatgtatcttctgtttctgttatcagagtttctcatcaaactctgttcgattcaaagattgaatttttaccatcaaagtgctctgttttgg

SEQ ID NO: 103490 - protein, 166 aa, Arabidopsis thaliana
  peptide (1)..(166): Ceres Seq. ID no. 13612861
VSSTVAMFSSSIRLIVSGFHRTQPLKSPVNSPSVFISVPKFFNSESKSTGTGSRSVAMSSVEKTGSDSGAIENRASRMREKLQKELEPVELVIEDVSYQHAGHAGMKGRTDDETHFNVKIVSKGFEGMNLVKRHRLVYHLLREELDTGLHALSIVSKTPSESPSKD

SEQ ID NO: 103491 - protein, 160 aa, Arabidopsis thaliana; identical to SEQ ID NO: 36884
  peptide (1)..(160): Ceres Seq. ID no. 13612862

SEQ ID NO: 103492 - protein, 109 aa, Arabidopsis thaliana; identical to SEQ ID NO: 36885
  peptide (1)..(109): Ceres Seq. ID no. 13612863

SEQ ID NO: 103493 - DNA, 1451 bp, Arabidopsis thaliana
  misc_feature (1)..(1451): Ceres Seq. ID no. 13612864
  misc_feature (1)..(1451): Ortholog of  Ceres SEQ ID NO 13655660 as cited in SEQ ID NO 63727
gctctcactcccaaaacgatgtcgtctctatctcgcgttctccgtggcaccttcaacacttgcccgatccgccgtttttcctccgccgccaccgtagtctccgaacccaccgcagtcactgccgcaatctcgcctcctcaaaagtcactaaccagtctcgtgaatggcgaacgaaaccccaaacggatcgtggagaaattcaagaaggcatgtgagtcggagcggttccggaccaacatagccgtgtacgatagaaccgtgcgccgtctcgtagccgcaaagagattacactatgtcgaagagattttggaggagcagaagaagtaccgcgacatgtcaaaagagggattcgcggcgaggatcatttctctgtatggaaaagccggcatgtttgaaaatgcacagaaggtgttcgaagaaatgccaaacagagactgcaagaggtcagtgttgtccttcaatgccttgcttagtgcatatagactttccaagaaattcgatgtggttgaagaacttttcaatgagttacctggaaagttatcaatcaaaccagatattgtatcttacaatactttgattaaggcattgtgtgagaaggattctttacctgaagctgttgcattgcttgatgagattgagaacaagggactaaaacctgatatagttacattcaacacacttttactgtcttcgtatctaaagggacagtttgagctaggggaagagatatgggctaaaatggtggagaagaatgtagcaatagacatcaggacttacaatgctaggctgcttggattagccaatgaggcgaaatcgaaagagctagtaaatctctttggagaacttaaggctagtgggctcaaacctgatgttttcagtttcaatgctatgattagaggatctatcaacgaaggaaaaatggacgaagctgaagcgtggtacaaagaaattgtgaagcatggttatcgtcctgataaagctacctttgctttattgcttcctgctatgtgtaaagcaggtgactttgagtctgcgattgagctcttcaaggagacattcagtaagcggtatcttgtcggtcaaacaacgttgcagcagttagttgatgaattggtgaaagggtctaagagagaagaagctgaggagattgtgaagattgcaaagaccaatgatttcttaaagttgaagctaaatttgccgtcccaggaagagtaagtcatttgctactctctcactaagtgtctcgttgaattgtgtctgagcagcttaagctatatgtatttgctggtgttgctttgtggcttttctacttctctaaactttcctctgtggaagtaagacttgtttctttctatgtagtttcgcttatttcactggtgcaaaaaacagcatgtagtcgaggtttaggcagaagaaaccctacaaatttaataaattttggttatttgttt

SEQ ID NO: 103494 - protein, 404 aa, Arabidopsis thaliana; identical to SEQ ID NO: 22285
  peptide (1)..(404): Ceres Seq. ID no. 13612865

SEQ ID NO: 103495 - protein, 398 aa, Arabidopsis thaliana; identical to SEQ ID NO: 22286
  peptide (1)..(398): Ceres Seq. ID no. 13612866

SEQ ID NO: 103496 - protein, 293 aa, Arabidopsis thaliana; identical to SEQ ID NO: 22287
  peptide (1)..(293): Ceres Seq. ID no. 13612867

SEQ ID NO: 103497 - DNA, 1127 bp, Arabidopsis thaliana
  misc_feature (1)..(1127): Ceres Seq. ID no. 13612868
  misc_feature (1)..(1127): Ortholog of  Ceres SEQ ID NO 15172958 as cited in SEQ ID NO 51206
  misc_feature (1)..(1127): Ortholog of  Ceres SEQ ID NO 15171139 as cited in SEQ ID NO 60093
aaccattctctcttctcttctttatctcaaactctttcttcttccaaatcataaaccatggcaacatgcatagacacatgccgaaccggtaatacccaagacgatgattcccggttctgttgcatcaagaatttctttcgacccggtttctctgtaaaccggaagattcaccacacccaaatcgaagatgacgatgatgtctggatcaagatgcttgaagaagccaaatccgatgttaaacaagaacccattttatcaaactactactacgcttcgatcacatctcatcgatctttagagtctgctttagctcacatcctctccgtaaagctcagcaatttaaacctaccaagcaacacactcttcgaactgttcataagcgttttagaagaaagccctgagatcatcgaatccacgaagcaagatcttatagcagtcaaagaaagagacccagcttgtataagctacgttcattgcttcttgggcttcaaaggcttcctcgcttgtcaagctcatcgaatagctcataccctctggaaacagaacagaaaaatcgtagctttattgatccaaaacagagtatcagaatctttcgccgtcgatattcatcccggagcgaagatcggaaaagggattcttttagaccatgcgacgggcgtggtgatcggagagacggcggtggttggagacaatgtttcgattctacacggagtgaccttgggaggaacagggaaacagagtggtgatcggcatccgaagattggtgatggtgtgttgattggagctgggagttgtatattggggaatataacaatcggtgagggagctaagattggatcagggtcggtggtggttaaggatgtgccggcgcgtacgacggcggttggaaatccggcgaggttgattggtgggaaagagaatccgagaaaacatgataagattccttgtctgactatggaccagacatcgtatttaaccgagtggtctgattatgtgatttaacacaaatgtgtatttctttctttcttgtaactgatgatgatgaaacaagtcttgtctatttcttaatattttactatgtactaatcaaacaagtcttgaaatcaagctcatcgatctttaagaag

SEQ ID NO: 103498 - protein, 314 aa, Arabidopsis thaliana
  peptide (1)..(314): Ceres Seq. ID no. 13612869
MATCIDTCRTGNTQDDDSRFCCIKNFFRPGFSVNRKIHHTQIEDDDDVWIKMLEEAKSDVKQEPILSNYYYASITSHRSLESALAHILSVKLSNLNLPSNTLFELFISVLEESPEIIESTKQDLIAVKERDPACISYVHCFLGFKGFLACQAHRIAHTLWKQNRKIVALLIQNRVSESFAVDIHPGAKIGKGILLDHATGVVIGETAVVGDNVSILHGVTLGGTGKQSGDRHPKIGDGVLIGAGSCILGNITIGEGAKIGSGSVVVKDVPARTTAVGNPARLIGGKENPRKHDKIPCLTMDQTSYLTEWSDYVI

SEQ ID NO: 103499 - protein, 263 aa, Arabidopsis thaliana
  peptide (1)..(263): Ceres Seq. ID no. 13612870
MLEEAKSDVKQEPILSNYYYASITSHRSLESALAHILSVKLSNLNLPSNTLFELFISVLEESPEIIESTKQDLIAVKERDPACISYVHCFLGFKGFLACQAHRIAHTLWKQNRKIVALLIQNRVSESFAVDIHPGAKIGKGILLDHATGVVIGETAVVGDNVSILHGVTLGGTGKQSGDRHPKIGDGVLIGAGSCILGNITIGEGAKIGSGSVVVKDVPARTTAVGNPARLIGGKENPRKHDKIPCLTMDQTSYLTEWSDYVI

SEQ ID NO: 103500 - DNA, 831 bp, Arabidopsis thaliana
  misc_feature (1)..(831): Ceres Seq. ID no. 13612875
  misc_feature (1)..(831): Ortholog of  Ceres SEQ ID NO 12611082 as cited in SEQ ID NO 55853
  misc_feature (1)..(831): Ortholog of  Ceres SEQ ID NO 13664306 as cited in SEQ ID NO 61670
atccacaaaaaccattccctctctcaactctctgaatatttttcttcttacgatttacaaatttccgatgctgtgacattaacgtctgagaacagagaaacacttcaaatctttgaattcgtagtgcgacggagacggaggagccatcagtttcgaaaatggcgtgcgaaggtggaggatctaacgtcagatctagctactacaccattctcgggattcgtaaagatgcctctgtttccgatatccgcactgcttatcgtaagctagctatgaaatggcatccggatagatatgctcgaaatcctggagtcgccggagaagctaaacgtcggtttcaacaaatccaggaagcctattctgttttgaatgatgagaataagaggtcaatgtacgatgttggactatatgatcctcatgaagatgatgacgatgacttctgtgatttcatgcaagagatgatctcaatgatgaacaatgtcaaagacgcgggagagagcttggaagacttgcaacgaatgttcacggatatggttggtggagatggcgtgagctatgactgtaacaataatccaaagggcaacaaaagaccacgtgtcaatatctcgaggagtagtgctgcgatgcgttaaggcttacttcttttgtgtatgagtgtcgtgttgtatcaaaatttcaattccatgttcaattgtctagaccataaaataaattatctgtgaaaaccaactagaactaggtagaatctttggaatcccacatgccccaatcactaatgtatctctcatgatttggttgattttaaagattcgaaaattattcatgtattgttgc

SEQ ID NO: 103501 - protein, 156 aa, Arabidopsis thaliana; identical to SEQ ID NO: 36014
  peptide (1)..(156): Ceres Seq. ID no. 13612876

SEQ ID NO: 103502 - protein, 119 aa, Arabidopsis thaliana; identical to SEQ ID NO: 36015
  peptide (1)..(119): Ceres Seq. ID no. 13612877

SEQ ID NO: 103503 - protein, 88 aa, Arabidopsis thaliana
  peptide (1)..(88): Ceres Seq. ID no. 13612878
IHKNHSLSQLSEYFSSYDLQISDAVTLTSENRETLQIFEFVVRRRRRSHQFRKWRAKVEDLTSDLATTPFSGFVKMPLFPISALLIVS

SEQ ID NO: 103504 - DNA, 665 bp, Arabidopsis thaliana
  misc_feature (1)..(665): Ceres Seq. ID no. 13612885
  misc_feature (1)..(665): Ortholog of  Ceres SEQ ID NO 13575779 as cited in SEQ ID NO 20515
agggtttcgtcagagacagaagtgagagaggaggaaaaatgccggcgggacacggagtgagggcgagaacaagagatctgttcgcgagaccattcaggaagaagggttatattccactctccacttacctcagaaccttcaaggtcggcgattacgtcgatgtcaaggttaatggagctatccacaagggtatgcctcataagttctaccatggtcgtactggtcgcatctggaatgtcactaaacgtgccgttggtgttgaagtcaacaaacagattgggaacagaatcataaggaagaggatacatgtgcgtgtggagcatgtgcaacagtcaaggtgtgctgaggagtttaaactcagaaagaaacagaacgatgtgcttaaggctgatgctaaagccagaggtgagactatcagcaccaagagacagcctaaaggtcctaaaccgggtttcatggttgaaggtatgacattggagactgtcactcccattccttacgatgttgtcaacgatctcaagggtggttattgagttgtttccattttattatcattctctactcagaatttttgcacttgcttttttaattatgtttttgtatcaaacaagactgatttatatacgatatgagttcagattttgttaggaaagatggtttatccc

SEQ ID NO: 103505 - protein, 176 aa, Arabidopsis thaliana
  peptide (1)..(176): Ceres Seq. ID no. 13612886
GFVRDRSERGGKMPAGHGVRARTRDLFARPFRKKGYIPLSTYLRTFKVGDYVDVKVNGAIHKGMPHKFYHGRTGRIWNVTKRAVGVEVNKQIGNRIIRKRIHVRVEHVQQSRCAEEFKLRKKQNDVLKADAKARGETISTKRQPKGPKPGFMVEGMTLETVTPIPYDVVNDLKGGY

SEQ ID NO: 103506 - protein, 164 aa, Arabidopsis thaliana; identical to SEQ ID NO: 20517
  peptide (1)..(164): Ceres Seq. ID no. 13612887

SEQ ID NO: 103507 - protein, 113 aa, Arabidopsis thaliana; identical to SEQ ID NO: 20518
  peptide (1)..(113): Ceres Seq. ID no. 13612888

SEQ ID NO: 103508 - DNA, 1362 bp, Arabidopsis thaliana
  misc_feature (1)..(1362): Ceres Seq. ID no. 13612901
  misc_feature (1)..(1362): Ortholog of  Ceres SEQ ID NO 12636774 as cited in SEQ ID NO 372
  misc_feature (1)..(1362): Ortholog of  Ceres SEQ ID NO 12578315 as cited in SEQ ID NO 62451
  misc_feature (1)..(1362): Ortholog of  Ceres SEQ ID NO 12615466 as cited in SEQ ID NO 62761
  misc_feature (1)..(1362): Ortholog of  Ceres SEQ ID NO 13597295 as cited in SEQ ID NO 63743
  misc_feature (1)..(1362): Ortholog of  Ceres SEQ ID NO 12617090 as cited in SEQ ID NO 64005
  misc_feature (1)..(1362): Ortholog of  Ceres SEQ ID NO 13597439 as cited in SEQ ID NO 64081
  misc_feature (1)..(1362): Ortholog of  Ceres SEQ ID NO 13597233 as cited in SEQ ID NO 64370
  misc_feature (1)..(1362): Ortholog of  Ceres SEQ ID NO 13584577 as cited in SEQ ID NO 65298
  misc_feature (1)..(1362): Ortholog of  Ceres SEQ ID NO 13598327 as cited in SEQ ID NO 68040
aaattgaatcttcctcttcttcttgagtcttcagaacaacaacaaaaaacagaatcttgaaagaaagaaaaaaagaaaaaaacatgacagagaattctgaaaaaatcgatcgtttaaacgatctcacgacttttatctcgacgaagacaggagtgaaaggactcgtcgatgccgaaataaccgaagttcctagcatgtttcatgtcccttcttctattttatcaaacaacagaccttctgatatctccggcttaaacctcaccgtcccaatcatcgacctcggagatcgtaacacatcttcaagaaacgttgtcatttcgaagatcaaagacgcagctgagaattggggatttttccaagtgatcaatcatgatgttcctttaactgttcttgaagagatcaaagagagtgttcgaaggtttcatgaacaagatccagttgtcaagaaccaatatcttcctaccgataacaacaagagatttgtttataacaatgatttcgatctctatcattcttctcctttgaattggagagactctttcacttgttatattgctccagatcctccgaatccagaggaaatcccactagcttgcaggagtgcggtgatcgaatacacgaagcatgtaatggaattaggagctgtgctcttccaacttctctcagaagctttaggtttagactctgagacacttaagaggattgattgtcttaagggtttgtttatgctctgccattactatccaccttgcccacaacctgacctaactttaggtataagtaaacacaccgacaactctttcctcacgcttcttcttcaagaccaaatcggtggtcttcaagttcttcatgaagattattgggtcgatgtccctcctgtacctggagctcttgttgtcaacattggtgatttcatgcagctgataacgaacgataagttcttgagcgtggagcatagggtacgaccgaacaaagatagaccgcggatttcagttgcgtgcttctttagctcgagtctttctccaaattccacggtttatggaccgattaaagatcttttgtctgatgaaaaccctgctaagtacaaagatatcaccataccagagtacactgcaggatttcttgcgagcatttttgatgaaaagtcgtatttgactaattacatgatatgaagaaaatacttgtccgagtgcaaaatatatatttgtgcgttttgcatatgttacgctacattttctttgtacccgctatagagttcctcaaccattgtaccaataagaaaaaatgttttctacttcatgcttaaaacagcattctaggcttgtagctaacaagtcaaactataagttatctttttcaaac

SEQ ID NO: 103509 - protein, 362 aa, Arabidopsis thaliana
  peptide (1)..(362): Ceres Seq. ID no. 13612902
MTENSEKIDRLNDLTTFISTKTGVKGLVDAEITEVPSMFHVPSSILSNNRPSDISGLNLTVPIIDLGDRNTSSRNVVISKIKDAAENWGFFQVINHDVPLTVLEEIKESVRRFHEQDPVVKNQYLPTDNNKRFVYNNDFDLYHSSPLNWRDSFTCYIAPDPPNPEEIPLACRSAVIEYTKHVMELGAVLFQLLSEALGLDSETLKRIDCLKGLFMLCHYYPPCPQPDLTLGISKHTDNSFLTLLLQDQIGGLQVLHEDYWVDVPPVPGALVVNIGDFMQLITNDKFLSVEHRVRPNKDRPRISVACFFSSSLSPNSTVYGPIKDLLSDENPAKYKDITIPEYTAGFLASIFDEKSYLTNYMI

SEQ ID NO: 103510 - protein, 325 aa, Arabidopsis thaliana
  peptide (1)..(325): Ceres Seq. ID no. 13612903
MFHVPSSILSNNRPSDISGLNLTVPIIDLGDRNTSSRNVVISKIKDAAENWGFFQVINHDVPLTVLEEIKESVRRFHEQDPVVKNQYLPTDNNKRFVYNNDFDLYHSSPLNWRDSFTCYIAPDPPNPEEIPLACRSAVIEYTKHVMELGAVLFQLLSEALGLDSETLKRIDCLKGLFMLCHYYPPCPQPDLTLGISKHTDNSFLTLLLQDQIGGLQVLHEDYWVDVPPVPGALVVNIGDFMQLITNDKFLSVEHRVRPNKDRPRISVACFFSSSLSPNSTVYGPIKDLLSDENPAKYKDITIPEYTAGFLASIFDEKSYLTNYMI

SEQ ID NO: 103511 - DNA, 1480 bp, Arabidopsis thaliana
  misc_feature (1)..(1480): Ceres Seq. ID no. 13612907
  misc_feature (1)..(1480): Ortholog of  Ceres SEQ ID NO 13593987 as cited in SEQ ID NO 54961
agattcgttttatttttcaatcgtttcaatttctaaaattctcaacgcgatcaccccaatccaaatttagggtttcttttgtctttctgcgatcgatctctggtaactcataacttgttgttgaatcgcgaagatggcatcaaacggatccttctctgctcagagaaacgcaaacgctggaacaacgatgaagagacgaaacgacaatcgcggttacggtggcggaatcggatgttatcaagaggagaggaaccgttacgcgccgccgcaaaaacgtttcagatcgcaactgcaacagcaattccgatctggtcataatcctctgtatcattatggtagtaatactaataataacgtgtctagggtttcttctcagtcatataacaattacggtgttgatgtgattgcttctaattcaagttttgctttacctaacaatgattctaacaccaacaattatcagaaaccctttgttgtttatggaaaccctaatccccaaattgttcctcttccattaccttatcgtaagcttgatcctttagattcgttgcctcaatgggttccaaattcaactccgaattatcctgttaggtcatcgaattttgtaccaaacacacctgattttacgaatgttcaaaatccgatgaatcattcgaacatggtttcagttgtgtctcaatcgatgcatcaaccaattgttttaagcaaagaattgactgatttgcttagtcttcttaacaatgagaaagagaagaaaacttcagaagcaagtaataatgattcattgcctgttggattaagctttgacaatccatcatcgcttaatgttcgacatgaatctgtgattaagtctctgtattctgatatgccgaggcaatgtacttcgtgtggggtgagattcaaatgtcaagaagagcatagtaaacatatggattggcacgtaaggaagaacaggtcggtgaaaaccactacaagacttggtcagcaaccgaagaaatcgaggggatggttagcgagtgcatctttatggctttgtgcaccaacgggaggagggaccgtagaagtagcatcttttggaggaggagaaatgcagaagaagaatgaaaaggatcaagtacaaaaacaacacatggtgcctgcggatgaagatcagaagaattgcgcgttatgcgtagagccgtttgaagagttctttagccatgaagctgatgactggatgtacaaagatgcagtctacttaaccaagaatggtcgtatagttcatgttaagtgtatgcctgaaccccgacctgctaaggatttgagagagccgtcgagggtaatgtctgttacagttccatcggttgcgaaagctatactctgctgattgagattttttatatctctgttttagtcattcgtttttttaaaagtaaatgtacattacattaatcaagatgtaacacaaatacagttctatcaattgaatctcctattttac

SEQ ID NO: 103512 - protein, 410 aa, Arabidopsis thaliana
  peptide (1)..(410): Ceres Seq. ID no. 13612908
MASNGSFSAQRNANAGTTMKRRNDNRGYGGGIGCYQEERNRYAPPQKRFRSQLQQQFRSGHNPLYHYGSNTNNNVSRVSSQSYNNYGVDVIASNSSFALPNNDSNTNNYQKPFVVYGNPNPQIVPLPLPYRKLDPLDSLPQWVPNSTPNYPVRSSNFVPNTPDFTNVQNPMNHSNMVSVVSQSMHQPIVLSKELTDLLSLLNNEKEKKTSEASNNDSLPVGLSFDNPSSLNVRHESVIKSLYSDMPRQCTSCGVRFKCQEEHSKHMDWHVRKNRSVKTTTRLGQQPKKSRGWLASASLWLCAPTGGGTVEVASFGGGEMQKKNEKDQVQKQHMVPADEDQKNCALCVEPFEEFFSHEADDWMYKDAVYLTKNGRIVHVKCMPEPRPAKDLREPSRVMSVTVPSVAKAILC

SEQ ID NO: 103513 - protein, 392 aa, Arabidopsis thaliana
  peptide (1)..(392): Ceres Seq. ID no. 13612909
MKRRNDNRGYGGGIGCYQEERNRYAPPQKRFRSQLQQQFRSGHNPLYHYGSNTNNNVSRVSSQSYNNYGVDVIASNSSFALPNNDSNTNNYQKPFVVYGNPNPQIVPLPLPYRKLDPLDSLPQWVPNSTPNYPVRSSNFVPNTPDFTNVQNPMNHSNMVSVVSQSMHQPIVLSKELTDLLSLLNNEKEKKTSEASNNDSLPVGLSFDNPSSLNVRHESVIKSLYSDMPRQCTSCGVRFKCQEEHSKHMDWHVRKNRSVKTTTRLGQQPKKSRGWLASASLWLCAPTGGGTVEVASFGGGEMQKKNEKDQVQKQHMVPADEDQKNCALCVEPFEEFFSHEADDWMYKDAVYLTKNGRIVHVKCMPEPRPAKDLREPSRVMSVTVPSVAKAILC

SEQ ID NO: 103514 - protein, 240 aa, Arabidopsis thaliana
  peptide (1)..(240): Ceres Seq. ID no. 13612910
MNHSNMVSVVSQSMHQPIVLSKELTDLLSLLNNEKEKKTSEASNNDSLPVGLSFDNPSSLNVRHESVIKSLYSDMPRQCTSCGVRFKCQEEHSKHMDWHVRKNRSVKTTTRLGQQPKKSRGWLASASLWLCAPTGGGTVEVASFGGGEMQKKNEKDQVQKQHMVPADEDQKNCALCVEPFEEFFSHEADDWMYKDAVYLTKNGRIVHVKCMPEPRPAKDLREPSRVMSVTVPSVAKAILC

SEQ ID NO: 103515 - DNA, 1213 bp, Arabidopsis thaliana
  misc_feature (1)..(1213): Ceres Seq. ID no. 13612931
  misc_feature (1)..(1213): Ortholog of  Ceres SEQ ID NO 15172464 as cited in SEQ ID NO 59111
acatttttttgtctttaaagctcaaaacaaaagacaaaaaaaaaacggaaaactttcttttttccggacacataaaaacaacacaaactttattagacagaaacaaactagtaaaaagattttgaacatcaagaaacaaaaatctctctctgtctttctcaattatgaaactcacctatcaattcttcatcttctggttctttttaccattctttgcaatctccggtgatgatgattataaaaatctgatctttaaaggttgtgcaaatcagaaatctccagacccaactggtgttttctctcagaatctcaaaaacttattcacttctttagtttctcaatcatcacaaagctctttcgcttccgtaacctccggaactgataacaccaccgccgtgatcggtgtttttcagtgccgtggcgatctccaaaacgctcagtgttacgattgcgtctccaaaatccctaaactcgtttctaaactctgcggtggcggcagagatgacggtaatgtggtggcggctcgtgttcacctcgctggatgttatatccggtatgagagttcaggattccggcaaacttccggtacggagatgttgttccgtgtctgtgggaaaaaagattctaacgatcctgggtttgtcgggaaaagggagacggcgtttggtatggcggagaacggcgtgaaaactggatcatccggtggtggtggtggcggaggaggtttttacgcggggcagtatgagtcggtgtatgtgttgggacagtgtgagggtagtttgggaaattcagattgtggggaatgtgtgaaagatggatttgagaaagcaaagagtgagtgtggagagtcgaactcgggacaagtttaccttcagaagtgcttcgttagctatagttactactctcatggtgttcccaacatagagccattatcaggtggagagaagagacaacacacagaaaggacgatagctttggcggtgggaggagtttttgttttagggtttgtgattgtttgtttgttggttttgaggtctgccatgaagaagaagagtaataaatatgatgcttattgattcttatttttacctaccaattcttattttcccaattaaaaatttaacaaggtatattagaaaaatgattagtatagcatgtccaattgtatattcaattatgatattgatttaaatacaaataaattttgattttt

SEQ ID NO: 103516 - protein, 303 aa, Arabidopsis thaliana
  peptide (1)..(303): Ceres Seq. ID no. 13612932
MKLTYQFFIFWFFLPFFAISGDDDYKNLIFKGCANQKSPDPTGVFSQNLKNLFTSLVSQSSQSSFASVTSGTDNTTAVIGVFQCRGDLQNAQCYDCVSKIPKLVSKLCGGGRDDGNVVAARVHLAGCYIRYESSGFRQTSGTEMLFRVCGKKDSNDPGFVGKRETAFGMAENGVKTGSSGGGGGGGGFYAGQYESVYVLGQCEGSLGNSDCGECVKDGFEKAKSECGESNSGQVYLQKCFVSYSYYSHGVPNIEPLSGGEKRQHTERTIALAVGGVFVLGFVIVCLLVLRSAMKKKSNKYDAY

SEQ ID NO: 103517 - protein, 160 aa, Arabidopsis thaliana
  peptide (1)..(160): Ceres Seq. ID no. 13612933
MLFRVCGKKDSNDPGFVGKRETAFGMAENGVKTGSSGGGGGGGGFYAGQYESVYVLGQCEGSLGNSDCGECVKDGFEKAKSECGESNSGQVYLQKCFVSYSYYSHGVPNIEPLSGGEKRQHTERTIALAVGGVFVLGFVIVCLLVLRSAMKKKSNKYDAY

SEQ ID NO: 103518 - DNA, 1072 bp, Arabidopsis thaliana
  misc_feature (1)..(1072): Ceres Seq. ID no. 13612941
  misc_feature (1)..(1072): Ortholog of  Ceres SEQ ID NO 12608127 as cited in SEQ ID NO 57579
  misc_feature (1)..(1072): Ortholog of  Ceres SEQ ID NO 12634558 as cited in SEQ ID NO 0
caacaccactaataaactcaacatggctagatccttgttgctctcgctaaccctcacattcctcttcgccggaattgtctcagctcgtgactggaacatcctgagccagctcaaaggaaccacaaccaccacgaagactagccaaaccggcgtcacatctttgaaagctcccaacctaaacggatactgtgagagctggagagtcaacgtggagcttaacaacataagggactttaaggtggttccacaggaatgtgtatggttcgtccaaaagtacatgacctcatctcaatacgaagatgacgtggagagagccgtcgatgaagccatcctctacctcggaaaaacttgttgcgagaagaagacatgcgatggcatggatgcttggatctttgacattgatgacactcttctctcaaccattccttaccacaagagcaacggttgtttcggtggtgagcaactgaacacgaccaagttcgaggaatggcaaaattcgggcaaggcaccagcggttccacacatggtgaagttgtaccatgagatcagagagagaggtttcaagatctttttgatctcttctcgtaaagagtatctcagatctgccaccgtcgaaaatcttattgaagccggttaccacagctggtctaacctccttctgaggggagaagatgatgaaaagaagagtgtgagccaatacaaagcagatttgaggacatggcttacaagtcttgggtacagagtttggggagtgatgggtgcacaatggaacagcttctctggttgtccagttcccaagagaaccttcaagctccctaactccatctactatgtcgcctgattaaatcttatttactaacaaaacaataagatcagagtttcattctgattcttgagtcttttttttctctctccctcttttcatttctggtttatataaccaattcaaatgcttatgatccatgcatgaaccatgatcatctttgtgtttttttttccttctgtattaccattttgggcctttgtgaaattgattttgggcttttgttatataatctcctctttctctttc

SEQ ID NO: 103519 - protein, 279 aa, Arabidopsis thaliana; identical to SEQ ID NO: 36338
  peptide (1)..(279): Ceres Seq. ID no. 13612942

SEQ ID NO: 103520 - protein, 272 aa, Arabidopsis thaliana; identical to SEQ ID NO: 36339
  peptide (1)..(272): Ceres Seq. ID no. 13612943

SEQ ID NO: 103521 - protein, 187 aa, Arabidopsis thaliana; identical to SEQ ID NO: 36340
  peptide (1)..(187): Ceres Seq. ID no. 13612944

SEQ ID NO: 103522 - DNA, 3358 bp, Arabidopsis thaliana
  misc_feature (1)..(3358): Ceres Seq. ID no. 13612945
  misc_feature (1)..(3358): Ortholog of  Ceres SEQ ID NO 14313220 as cited in SEQ ID NO 66007
  misc_feature (1)..(3358): Ortholog of  Ceres SEQ ID NO 13658778 as cited in SEQ ID NO 66511
ctcacacatagtcacatacatttctctaccccaccttctgctctgcttccgagagctcagtgtacctcgccatggaaccaaacaccatggccagcttcgacgatgagcatcgtcattcctcattctcggctaagatttgcaaagtctgtggcgatgaggtcaaagacgatgacaatggtcagacttttgtggcgtgtcacgtgtgcgtttacccggtttgcaaaccttgctatgaatatgagcgtagcaacggtaacaaatgttgccctcaatgcaacactctttacaaacgccacaaaggctctccaaaaatcgccggagatgaagaaaacaatggtcctgatgattcagatgatgagttgaatatcaaatatcgccaggatggttcctccattcaccagaattttgcctatggatcggaaaatggagactacaacagtaagcagcaatggcgtccaaatggtcgagccttttcttccaccggaagtgtgttggggaaagactttgaagctgagagagatggctacacagatgcggagtggaaagaacgtgtagataaatggaaagcgaggcaagagaagagaggtttagtgactaaaggagaacaaacaaacgaagacaaagaagatgatgaagaagaatacctagatgctgaagcaagacaacctctctggagaaaagtcccaatctcttcgagcaaaatcagtccttaccgcatcgtgatcgttcttcgccttgtgatcttagttttcttcttccgtttccgtatcttgacaccagccaaagacgcataccctctctggcttatctcagtcatctgcgagatctggttcgctctctcttggatccttgatcagttcccgaaatggtttccgattaaccgagaaacctaccttgaccgtctctctatgagatttgaacgggatggggaaaagaacaagcttgcaccggttgatgtgtttgtcagtacagtggatccgctcaaggaacctcccataatcacagccaacacaattctttcgatcttagccgttgattacccagtgaataaggtgagctgctatgtgtctgatgacggtgcatcaatgctcctgttcgatacattgtccgaaacttccgagtttgcaaggagatgggttccgttttgcaagaagtacaatgttgagccaagagctccagagttttacttctcagagaagattgattacctaaaggataaagtccaaactacattcgtcaaagatcgcagagcaatgaagagagaatatgaagaattcaaagtgaggatcaatgctttagtagctaaagctcaaaagaagcctgaagaaggttgggttatgcaagatggtacaccatggcctgggaataacactcgtgatcatcccgggatgattcaggtgtatctcggcaaagaaggagcattcgacattgatggtaacgaattgccacgtctcgtgtatgtatcaagagagaagcgtcctggttacgcacaccacaagaaagctggagccatgaatgcaatggttcgagtctctgcagtactcactaatgctccattcatgcttaatctcgactgtgaccattacatcaacaacagtaaagccataagagaatcaatgtgctttctaatggatccacagcttggtaaaaagctctgttatgtccaattcccacaaagattcgacggaatcgatcttaacgatcgatacgccaacagaaacatcgtcttcttcgatataaacatgagaggcttagatggaatccaaggaccagtctatgtaggaacaggatgtgtattcaatagaccagcattatacggatacgaacctccggtatcggaaaaacgaaagaaaatgacatgtgattgttggccgtcgtggatctgctgttgttgcggcggaggtaaccgtaatcacaaatcagattcgtcaaagaagaaatcaggaatcaagagcttgttctcgaaactaaagaagaagactaagaagaagagtgatgataaaacgatgagcagctatagtagaaaacgatcatcgacggaggcgatttttgatttggaagatattgaggaagggcttgaaggatatgatgagcttgagaaatcttcgttaatgtcgcagaagaattttgagaagagatttggaatgtctcctgtgtttattgcgtcgacgttgatggagaacggaggattgccggaggcgacgaacacgagctcgttgatcaaagaagctattcatgttattagctgtggttatgaagagaagactgaatggggcaaagagattggatggatttatggatcagtaacagaagatatcctcactggatttagaatgcattgtagaggttggaaatcagtttactgtatgcctaaaagaccagctttcaaaggatcagctccgatcaatttatctgatcggttgcaccaagttcttagatgggctcttggttccgtcgaaatcttctttagtcgtcattgtcctttgtggtatgcttggggaggcaagcttaagattctagaacgtcttgcttacatcaacacaattgtttatcctttcacttctattcctctacttgcctattgtactattccggccgtttgtcttctcaccggcaagttcatcattcctacgatcaacaatttcgcaagcatatggttcttagctctgttcctatcaatcattgcaacggctatcttagaactccggtggagtggtgtaagcatcaatgacctctggcgtaacgagcaattctgggtgattggcggtgtctcagctcatctcttcgctgtctttcaaggtcttcttaaagttctctttggtgttgacactaacttcaccgtcacgtcaaaaggagccagtgacgaagccgatgagtttggagatctttacctctttaaatggacaacccttctcatccctccgacaactctcattattctcaacatggtcggtgttgttgccggagtttctgacgctattaacaatggatatggttcttggggaccgctttttgggaaactgtttttcgcgttttgggtcattgttcatctttatcctttcctcaaaggtttgatgggtagacaaaaccgaacaccgacgattgttgttctttggtctatccttctcgcttcgatcttctctttggtttgggttcggattgatccgttcttgccgaaacagactggtccgttactgaagcaatgtggcgtcgactgttaaatgaggaaccgcattttcgttttggaccgctattttgagccattttgcttggcctatttttccgatttgggtgttctttgttggattatatggatttgtaaggaggaaaaaaaatacaaaactttgattcacttgtg

SEQ ID NO: 103523 - protein, 1049 aa, Arabidopsis thaliana
  peptide (1)..(1049): Ceres Seq. ID no. 13612946
MEPNTMASFDDEHRHSSFSAKICKVCGDEVKDDDNGQTFVACHVCVYPVCKPCYEYERSNGNKCCPQCNTLYKRHKGSPKIAGDEENNGPDDSDDELNIKYRQDGSSIHQNFAYGSENGDYNSKQQWRPNGRAFSSTGSVLGKDFEAERDGYTDAEWKERVDKWKARQEKRGLVTKGEQTNEDKEDDEEEYLDAEARQPLWRKVPISSSKISPYRIVIVLRLVILVFFFRFRILTPAKDAYPLWLISVICEIWFALSWILDQFPKWFPINRETYLDRLSMRFERDGEKNKLAPVDVFVSTVDPLKEPPIITANTILSILAVDYPVNKVSCYVSDDGASMLLFDTLSETSEFARRWVPFCKKYNVEPRAPEFYFSEKIDYLKDKVQTTFVKDRRAMKREYEEFKVRINALVAKAQKKPEEGWVMQDGTPWPGNNTRDHPGMIQVYLGKEGAFDIDGNELPRLVYVSREKRPGYAHHKKAGAMNAMVRVSAVLTNAPFMLNLDCDHYINNSKAIRESMCFLMDPQLGKKLCYVQFPQRFDGIDLNDRYANRNIVFFDINMRGLDGIQGPVYVGTGCVFNRPALYGYEPPVSEKRKKMTCDCWPSWICCCCGGGNRNHKSDSSKKKSGIKSLFSKLKKKTKKKSDDKTMSSYSRKRSSTEAIFDLEDIEEGLEGYDELEKSSLMSQKNFEKRFGMSPVFIASTLMENGGLPEATNTSSLIKEAIHVISCGYEEKTEWGKEIGWIYGSVTEDILTGFRMHCRGWKSVYCMPKRPAFKGSAPINLSDRLHQVLRWALGSVEIFFSRHCPLWYAWGGKLKILERLAYINTIVYPFTSIPLLAYCTIPAVCLLTGKFIIPTINNFASIWFLALFLSIIATAILELRWSGVSINDLWRNEQFWVIGGVSAHLFAVFQGLLKVLFGVDTNFTVTSKGASDEADEFGDLYLFKWTTLLIPPTTLIILNMVGVVAGVSDAINNGYGSWGPLFGKLFFAFWVIVHLYPFLKGLMGRQNRTPTIVVLWSILLASIFSLVWVRIDPFLPKQTGPLLKQCGVDC

SEQ ID NO: 103524 - protein, 1044 aa, Arabidopsis thaliana
  peptide (1)..(1044): Ceres Seq. ID no. 13612947
MASFDDEHRHSSFSAKICKVCGDEVKDDDNGQTFVACHVCVYPVCKPCYEYERSNGNKCCPQCNTLYKRHKGSPKIAGDEENNGPDDSDDELNIKYRQDGSSIHQNFAYGSENGDYNSKQQWRPNGRAFSSTGSVLGKDFEAERDGYTDAEWKERVDKWKARQEKRGLVTKGEQTNEDKEDDEEEYLDAEARQPLWRKVPISSSKISPYRIVIVLRLVILVFFFRFRILTPAKDAYPLWLISVICEIWFALSWILDQFPKWFPINRETYLDRLSMRFERDGEKNKLAPVDVFVSTVDPLKEPPIITANTILSILAVDYPVNKVSCYVSDDGASMLLFDTLSETSEFARRWVPFCKKYNVEPRAPEFYFSEKIDYLKDKVQTTFVKDRRAMKREYEEFKVRINALVAKAQKKPEEGWVMQDGTPWPGNNTRDHPGMIQVYLGKEGAFDIDGNELPRLVYVSREKRPGYAHHKKAGAMNAMVRVSAVLTNAPFMLNLDCDHYINNSKAIRESMCFLMDPQLGKKLCYVQFPQRFDGIDLNDRYANRNIVFFDINMRGLDGIQGPVYVGTGCVFNRPALYGYEPPVSEKRKKMTCDCWPSWICCCCGGGNRNHKSDSSKKKSGIKSLFSKLKKKTKKKSDDKTMSSYSRKRSSTEAIFDLEDIEEGLEGYDELEKSSLMSQKNFEKRFGMSPVFIASTLMENGGLPEATNTSSLIKEAIHVISCGYEEKTEWGKEIGWIYGSVTEDILTGFRMHCRGWKSVYCMPKRPAFKGSAPINLSDRLHQVLRWALGSVEIFFSRHCPLWYAWGGKLKILERLAYINTIVYPFTSIPLLAYCTIPAVCLLTGKFIIPTINNFASIWFLALFLSIIATAILELRWSGVSINDLWRNEQFWVIGGVSAHLFAVFQGLLKVLFGVDTNFTVTSKGASDEADEFGDLYLFKWTTLLIPPTTLIILNMVGVVAGVSDAINNGYGSWGPLFGKLFFAFWVIVHLYPFLKGLMGRQNRTPTIVVLWSILLASIFSLVWVRIDPFLPKQTGPLLKQCGVDC

SEQ ID NO: 103525 - protein, 770 aa, Arabidopsis thaliana; identical to SEQ ID NO: 75253
  peptide (1)..(770): Ceres Seq. ID no. 13612948

SEQ ID NO: 103526 - DNA, 1220 bp, Arabidopsis thaliana
  misc_feature (1)..(1220): Ceres Seq. ID no. 13612953
  misc_feature (1)..(1220): Ortholog of  Ceres SEQ ID NO 13595626 as cited in SEQ ID NO 51116
ttcgacacaaaaagccctaatctctgcttctgtaaagttcaacatttggcggagtcaaagaaacagagtgattctctgatccgattccggcgaaagaggacgaaacaaacggaacttgttcatcatcttctccagaaatgacgtcgtttcaggtgatgcgttcttcaaattcgagaaactcggatctatctcgtcgcatctcttctgcttctacttcttcttcgtctataagacctcaacaacagttccggcgagatctaacaagtgtcggttacggcggaagaaacgacggattatacagttcaaattcgatgacggtcgaagggattttacacgatactttcgcatcagatccaccagcaccaacggaatcttcactcttagatgcgtcgataaatctgatggatgcttctccagcaccaatggagataacaacaacgacggcttctgatgttgtggatcacggcggaggaacggagacgacgcgtggtgggaagagtgttgatgagatttggagagagatggtatcaggagaaggtaaagggatgaaggaagagacgtcggaagagataatgacgttagaggattttctagcgaaagctgcggtggaagacgaaacagcggtgacggcgtcggcggaggatttggatgtgaagattccggtgacgaattacggattcgatcattctgcaccgccgcataatccgtttcagatgattgataaagtagaaggatcaatagttgcgtttgggaatggtttagatgtttacggaggaggagctagagggaagagagcgagagtgatggttgagccattggataaagcagctgcacagagacagagaaggatgattaagaatcgtgaatctgcagctaggtctagagagaggaaacaagcttatcaagttgagttagaagctttggctgcgaagcttgaggaagagaatgagttgctttctaaggagattgaagataagaggaaagagagataccagaagttgatggagtttgtgattcctgttgttgagaaaccgaagcagcagccaccacggtttttacgcaggattcggtctttggaatggtgataagaggtatagacttttgaggattttagggtcttaatgttacttactttgtgtatgtgtgtgtgagagttgattcataatctgcagtagagtgtaatgattatggttaataacttatatattatattagattgc

SEQ ID NO: 103527 - protein, 315 aa, Arabidopsis thaliana; identical to SEQ ID NO: 35809
  peptide (1)..(315): Ceres Seq. ID no. 13612954

SEQ ID NO: 103528 - protein, 309 aa, Arabidopsis thaliana; identical to SEQ ID NO: 35810
  peptide (1)..(309): Ceres Seq. ID no. 13612955

SEQ ID NO: 103529 - protein, 257 aa, Arabidopsis thaliana; identical to SEQ ID NO: 35811
  peptide (1)..(257): Ceres Seq. ID no. 13612956

SEQ ID NO: 103530 - DNA, 1434 bp, Arabidopsis thaliana
  misc_feature (1)..(1434): Ceres Seq. ID no. 13612957
  misc_feature (1)..(1434): Ortholog of  Ceres SEQ ID NO 13597160 as cited in SEQ ID NO 64016
  misc_feature (1)..(1434): Ortholog of  Ceres SEQ ID NO 15169659 as cited in SEQ ID NO 64152
gccctttcattattatgtcaacaaccctcctctattgaagatttcttcaatcatcttctccacaacaaaaaaataaccctaatttacacagaaaatatgtggggaattggaggaaattactactggcgaaagaaaaacaacaacggaggagaaagcgaagcgatcgttgtggtattcgcttggatgtctagcgaagaacgcaatctaaagaaccatgtcgatctctattcttctcttctttgggattctctcgtttgccattctcaatttctcaacatgtttcttccagataaagctgcagatttagcttctaatgttgtttctgaacttgtcaaggagctcaaagcaaagccagttcctttagtgtttgcttctttctctggtggtcctaatgcttgtatgtataaagttcttcaaatacttgaaggaacatgcgaaacgggactaaatccggatgattgtagattggttagaaactgcatctcagggtttatttatgactcatgtcctgtggatttcactagcgacttgggagctcgattagcggttcatccaactacgcttaaaatgtctagtccacctaaaccgtttgtatgggcagcgaatggtattgcttcgagtctcgattatgtttttctcaacaggtttgaatcacagcgagccgagtactggcagactctttactctactataatcatgagagtaccttatctcattctatgctctgaaaacgatgaccttgctccttatcaaactatacacaatttcgctacacgtctccaagaactaggaggaaatgtaaaacttgtaaaatggaatgattcccctcattgtggtcattatcgttataaccaggtcgactataaagctgctgtatctgagttcttgtcaaaagcagcgtcggtttattcgcagaagacgagaagtcttgacagagaagctatgaaaggaacatgtcatgatgagataacagagccaattcagagcttggggcaatcaacctctggtcttaaccgaagcttcaacggaactccacttgtcacaaccgatcatttcttcgtacctagcaccgtaggttactacgtgggcagagacggcggatatgtgcaagatgaacacaaacaagatttgatttgtttgtccaatactcaaaccaatgaatcggttaagcccaatggagttctaggccaaatcttatttgatgtttatattccgaagaatgttgaggattgggatataaagctatcagaaaccgggcggtctaggcggagaccggggaagagatttatacgtagatcgagattgtaacatctgagttatatattatatataccatgagtacccatttgttttcttcagatactgttgcagaggtattccatttggttttccctcgcaaagattaataaattaataaaataagatcttttttgc

SEQ ID NO: 103531 - protein, 435 aa, Arabidopsis thaliana; identical to SEQ ID NO: 36305
  peptide (1)..(435): Ceres Seq. ID no. 13612958

SEQ ID NO: 103532 - protein, 403 aa, Arabidopsis thaliana; identical to SEQ ID NO: 36306
  peptide (1)..(403): Ceres Seq. ID no. 13612959

SEQ ID NO: 103533 - protein, 374 aa, Arabidopsis thaliana; identical to SEQ ID NO: 36307
  peptide (1)..(374): Ceres Seq. ID no. 13612960

SEQ ID NO: 103534 - DNA, 1789 bp, Arabidopsis thaliana
  misc_feature (1)..(1789): Ceres Seq. ID no. 13612965
  misc_feature (1)..(1789): Ortholog of  Ceres SEQ ID NO 13656138 as cited in SEQ ID NO 65492
  misc_feature (1)..(1789): Ortholog of  Ceres SEQ ID NO 14301542 as cited in SEQ ID NO 66246
atcttcttcgcaaatctcaacaatggtgtttgaagcattcgaagtcggcacagtcccattcaattccgatggttggggaccaccagatgcttccgacacttcctccaccagcgtcgcggcggcgaatctcctcccaaacgtccccttcgcttccttctcacgatccgaaaaactcggacgcgttgctgattggactcgagctctctcaaatccatcagctcgtcctcacaccggatccaaatcagatccatcagcgatcttcgatttctcagcttttgcagtagatgaaggatttggtctaacaaactcaggtggaaacgccgacgaagacgccgctttccgattagtcgacggaaaaccaccgccgcgtcctaaattcggacctaaatggagattcaatcaataccataaccgaaatcagcttcctcaacgtcgtgatgaagaagttgaagctaagaaacgtgaagctgagaaagatcgagctcgtcgtgatcgtctctacaataacaatcgtaacaatattcatcagcaacgccgtgaagccgccgcgtttaaatcatcagttgatattcaaccggaatggaatatgcttgagcagattccgttttcgactttctctaagctttcgtttacagtttctgaacctgaagatcttcttctttgtggtggacttgagtcttatgatcggagttttgatcgtattactcctaaagctgatcgtagacttgagcgtttcaagaacagaagctttaaggttactacaagtgatgatcttgtgatcagacgtcttgctaaagaagataaagctactgtttttgctactgatgctattctagctgctcttatgtgtgctcctagatcggtttattcatgggatcttgtgattcaacgtgttgggaataagcttttctttgataagagagatgggtcaccgcttgatttgttatctgttcatgagacttctcaagagcctttgcctgagggtaaagatgatattaactctgctcattctctaggtctggaggctgcttatattaatcagaattttgctcagcaggttttggttaagaatgggaaaagggaaacttttgatgagccaattcctaatgttaatgaaggtgaagagaatgcttctattgcttataggtataggagatggaagcttgatgatagtatgtatctagttgctaggtgtgagttacagagcactgttgatttgaataaccagagatcgtttttaactttgaatgctcttaacgagtttgatcctaagtactctggtgttgattggagacagaagcttgagactcagagaggtgcggttttagctaatgagttgaagaacaatggtaataagttagctaaatggactgcgcaggctctcttggctaatgcggatatgatgaagattgggtttgtttcgagggttcatcctcgtgatcattttaaccatgttatattatcggttttggggtataagccgaaagatttcgctgggcagatcaatctgaacactaacaatatgtggggaattgtgaagtcgattgttgatctgtgtatgaagttaagtgaaggaaagtatgttctagtgaaggatccatcgaagcctcaagttaggatttacgaagttccggctgatgcatttgacaatgattatgtggaggagccactccctgaagatgaacaggttcagccacctgaggagaacactgatgcaggagcagagactaatggggtttcctctactaatgtagctgtagaggataagaaatccgaagttgaagcctga

SEQ ID NO: 103535 - protein, 595 aa, Arabidopsis thaliana; identical to SEQ ID NO: 39389
  peptide (1)..(595): Ceres Seq. ID no. 13612966

SEQ ID NO: 103536 - protein, 588 aa, Arabidopsis thaliana; identical to SEQ ID NO: 39390
  peptide (1)..(588): Ceres Seq. ID no. 13612967

SEQ ID NO: 103537 - protein, 400 aa, Arabidopsis thaliana; identical to SEQ ID NO: 39391
  peptide (1)..(400): Ceres Seq. ID no. 13612968

SEQ ID NO: 103538 - DNA, 1272 bp, Arabidopsis thaliana
  misc_feature (1)..(1272): Ceres Seq. ID no. 13612973
  misc_feature (1)..(1272): Ortholog of  Ceres SEQ ID NO 13662721 as cited in SEQ ID NO 64602
atatctcgccgccgccgtcgacgacgacgacacttgcttcaccaccgtatcgctatcaacagaggaaagagataagaagcgtgttaactctttcttctaattccatggatatttgtggcgttgattccgaagggaaagagtttaatagcgtacaagagatgtggagagaagaaattggagaaggagacgaaactaaaaaaacccaatggtatagagatggtgtttcttattgggaaggtgttgaagcttctgttgatggagtattaggaggatatgggcatgtgaatgatgctgatattataggaagtgaggtttttcttaagactcttttgcaagaaagattagttaacaatgttggagctaatcagcatttagtagctcttgattgtggatctggtattggaagaatcactaaaaatcttctgattcgatactttaacgaggttgatcttcttgagcctgtagcacaatttttggatgcagctcgtgaaaatttggcatctgcaggctctgaaacgcacaaagctactaactttttctgtgtacctcttcaggagtttactccagctgctgggaggtatgatgtaatatgggttcaatggtgcattgggcatctcacggacaatgactttgtttctttctttaaccgcgcaaagggataccttaaacctggtgggtttttcgtcgtgaaagagaatctcgctaaaaatggatttgttttggataaagaggatcatagcatcaccagatcggatccatacttcaaacagctctttcgccaatgtgggttacatctctatagaacaaaggatcagaaaggtcttccacaagagttatttgctgtaaaaatgtatgcgttaacggttgacacaccacccaaaatccaccgaaccaggtcaaaaactcgaagcaacagaccgcagattatcaaatgacaaagcttccgattggtttactacggagtcttaatcgtttggtgtaaagagagaagctaccaaaggtgttgtaagatctggatcaaggcttggctgcttcattgtcacatggtttggttttgtgcatgctcgattctcctctcctccatcaccttaccaagtcataaactctcgtgtactcatgactaaacctgtttctgctccattctgttttttatctgataatttgtccggacttgaagaaattagaattgtgatccttttactgtagccacatattcctataccatttttgtttaaaatatttaattgtactatatttcgatgttctacaagt

SEQ ID NO: 103539 - protein, 310 aa, Arabidopsis thaliana
  peptide (1)..(310): Ceres Seq. ID no. 13612974
ISPPPSTTTTLASPPYRYQQRKEIRSVLTLSSNSMDICGVDSEGKEFNSVQEMWREEIGEGDETKKTQWYRDGVSYWEGVEASVDGVLGGYGHVNDADIIGSEVFLKTLLQERLVNNVGANQHLVALDCGSGIGRITKNLLIRYFNEVDLLEPVAQFLDAARENLASAGSETHKATNFFCVPLQEFTPAAGRYDVIWVQWCIGHLTDNDFVSFFNRAKGYLKPGGFFVVKENLAKNGFVLDKEDHSITRSDPYFKQLFRQCGLHLYRTKDQKGLPQELFAVKMYALTVDTPPKIHRTRSKTRSNRPQIIK

SEQ ID NO: 103540 - protein, 276 aa, Arabidopsis thaliana
  peptide (1)..(276): Ceres Seq. ID no. 13612975
MDICGVDSEGKEFNSVQEMWREEIGEGDETKKTQWYRDGVSYWEGVEASVDGVLGGYGHVNDADIIGSEVFLKTLLQERLVNNVGANQHLVALDCGSGIGRITKNLLIRYFNEVDLLEPVAQFLDAARENLASAGSETHKATNFFCVPLQEFTPAAGRYDVIWVQWCIGHLTDNDFVSFFNRAKGYLKPGGFFVVKENLAKNGFVLDKEDHSITRSDPYFKQLFRQCGLHLYRTKDQKGLPQELFAVKMYALTVDTPPKIHRTRSKTRSNRPQIIK

SEQ ID NO: 103541 - protein, 258 aa, Arabidopsis thaliana
  peptide (1)..(258): Ceres Seq. ID no. 13612976
MWREEIGEGDETKKTQWYRDGVSYWEGVEASVDGVLGGYGHVNDADIIGSEVFLKTLLQERLVNNVGANQHLVALDCGSGIGRITKNLLIRYFNEVDLLEPVAQFLDAARENLASAGSETHKATNFFCVPLQEFTPAAGRYDVIWVQWCIGHLTDNDFVSFFNRAKGYLKPGGFFVVKENLAKNGFVLDKEDHSITRSDPYFKQLFRQCGLHLYRTKDQKGLPQELFAVKMYALTVDTPPKIHRTRSKTRSNRPQIIK

SEQ ID NO: 103542 - DNA, 1093 bp, Arabidopsis thaliana
  misc_feature (1)..(1093): Ceres Seq. ID no. 13612977
  misc_feature (1)..(1093): Ortholog of  Ceres SEQ ID NO 13597757 as cited in SEQ ID NO 65472
actgccaaaactcttcgcttaattctccggcgtatacaagtcgccggcaaaaatgtcgatgtcgaagagctccaagatgcttcagttcataaactacaggatgcgagtaacaatccaagacggaagacagctaatcggaaaattcatggcgttcgatcgccacatgaatcttgttcttggcgactgcgaagagtttcgaaaacttcctccggcgaaaggtaataagaagacgaacgaagaaagagaagagcgtcgtacgcttggtttggttttacttagaggagaagaagtgatttcgatgactgtcgaaggtccaccgccacctgaagaatctcgcgccaaatctggatctgtaaccgctgtggctggtcccggaatcggtcgtgctgctggacgtggagtacctactggtccattggttcaagctcagcctggtttatctggtcctgttcgtggaattggtggacctgctcctggaatgatgcagcctcagatctctagaccaccacagattattcgtcctccgggacaaatgccaccacagcctccttttgctggtcaaggaggtcctcctccaccttatggtatgagaccaccgtatcctggtccaccaccgcctcagtatggtggacagcaaaggccaatgatgattcctccacctggtggtatgatgagaggacctcctccacctcatggtatgcaaggaccgcctccttctcgccctggaatgcctccccccggtggtgctccgatgtttgctccgcctcatcctggcatgccacctgctccgccaaatcaccataatcagcaacattgattaggagtcacttcatctacaacgaaagcaacatccacatgattgagttacccctcggctagtcgtagcgtttttctccgtgaagctcagagaattgatgagttcatattggtgatttctcgtggaaaaagcaactgattttagaaatagtgaacttgtaggagttacaaccttgctccatgaacttgaatgtattacttgtaaaagaggctctcaatggttttgactggcaattcggttctcaacatatattaggctatgttgctggttatgtac

SEQ ID NO: 103543 - protein, 254 aa, Arabidopsis thaliana; identical to SEQ ID NO: 28547
  peptide (1)..(254): Ceres Seq. ID no. 13612978

SEQ ID NO: 103544 - protein, 252 aa, Arabidopsis thaliana; identical to SEQ ID NO: 28548
  peptide (1)..(252): Ceres Seq. ID no. 13612979

SEQ ID NO: 103545 - protein, 246 aa, Arabidopsis thaliana; identical to SEQ ID NO: 28549
  peptide (1)..(246): Ceres Seq. ID no. 13612980

SEQ ID NO: 103546 - DNA, 1189 bp, Arabidopsis thaliana
  misc_feature (1)..(1189): Ceres Seq. ID no. 13612993
  misc_feature (1)..(1189): Ortholog of  Ceres SEQ ID NO 15174737 as cited in SEQ ID NO 52912
  misc_feature (1)..(1189): Ortholog of  Ceres SEQ ID NO 13624551 as cited in SEQ ID NO 0
atctcatttatcatcatccttcaagaacacaaagctagacagaaaaaaaaaaatgtgttcctcaaaattaaaaaatctgacccaagaaaacatttctcagatcaacggccgtccggttcttcaaccgaagtcgaaccaagttccgacattagaccgacgtaactcactaaaaaaatcgcctcctaagcctttgaatccaattgcatcaaagataccctcaccaagaccaatttctctaatctctcctcctttgtctcccaacacaaaatccttaagaaaaccggccggttcttgcaaggaacttcttaggtctagctctacaaaatcgaaaccagtgatatcaccagagaacagtgatggtggctacaaagaggttatgcctatggtgattgttcaaaagcagcctggaagtatagcagctgccagaagagaagaggttgcaatgaaacaagaagagagaaagaagaaaatttctcattacggtagaatcaaatccgtaaaatcgaatgaaaagaacttaaatgttgagcatgagaagaagaagagatgcagtttcatcactacaagttcagatccaatatatgtcgcttaccatgacaaagaatggggagttccagttcatgatgacaatctactatttgagcttctggtgttaaccggagctcaggtcggatcagattggacttcggttttaaagagaagaaacacttttagagaggctttctctggtttcgaagcagagttggtcgcagacttcaacgagaagaagatacaatcaatagtcaacgactatggcattaaccttagccaagtccttgcagttgttgacaacgctaaacaaattctcaaggtgaaaagagatttggggtcattcaacaaatacatttgggggtttatgaaacacaaaccggtcaccacaaaatacacatcatgccaaaagataccggttaagacatcgaaatcggagactataagcaaagacatggttcgtcgtgggtttagattcgttggtccgacggttatacattcgttaatgcaagccgccggtttaaccaacgaccacttgatcacatgtccgaggcatctcgagtgtacggccatggcggctttataggcaaaaggatcatgttgtaattgttgttgtagtcacattggctttaatttatatgtaaataaataatattttgtg

SEQ ID NO: 103547 - protein, 370 aa, Arabidopsis thaliana; identical to SEQ ID NO: 21278
  peptide (1)..(370): Ceres Seq. ID no. 13612994

SEQ ID NO: 103548 - protein, 353 aa, Arabidopsis thaliana; identical to SEQ ID NO: 21279
  peptide (1)..(353): Ceres Seq. ID no. 13612995

SEQ ID NO: 103549 - protein, 245 aa, Arabidopsis thaliana; identical to SEQ ID NO: 21280
  peptide (1)..(245): Ceres Seq. ID no. 13612996

SEQ ID NO: 103550 - DNA, 746 bp, Arabidopsis thaliana
  misc_feature (1)..(746): Ceres Seq. ID no. 13613001
  misc_feature (1)..(746): Ortholog of  Ceres SEQ ID NO 12624284 as cited in SEQ ID NO 61595
  misc_feature (1)..(746): Ortholog of  Ceres SEQ ID NO 15225557 as cited in SEQ ID NO 0
ctccctcttcttctcctctctttctctactccaagttttcacaatgacattcttcatcgaagacactagtctcatcatcagccacgttctctacaaaacggcacttatcatcaccgttttacgatggatctttgcatggatcctccgttaccgctcaagatcctcctcatcatcatcatctcaatcctcctcttctccttctatttcatcacaaaccatcaaagaaagcctagccgtgtccgctttccgcgacgcggtggagagatctcccgcggcgataaacgacatgtgtgccgtgtgtctaggagatcttgaagacgaggacgaaatcagagagcttaggaactgtactcacgtgtttcatcgtgattgtattgaccgatggctagattatgaatgttgcggcggtgatgatgataaccaccgtacttgtcccctatgtcgaacgccgttgcttccatctttcactgattactcaaccgttactcaaactagttgggctgttgaacgacttctttacctcttcggcgacgatcttcttccctgacttttatttttcttttagaaaacatttgatttcatattttttttatgaatattgtaattggtagaggggtcgaataggaaatataagagtgattgatcgcaattatacgaaatcgaatcaatttgatttgattgtatatacaaatgttaaactgtattaattctcctcttcagataaatgtctaacattttttattatt

SEQ ID NO: 103551 - protein, 181 aa, Arabidopsis thaliana
  peptide (1)..(181): Ceres Seq. ID no. 13613002
SLFFSSLSLLQVFTMTFFIEDTSLIISHVLYKTALIITVLRWIFAWILRYRSRSSSSSSSQSSSSPSISSQTIKESLAVSAFRDAVERSPAAINDMCAVCLGDLEDEDEIRELRNCTHVFHRDCIDRWLDYECCGGDDDNHRTCPLCRTPLLPSFTDYSTVTQTSWAVERLLYLFGDDLLP

SEQ ID NO: 103552 - protein, 167 aa, Arabidopsis thaliana
  peptide (1)..(167): Ceres Seq. ID no. 13613003
MTFFIEDTSLIISHVLYKTALIITVLRWIFAWILRYRSRSSSSSSSQSSSSPSISSQTIKESLAVSAFRDAVERSPAAINDMCAVCLGDLEDEDEIRELRNCTHVFHRDCIDRWLDYECCGGDDDNHRTCPLCRTPLLPSFTDYSTVTQTSWAVERLLYLFGDDLLP

SEQ ID NO: 103553 - DNA, 801 bp, Arabidopsis thaliana
  misc_feature (1)..(801): Ceres Seq. ID no. 13613013
  misc_feature (1)..(801): Ortholog of  Ceres SEQ ID NO 14309614 as cited in SEQ ID NO 52633
  misc_feature (1)..(801): Ortholog of  Ceres SEQ ID NO 15172691 as cited in SEQ ID NO 56148
  misc_feature (1)..(801): Ortholog of  Ceres SEQ ID NO 15226850 as cited in SEQ ID NO 62501
  misc_feature (1)..(801): Ortholog of  Ceres SEQ ID NO 15174297 as cited in SEQ ID NO 0
aaaggagaaggaacattcactctcacgcgcttcaactttctccagaaacaagaaaatatcacagcaaaaattttctcgagaaaatccgaagaagacaaaaaaaatggcggatcagctaaccgatgaccagatctccgagttcaaggaagcttttagcctattcgacaaagacggagatggttgtatcaccacaaaggagcttgggactgtgatgagatcacttgggcagaacccgacagaagccgagctccaggacatgatcaacgaagtggatgcagacgggaacgggacaatagatttcccagagttcctgaacctaatggcacgtaagatgaaagacactgattcagaggaagagcttaaggaagccttcagggtttttgacaaggaccagaacggtttcatctcggcggctgagcttcgtcacgtgatgacaaatcttggggagaagttgacggatgaggaagtcgatgagatgatccgagaggctgacgtcgatggtgatggtcagatcaactatgaagagttcgtcaaagtcatgatggcaaagtgagattcttcttatccctcgaaatcctaagcatgtttttcttttacatctttaaaactgagaaaagtaatttattgaaccaaaagaaacagagagatttgcttccttgtttgttttgttgatcgtgattttttggtaacgttgcttcttctttgccttttggttttgttattgtccgtgacgtttgaactcataatttgctttagtctctcgagtcatgaccacttgatgatgttattttctcttttctc

SEQ ID NO: 103554 - protein, 183 aa, Arabidopsis thaliana
  peptide (1)..(183): Ceres Seq. ID no. 13613014
KEKEHSLSRASTFSRNKKISQQKFSRENPKKTKKMADQLTDDQISEFKEAFSLFDKDGDGCITTKELGTVMRSLGQNPTEAELQDMINEVDADGNGTIDFPEFLNLMARKMKDTDSEEELKEAFRVFDKDQNGFISAAELRHVMTNLGEKLTDEEVDEMIREADVDGDGQINYEEFVKVMMAK

SEQ ID NO: 103555 - protein, 149 aa, Arabidopsis thaliana; identical to SEQ ID NO: 27688
  peptide (1)..(149): Ceres Seq. ID no. 13613015

SEQ ID NO: 103556 - protein, 113 aa, Arabidopsis thaliana; identical to SEQ ID NO: 27689
  peptide (1)..(113): Ceres Seq. ID no. 13613016

SEQ ID NO: 103557 - DNA, 1352 bp, Arabidopsis thaliana
  misc_feature (1)..(1352): Ceres Seq. ID no. 13613017
  misc_feature (1)..(1352): Ortholog of  Ceres SEQ ID NO 13502858 as cited in SEQ ID NO 65109
aagctgaagaaaacccttaattctctttctcttgttccatttcgtcccattttgttctttctactgtcgccgtaaaggatattcaaaagcggtagaggcggcgatggcggatcttttaccacctcttacggcggcacaagtcgatgctaagactaaagtcgatgagaaagtcgattactcgaacctcccttctcctgttccctatgaggaactccaccgtgaagctctcatgtctttaaagtcggacaattttgagggtttacgcttcgactttaccagggcgttgaatcagaagttttctctcagtcatagtgtaatgatggggccaaccgaagttcctgctcagtcacctgaaactactatcaaaattccaacagcccattatgagtttggtgccaattattatgacccaaagttgctgctcatcggaagggtaatgactgatggtagactaaatgcgagactgaaagcagatttaactgataagttagttgtgaaggcgaatgctctgataacaaatgaggaacatatgtcacaagcaatgttcaactttgattacatgggatcagactacagagctcagcttcaacttggacagagtgccctaattggagcaacttatatccagagtgttacaaaccatttatccttgggtggtgaaattttctgggctggtgtgcctcggaagtcgggaataggctatgctgctagatacgagacagataaaatggttgcttctggtcaagttgctagcacgggtgctgttgttatgaactatgttcagaagatttcagataaggtgtcacttgccactgatttcatgtacaactacttttcaagagatgtaacagctagtgtgggttatgactatatgcttagacaggctcgtgtgcggggtaagatcgattcaaacggtgttgcatccgctctccttgaagaaagattgagtatgggactcaattttcttctttctgcagagctggatcataagaagaaggactacaagtttggtttcggattaacagttggttaaaagaccgaataaaaaccggcacacaataagcctggcgcacagagcagattgcagcagtagtggtttcagctgcgaggatttcggttaaaatttattctatttcagtttaggctttttggtgaagttgggaagataaacggtaacgatgttgtgttgttatttgaggtttaggatttgtttccaagaaccattttataaaagaagaagaagcaaatgaggtttttgttttacttccttgctctaagatctcgtgaacttccgagagaggtgtatcatttcatttccttgccataaaaaaaaacgaattctttttttcttc

SEQ ID NO: 103558 - protein, 309 aa, Arabidopsis thaliana; identical to SEQ ID NO: 24718
  peptide (1)..(309): Ceres Seq. ID no. 13613018

SEQ ID NO: 103559 - protein, 267 aa, Arabidopsis thaliana; identical to SEQ ID NO: 24719
  peptide (1)..(267): Ceres Seq. ID no. 13613019

SEQ ID NO: 103560 - protein, 238 aa, Arabidopsis thaliana; identical to SEQ ID NO: 24720
  peptide (1)..(238): Ceres Seq. ID no. 13613020

SEQ ID NO: 103561 - DNA, 1665 bp, Arabidopsis thaliana
  misc_feature (1)..(1665): Ceres Seq. ID no. 13613021
  misc_feature (1)..(1665): Ortholog of  Ceres SEQ ID NO 13502874 as cited in SEQ ID NO 66298
  misc_feature (1)..(1665): Ortholog of  Ceres SEQ ID NO 12614124 as cited in SEQ ID NO 68392
gagcatcactggcagcaatgaccaccactgagtttcaaagctgcttcatcttcctcctcttatgtctcttctcactcgtctgttactctctctttttcaggaaaccaagctcaagacgggacgcccatggctgtgatctgcctccgagccctccttctttgccagtcatcggccatcttcaccttatcctctcttcccttgtccacaagtcttttcaaaagatctcctccaactacggacctctcctccatctccgcatcttcaacgttcccatagtcctcgtctcctctgcgtcagtggcctacgatatcttcagggtgcatgacttgaacgtctcttctcgcggctcccctccgtttgaggagtcactgttgttcggatctaccggcttcattagtgctccctatggagattatttcaagttcatgaagaaacacctggtcacaaagctccttggaccacaggcactcgagcgctcacgcctcatccggacaaatgaactagaacggttttacataaacctgcttgataaggcgacgaagaaggagagcgttgaaattggtaaggaagcgatgaagctcagtaacaacagcatctgcaagatgatcatggggaggagttgtttagaggaaaagggtgaggcagagagagtcaggggtttgattatcgagtcgttttacttgacgaagaaatttttcttggcattcactttgcgcgggctgctcgagaagcttggaatctcgctgttcaaaaaagaaataatgggagtttcccgcagatttgatgatttgctcgaaaggtatcttagggaacatgaagagaaaccagataatgagcatcaagatacggacatgattgatgcactattggcagcttatcgagacgaaaaggccgagtataagatcactaggaaccagatcaaggcgtttttagtggatattttcattgcgggcactgacatctcggcgctaacaacgcagggaacaatggctgagatcattaacaaccctaacatatttgtgagaattagagaagaaatcgattctgttgtagggaaatcaaggctgattcaagaaacggatctaccaaagctcccttacttgcaagcggtagtcaaagaagggcttagattgcacccgcctacgcctctcatggtaagggagttccaagaagggtgtaaggtcaaaggtttctacataccagcgagcacaacccttgttgttaatggttatgctgtgatgagagatccaaatgtctgggaagaccctgaggagttcaagccggagaggtttttagcttcttcaagattaatgcaagaggacgagataagagagcaagccctcaagtacatcgctttcggtagtggaaggagaggctgcccaggagcaaatgtagcttatatctttgtaggaaccgcgattggaatgatggtgcaatgctttgactggagaatcaatggagaaaaggttgacatgaaagaggccattggaggactgaacctgaccttggctcatccccttaagtgcactcctgttgctcgattcccaaaacctttttaagttcaaattattaaaaccgatgttccatgtttgatgttggtgactggactagtgttgtaagatggttgaagtaaaataataaggaagcttgctttctgttgttctg

SEQ ID NO: 103562 - protein, 518 aa, Arabidopsis thaliana
  peptide (1)..(518): Ceres Seq. ID no. 13613022
ASLAAMTTTEFQSCFIFLLLCLFSLVCYSLFFRKPSSRRDAHGCDLPPSPPSLPVIGHLHLILSSLVHKSFQKISSNYGPLLHLRIFNVPIVLVSSASVAYDIFRVHDLNVSSRGSPPFEESLLFGSTGFISAPYGDYFKFMKKHLVTKLLGPQALERSRLIRTNELERFYINLLDKATKKESVEIGKEAMKLSNNSICKMIMGRSCLEEKGEAERVRGLIIESFYLTKKFFLAFTLRGLLEKLGISLFKKEIMGVSRRFDDLLERYLREHEEKPDNEHQDTDMIDALLAAYRDEKAEYKITRNQIKAFLVDIFIAGTDISALTTQGTMAEIINNPNIFVRIREEIDSVVGKSRLIQETDLPKLPYLQAVVKEGLRLHPPTPLMVREFQEGCKVKGFYIPASTTLVVNGYAVMRDPNVWEDPEEFKPERFLASSRLMQEDEIREQALKYIAFGSGRRGCPGANVAYIFVGTAIGMMVQCFDWRINGEKVDMKEAIGGLNLTLAHPLKCTPVARFPKPF

SEQ ID NO: 103563 - protein, 513 aa, Arabidopsis thaliana; identical to SEQ ID NO: 42595
  peptide (1)..(513): Ceres Seq. ID no. 13613023

SEQ ID NO: 103564 - protein, 377 aa, Arabidopsis thaliana; identical to SEQ ID NO: 42596
  peptide (1)..(377): Ceres Seq. ID no. 13613024

SEQ ID NO: 103565 - DNA, 2000 bp, Arabidopsis thaliana
  misc_feature (1)..(2000): Ceres Seq. ID no. 13613031
  misc_feature (1)..(2000): Ortholog of  Ceres SEQ ID NO 15177289 as cited in SEQ ID NO 59364
atcttcttcctcatctttcttctctcttcaacattttcttctcttcttcacacaaacacacacagatctcttcttcatcacattacttctggctttacatcttttttcttctccatgaggaaagggagaggctcttccgtcgttggacccgcccttccagtaaccgccggtggatctgtgaaggagccgaggtatagaggcgttaggaagagaccttggggtcgattcgcagctgagatccgtgatccattaaaaaaatctcgtgtctggctcggtactttcgattccgccgtagatgctgcacgcgcttacgataccgccgcacgtaacctccgtggtccaaaggccaagaccaatttcccgatcgattgttctccttcttctcctctccaacctctcacctacctccacaatcaaaacctctgttctcctccggtgattcagaaccagatcgatccgtttatggaccatcggttatacggcggaggtaatttccaggagcagcagcagcagcagattattagtcggccggcgagtagcagcatgagcagcaccgttaaatcttgtagcggaccgagaccgatggaagccgcggcggcgtcttcgtcggtggcgaaaccgttacatgcgattaagagatatccgagaactccaccggtagctccggaggattgtcatagcgactgcgattcttcgtcgtctgttattgacgacggagatgatatcgcatcttcgtcttcccgccggaaaacgccgtttcagtttgatcttaatttcccgccgttggatggcgttgacttattcgctggcgggatagatgatctccactgtaccgatctacgtctctgatttgctgctttacaaaaaaaatccgttgattacacacaaaaaaaattctcaaattttacaaaatgataactttatgctcttttgtttttccattttcctttgatatcatattgaaagagaaaaaaaggaagaacaaaaaaaaaagattgagcgtgatgattttatcatcaacgaagatgatgacgattaaaaagagagagagattgtgttaagatctgttactgtaagaaccagatctgggtttcatttttatctgtttcttcttataaaagatccaacaaccctttgttacatatatataacattctgaagctggtgatgatttctgaatgattcaaatccattatctttagatttctacttattcatagagtgtcccctgatgtaagtaggaagctgcatttacatagtatgtaacagaaccacacagggcacaagtatttgtttgtgttttgtctcttggcttgatcttgatcaattcagggtttcttctattcaacaagtaaagcttagtggttctctgagatggaagcaataaaaagatgaaaggaagaaagacggtgaagctcctttgctatctaattgggtgattcgaagaggaagttagaatactcattgtcattgttaagcctcaagttttcattcatcagcgaggagacaagaaaggctttcccttttgtgtacccaatgaatattttggatggtgaagaacatagagattaagggcatggtcaatgggcggtgagtggttttgttgtgatcgataaagctcaatgagcacaggccaaatctttaggttaaagtttggtggctgagatgattgttttgatctttaagagctgtgggttgaggtggcagaattcgttgtgtgtttgacctttttgatttgaatttgctggtagagagttttcccaattttggtatctactttgcttctatgccacggattcagacagtgaatctttgtgtctgaagcaaaaaccgagtatttttttaccgttttggggtaggcttcttcttaacttaaagtggaagtcaaaagcaatgtcttgttattttcactgtaacgatttaagacaactgatctcaagtcgcttttcctgtttcggttcgtactcttaataatcttctattattctggagttgagatt

SEQ ID NO: 103566 - protein, 282 aa, Arabidopsis thaliana; identical to SEQ ID NO: 41915
  peptide (1)..(282): Ceres Seq. ID no. 13613032

SEQ ID NO: 103567 - protein, 244 aa, Arabidopsis thaliana; identical to SEQ ID NO: 41916
  peptide (1)..(244): Ceres Seq. ID no. 13613033

SEQ ID NO: 103568 - DNA, 1666 bp, Arabidopsis thaliana
  misc_feature (1)..(1666): Ceres Seq. ID no. 13613034
  misc_feature (1)..(1666): Ortholog of  Ceres SEQ ID NO 13504015 as cited in SEQ ID NO 51020
  misc_feature (1)..(1666): Ortholog of  Ceres SEQ ID NO 13597643 as cited in SEQ ID NO 65208
agtttcctttccttagtaaaaccctacatttctccgcccgcctttgatttctccccggccgttcccgccgccggtctccgatttaaccaggattgagtctaattccttctttttgtgctcattgctgtcggattctctaccggcgttacatcgaccagccagactcttccccatttgactgctttactgattcaatcgctcttttagattctggaagttgtgactcagtatctccccttcaacgaattagcatcctgcgcaagaatgtctattgcatcatcacttacttcagccacactttgcggcgcctcagtttttcctaaagcattagcctgcagctctgagttccctatcaatcttcccagcccttttgaaagttcaaagatttgtttgacttcgtttcctgcctctagggatctcaagaaaaatgctactttgaatctgactcgaaatgttggtccagtcaggtgtcatgctatgcaagctgggacgagggagttgaagaaatttgaacttagtgatgtgattgaagggaaacagtttgatagagagatgctaagcgctatattcgatgttgcacgcgaaatggaaaagatagaaaagagctcttcacaaagtgaaatcctcaagggttatttaatggctaccctcttttatgagccttctacccgtaccaggctttcatttgaatctgctatgaaacgccttggaggtgaagtcttaactactgagaacgctagagagttttcgtctgccgcgaaaggggaaacacttgaagacacaataagaacagtggagggttattcagatataattgtgatgcgacattttgaaagcggtgctgcaagaaaagctgcagctactgccaatatacctgtcattaatgcaggtgatggtcctggagagcatcctactcaggctctattggacgtctataccatccaaagtgaaattggaaaattagatggcatcagtgtagccttagttggagaccttgccaacggaaggactgtgcggtctcttgcatacttgcttgccaagttcaaagacgtgaagatctactttgtttcccctgaaattgtgaaaatgaaggatgatataaaagactatttgacatcaagcggggttgaatgggaagaaagttcagatttaatggaagtagcatccaagtgtgatgtagtttatcaaacacgaatccaaagagagaggtttggagaaaggctggacctttacgaagcagctcgtgggaagtatatcgtagacaaggatctgttaggagtgatgcagaaaaaagctattatcatgcatcctttaccgagattggatgaaatcaccgcagatgttgatgctgatccaagagctgcctacttcagacaagcaaagaacggtttgttcattagaatggctcttctaaagctactgcttgtcggttggtgattggatagttcatggtcgttaagttaaatcctttaatggactgattctcaagcctaccatgagctcaaggaatctgcaataataaaatccgaagctttagtgatttttgagtgttaagcacaaaagctgtgatcttgatgttaattaaaagaaggatctgttggtttgttggttaaaagactgatatgaggaagagttgttgaacttaatgaataaattgatttgagct

SEQ ID NO: 103569 - protein, 390 aa, Arabidopsis thaliana
  peptide (1)..(390): Ceres Seq. ID no. 13613035
MSIASSLTSATLCGASVFPKALACSSEFPINLPSPFESSKICLTSFPASRDLKKNATLNLTRNVGPVRCHAMQAGTRELKKFELSDVIEGKQFDREMLSAIFDVAREMEKIEKSSSQSEILKGYLMATLFYEPSTRTRLSFESAMKRLGGEVLTTENAREFSSAAKGETLEDTIRTVEGYSDIIVMRHFESGAARKAAATANIPVINAGDGPGEHPTQALLDVYTIQSEIGKLDGISVALVGDLANGRTVRSLAYLLAKFKDVKIYFVSPEIVKMKDDIKDYLTSSGVEWEESSDLMEVASKCDVVYQTRIQRERFGERLDLYEAARGKYIVDKDLLGVMQKKAIIMHPLPRLDEITADVDADPRAAYFRQAKNGLFIRMALLKLLLVGW

SEQ ID NO: 103570 - protein, 319 aa, Arabidopsis thaliana
  peptide (1)..(319): Ceres Seq. ID no. 13613036
MQAGTRELKKFELSDVIEGKQFDREMLSAIFDVAREMEKIEKSSSQSEILKGYLMATLFYEPSTRTRLSFESAMKRLGGEVLTTENAREFSSAAKGETLEDTIRTVEGYSDIIVMRHFESGAARKAAATANIPVINAGDGPGEHPTQALLDVYTIQSEIGKLDGISVALVGDLANGRTVRSLAYLLAKFKDVKIYFVSPEIVKMKDDIKDYLTSSGVEWEESSDLMEVASKCDVVYQTRIQRERFGERLDLYEAARGKYIVDKDLLGVMQKKAIIMHPLPRLDEITADVDADPRAAYFRQAKNGLFIRMALLKLLLVGW

SEQ ID NO: 103571 - protein, 294 aa, Arabidopsis thaliana
  peptide (1)..(294): Ceres Seq. ID no. 13613037
MLSAIFDVAREMEKIEKSSSQSEILKGYLMATLFYEPSTRTRLSFESAMKRLGGEVLTTENAREFSSAAKGETLEDTIRTVEGYSDIIVMRHFESGAARKAAATANIPVINAGDGPGEHPTQALLDVYTIQSEIGKLDGISVALVGDLANGRTVRSLAYLLAKFKDVKIYFVSPEIVKMKDDIKDYLTSSGVEWEESSDLMEVASKCDVVYQTRIQRERFGERLDLYEAARGKYIVDKDLLGVMQKKAIIMHPLPRLDEITADVDADPRAAYFRQAKNGLFIRMALLKLLLVGW

SEQ ID NO: 103572 - DNA, 812 bp, Arabidopsis thaliana
  misc_feature (1)..(812): Ceres Seq. ID no. 13613069
  misc_feature (1)..(812): Ortholog of  Ceres SEQ ID NO 12583465 as cited in SEQ ID NO 56513
  misc_feature (1)..(812): Ortholog of  Ceres SEQ ID NO 14309546 as cited in SEQ ID NO 0
ataatgtgagaaaagagcaaaacacaaaaatgaaaaaaccttcttctcttgtaactcgcacaaccttatcgagtgaaagaagattgggtcagtagtgaaaaatggcgtcgattgcagcttcttctacctttcactcgttttgcagaaccaaaagccctaatctttcttcgacccaccttcttcctttgtcgaaaaacctcaactttcggaccagagctatcggaaatagccgcaattgcagttttgctgggtttataaaacaaaatcgccttggattgaggaagctttcgtctattggagaaggaggagaaggtgtcgctgtcgcagaggagcaaccgcaagagactgtctctgttcctgtctctccttcagacatgctcaccatgtttttccaggctgatggaactttgaacgaagcagctattcctaatgtgacaagggccttacaggatattgatggagtttccaatttaaaggttcaggtttctgaaggtgttgccgtcgttgagcttttgaagcaaacaacggttcaagcaacaggagtggcgtcaaacttggtggagactatacaaggagctggatttaagttacagactttgaatctgagttttgaagatgacgatgaggttcttgtctagtgaaatcatccttttcctccattttgtgattaaagaaactcataatgttcaattctagggataatttctttcatttgttcctctaaagaaaacaaatgtggtaactttttttagaaagtgggaattaatgttttctttgttgaaataaaagagaaatggaaaatatctatattg

SEQ ID NO: 103573 - protein, 178 aa, Arabidopsis thaliana; identical to SEQ ID NO: 34914
  peptide (1)..(178): Ceres Seq. ID no. 13613070

SEQ ID NO: 103574 - DNA, 1441 bp, Arabidopsis thaliana
  misc_feature (1)..(1441): Ceres Seq. ID no. 13613078
  misc_feature (1)..(1441): Ortholog of  Ceres SEQ ID NO 13645078 as cited in SEQ ID NO 51158
tctctcttgcagtcctcatcgttggagcttagaagccgtcggcacaagaagaagaagaagaagaatgtctcacaggaagtttgagcacccaagacatggttctcttggtttccttccaaggaagagagctaaccgtcacagaggaaaggtgaaggcgttccctaaggatgaccaaaccaagccttgcaagttcacagctttcatgggttacaaagctggtatgactcacattgtcagagaagtggagaaacctggatccaagcttcacaagaaggagacatgtgaggctgttaccatcattgagacacctgctatggtggttgttggagttgttgcctatgtgaagactcctagaggtttgaggtctttgaacactgtctgggcacagcatttgagtgaggaggtcaggagaaggttctacaagaactgggctaagtctaagaagaaggctttcactgggtacgctaagcagtatgacagtgaggatggcaagaagggtattcaggctcagcttgagaagatgaagaagtacgctactgtcatccgtgttttggctcacactcagatcaggaagatgaagggattgaagcagaagaaggctcacatgatggagatccagatcaatggtggtaccattgcccagaaggttgactttgcctacagtttctttgagaagcagatcccaattgaagctgtcttccagaaggatgaaatgattgatatcattggtgtgaccaagggtaagggttatgaaggtgttgttactcgttggggtgttacccgtcttcctcgtaagactcacagaggtctgcgtaaggttgcttgtattggtgcgtggcatcctgctagagtgtcctacactgttgctagggctggtcagaacggttaccatcaccgtactgagcttaacaagaagatttacaggttgggtaaggttggtactgaggcacacacagccatgactgaatatgacaggactgagaaggatgtgactccaatgggaggcttcccacactacggtattgtgaaggatgactacttgatgattaaggggtgctgtgttggtcccaagaagagagttgtaactctcagacagtcacttctcactcagacttcccgtcttgccttggaggagatcaaactcaagtttattgacaccgcctccatttttggacatggtcgcttccagacctcccttgagaagatgaggttttacaaccgtgtcacgaagtaagagttgttttatcacaattcttcttagaaagtttcatgtttggttatctgttgctacttatctcagagatgttatcctttaaacaatgttatggagttttcttttgcttttagtttgttacttttttggaagttaaaacgatttgcttctcaagttttgagactttgatgtgttctttatcatttatgaaaaaccaacctggagcat

SEQ ID NO: 103575 - protein, 410 aa, Arabidopsis thaliana; identical to SEQ ID NO: 29578
  peptide (1)..(410): Ceres Seq. ID no. 13613079

SEQ ID NO: 103576 - protein, 389 aa, Arabidopsis thaliana; identical to SEQ ID NO: 29579
  peptide (1)..(389): Ceres Seq. ID no. 13613080

SEQ ID NO: 103577 - protein, 343 aa, Arabidopsis thaliana; identical to SEQ ID NO: 29580
  peptide (1)..(343): Ceres Seq. ID no. 13613081

SEQ ID NO: 103578 - DNA, 672 bp, Arabidopsis thaliana
  misc_feature (1)..(672): Ceres Seq. ID no. 13613082
  misc_feature (1)..(672): Ortholog of  Ceres SEQ ID NO 15179062 as cited in SEQ ID NO 0
gtcacatttctttaacttaaaaactctcccgtttcgccgaagcttcttcaatggcgatttctctcgccaccgcctatatctctccatgttttacaccggaatcgtctaattccgcttcaccatcacgaactctttcctccgtacgattaccttctcagattcgccgattcggaagtgttcaatcgccgtcttcgtctactcgcttcgctccactcactgtaagagcagcaaagaagcaaactttcaactcttttgatgatttgttgcagaactctgataaacctgtacttgtagacttctatgctacttggtgtggtccatgtcagcttatggtacctatactcaatgaagtgagtgaaacactgaaagatataattgcagttgtgaaaattgatactgagaagtacccaagtcttgctaacaaataccagattgaggctttgcccacattcatcttattcaaagacggcaaactctgggaccgtttcgagggtgccttgccagcgaaccaactcgttgagcgtattgagaattctttgcaagtgaaacagtaggtttgagaaaccaagaaaacttgtcatctatgaacaatctgttgtgacataagccattgttgattgtttgctcggtataatcatctacctattcatatatggcatctgccatttttct

SEQ ID NO: 103579 - protein, 167 aa, Arabidopsis thaliana
  peptide (1)..(167): Ceres Seq. ID no. 13613083
MAISLATAYISPCFTPESSNSASPSRTLSSVRLPSQIRRFGSVQSPSSSTRFAPLTVRAAKKQTFNSFDDLLQNSDKPVLVDFYATWCGPCQLMVPILNEVSETLKDIIAVVKIDTEKYPSLANKYQIEALPTFILFKDGKLWDRFEGALPANQLVERIENSLQVKQ

SEQ ID NO: 103580 - DNA, 839 bp, Arabidopsis thaliana
  misc_feature (1)..(839): Ceres Seq. ID no. 13613106
  misc_feature (1)..(839): Ortholog of  Ceres SEQ ID NO 12557850 as cited in SEQ ID NO 65
  misc_feature (1)..(839): Ortholog of  Ceres SEQ ID NO 14312702 as cited in SEQ ID NO 0
tttagggtttttttcagcggagattagcttcagtatccattggcggattagcctcagagtgctctgatcaaggttttggaggttgcatttgagtgaggagatgttttcggctcagcataagattcataaggagaagggtgtggaactttctgaattggatgagcaagttgctcaggctttctttgatttggagaacaccaatcaagaattgaaaagtgagctgaaggatttatacgtcaactcggctgttcaagttgatatctctggaggacgcaaggcaattgttgtcaatgttccttacagactgagaaaagcttaccggaaaatccatgttaggcttgttcgtgaacttgagaagaagttcagtggaaaggatgtgatcctcattgctacaaggaggattgtgaggccgccaaagaagggttcagcggcaaagagaccacgcaaccgtactctgacctcagtccatgaagctattcttgatgatgtggtcttacctgcagagattgttgggaagcgcacaaggtacagactcgacggtaccaaaatcatgaaggtcttcttggacccaaaggaaaggaacaacacagagtacaaggttgaggctttctctgcggtttacaagaagctcactggcaaagatgtcgtctttgagtttcccatcactgaagcctaagagatgaaatgagacgtagagaatctgttatgatctcagatattttaatcttctttttcgtctactttctttaatgtggcaagacattggttttacttctgaaaatctgtacaatggtcgagttttctcaaaagttttgagaaactttttgatgttggtgttt

SEQ ID NO: 103581 - protein, 191 aa, Arabidopsis thaliana; identical to SEQ ID NO: 21129
  peptide (1)..(191): Ceres Seq. ID no. 13613107

SEQ ID NO: 103582 - DNA, 1601 bp, Arabidopsis thaliana
  misc_feature (1)..(1601): Ceres Seq. ID no. 13613108
  misc_feature (1)..(1601): Ortholog of  Ceres SEQ ID NO 14315110 as cited in SEQ ID NO 55462
  misc_feature (1)..(1601): Ortholog of  Ceres SEQ ID NO 13596853 as cited in SEQ ID NO 62978
tttgcaattaggcataatatatgtcctaactcaccaaccccctcaaaattgccaccaacttcaaatttctctcctttaaacctttctcaatcatctttcttctgccttggaatcctgatcatggcgtcgtcttctctcacttcgaaatccattctcggatccaccaaactcggttcttcttctcttccctcggagctccgtcgtctctcttctcccgccgttcagatctctctccgtacccaaaccaggaagaacttccagatacaagctactggaagttcatatgggactcattttcgagtttcaacttttggagaatcacatggaggaggagttggttgtatcattgatggttgtcctcctcgtattccacttactgaatctgatttgcaattcgatctcgatagaaggaggcctggtcagagcaggatcacaactcctagaaaagagactgatacttgccggatatcgtctggagtctctgaaggaatgacgacaggaacacctatccatgtgtttgtaccaaacacagatcagagaggacttgattacagtgaaatgtcggttgcctatagaccatcgcatgctgatgcaacttatgacatgaagtatggtgtcagatcagtgcagggtggaggaagatcttcagctagagagaccattggaagagttgctcctggagctttggccaagaaaattttgaagcaatttgcaggaactgagattcttgcctatgtctcgcaagttcaccatgttgtacttccagaagaattggtagaccacgagaatttaacactcgaacagatagaaaataacattgtcagatgccctaatcccgagtatgcggaaaagatgatagctgcgattgatgctgtcaggacaaaagggaactctgttggtggtgttgtgacctgcattgttcggaatgctccacgtgggcttggtacaccggttttcgataaacttgaagcagaactggcaaaagcttgtatgtcgctacctgcaactaagggatttgagtttggaagcggctttgcaggtacctttttgactggtcttgaacacaatgatgagttctataccgatgaaaatggaagaatacgtaccagaaccaaccgatctggtggaattcagggagggatctcaaatggtgaaataataaacatgagagtagccttcaagccaacatcaacaattggaaggaagcaaaatacggtaaccagagacaaggtagaaaccgaaatgattgcgcgtggtcgtcatgatccttgtgttgttccacgagctgtgccaatggtggaagcaatggtggctctagttcttgtggatcaattgatggcgcaatacgcacaatgccatttgtttccaataaatccagagttgcaggaacctctccagatagagcagccgcaaaatgctactgctttgtaagcaaatctcgagaagataaagagtcatagagagtgagagttcgcttttgttgtgtgattattatgctgaataaaaaaatgttaattttgtgcccaccagaaaaacaaagaacatgattttttataagaggatttgcttctatatcattcagctaaatgtgattttaccac

SEQ ID NO: 103583 - protein, 476 aa, Arabidopsis thaliana
  peptide (1)..(476): Ceres Seq. ID no. 13613109
FAIRHNICPNSPTPSKLPPTSNFSPLNLSQSSFFCLGILIMASSSLTSKSILGSTKLGSSSLPSELRRLSSPAVQISLRTQTRKNFQIQATGSSYGTHFRVSTFGESHGGGVGCIIDGCPPRIPLTESDLQFDLDRRRPGQSRITTPRKETDTCRISSGVSEGMTTGTPIHVFVPNTDQRGLDYSEMSVAYRPSHADATYDMKYGVRSVQGGGRSSARETIGRVAPGALAKKILKQFAGTEILAYVSQVHHVVLPEELVDHENLTLEQIENNIVRCPNPEYAEKMIAAIDAVRTKGNSVGGVVTCIVRNAPRGLGTPVFDKLEAELAKACMSLPATKGFEFGSGFAGTFLTGLEHNDEFYTDENGRIRTRTNRSGGIQGGISNGEIINMRVAFKPTSTIGRKQNTVTRDKVETEMIARGRHDPCVVPRAVPMVEAMVALVLVDQLMAQYAQCHLFPINPELQEPLQIEQPQNATAL

SEQ ID NO: 103584 - protein, 436 aa, Arabidopsis thaliana; identical to SEQ ID NO: 42486
  peptide (1)..(436): Ceres Seq. ID no. 13613110

SEQ ID NO: 103585 - protein, 313 aa, Arabidopsis thaliana; identical to SEQ ID NO: 42487
  peptide (1)..(313): Ceres Seq. ID no. 13613111

SEQ ID NO: 103586 - DNA, 1883 bp, Arabidopsis thaliana
  misc_feature (1)..(1883): Ceres Seq. ID no. 13613112
  misc_feature (1)..(1883): Ortholog of  Ceres SEQ ID NO 15172472 as cited in SEQ ID NO 55361
cacacattcttgcagaaggttttagaatcacaaagcataactcacctacccctaaaccaactccaatttctctcctcctctattaaatctttctcaatcatctttctttgagtcttttgccttggaatcctgatcatggcgtcttctctcacttccaaatccattctcggatgcaccaaacccgcttcttcttcttttcttccgtcggagctccgtcgtctctcttctcccgccgttcagatatctctccattcacaaaccaggaagaacttccggcagtcgtggggattgaagaagagtgatctgatgctaaatggttctgagattcgtcctgtgaaggttagggcttctgtttccacggcggagaaagcttcggagattgtgcttcaacccattagagaaatctcgggtctcattaagcttcctggctccaagtctctctctaatcgaattctgcttctcgctgctctatctgagggaactactgtagtggacaacttgttgaacagtgatgacatcaattacatgcttgatgcgttgaagatattgggacttaatgtggaaactcacagtgaaaacaatcgtgctgtagttgaaggatgtggcggggtatttccagcttccattgattccaagagtgatatcgaactttacctcggcaatgcaggaacagcaatgcgtccacttaccgccgcagttactgctgcaggtggcaacgcaagttatgtccttgatggggtgcctcggatgagagagagacctataggggatttggttgttggtcttaagcagcttggtgctgatgttgaatgtactcttggcactaactgccctcctgttcgtgtcaacgctaatggtggccttcctggtggaaaggtgaagctttctggatctattagtagtcagtacttgaccgctctgctcatggcagctcccttagctcttggagacgtcgaaattgaaattgtcgataaattgatttctgttccgtatgttgaaatgacattgaagttgatggaacgttttggggtaagtgctgagcatagtgaaagctgggatcgtttctttgttaagggtgggcaaaaatacaagtcgccgggtaatgcttacgtagaaggtgatgcttctagtgctagttatttcctggctggtgctgccattaccggtgaaactgtcactgttgaaggttgtggaacgaccagtttgcagggagatgtgaaatttgccgaggttcttgagaaaatgggatgtaaagtgtcctggacagagaacagtgtgactgtgacagggccgtctagagatgcttttggaatgagacacttgcgggctattgatgtcaacatgaacaaaatgcctgatgtagcaatgactcttgccgtcgttgctctctttgccgatggtccaaccaccattagagatgtggctagctggagagtaaaggagacggaaaggatgattgccatttgcacagagcttagaaaactgggagctacagtggaagaaggttcagattattgtgtgattactccgccgaaaaaggtgaaaccggcagagattgatacatatgatgatcatagaatggcaatggcattctctcttgcagcttgtgctgatgttccaatcaccatcaatgaccccggttgcaccaggaaaaccttccccgactacttccaagtccttgaaagaatcacaaagcattaaacaaaaaaactctaaaatctccactgttttttcttctgatccaagcttatctgtttccatttttcttgtctctgtaacattattagaaagcaagagtagtgtttgtttgtgtgtacctgaactgagtgagatttgagatgcaatcattgaatcggctttggtatatcattttactctgtttt

SEQ ID NO: 103587 - protein, 521 aa, Arabidopsis thaliana; identical to SEQ ID NO: 37317
  peptide (1)..(521): Ceres Seq. ID no. 13613113

SEQ ID NO: 103588 - protein, 464 aa, Arabidopsis thaliana; identical to SEQ ID NO: 37318
  peptide (1)..(464): Ceres Seq. ID no. 13613114

SEQ ID NO: 103589 - protein, 391 aa, Arabidopsis thaliana; identical to SEQ ID NO: 37319
  peptide (1)..(391): Ceres Seq. ID no. 13613115

SEQ ID NO: 103590 - DNA, 1141 bp, Arabidopsis thaliana
  misc_feature (1)..(1141): Ceres Seq. ID no. 13613124
  misc_feature (1)..(1141): Ortholog of  Ceres SEQ ID NO 14314343 as cited in SEQ ID NO 57301
aacaccacaattaacagatttattgtttttggaaataatcaaaacttaaaaactatcagaatgggaacgttcttaggacactttgtgcctggtctctcacttgctcttcttggtctttggcatctcttcaacaccataagatcttactgtcttaaaggccctgaagctttctctgcaaaattctggttccctttccctaaactcaaacatcttgagcttatcttgattctcttcttctccttcctctccatcactctcctcaccctagatttccctaatttcaacttctcctctctcaaaccagacaacctagaacatgcttccatgttcctccacctcattatctttgcgtgtttcgctctcttctgcgagctaaccctttgctcagatctcttctccggtctaatcggagttctttctgcctctgtcttcgctcaagaactcttccttcttcattttcattccactgatcattcaggtcttgaaggtcactaccatttccttctccaactcattgctttcgtctccttctcctcggcgctagcttctgcttcgttccctaaatccttctctgcggctctattcctcccgatatcggttatgtttcaaggatgctggttcttgaacatggggttcatgctttggatcccagagtatgttcctagaggttgcgtgagtaacatgtcaacatctacagacaataatagaaggagtgtttatcatagtggtgcggtggcttgtgagtcccctggtgctgagattagggcaaaagcattggcgaatctgcagtttagttggatgttgtctgctatacttatcattacatgtgccttgtgcctcaagtattccggtaaagttgtgttgcctaagattaggtcatcgttggagtacgagcgtctttgccggcaaggaagtgatcgttctgcaaccgtaacggtggaagcaccggccagttccgatcaacaatagattttccttactttaatttatcatctgaatatgatgtaatatgtacatatagtacactaataagtagccctaataatagttacataatttataagagggggcagagtgtaacgcactaatgatagtggaccctttcgcatgctttgtgaactaataaaaatttgcatatagc

SEQ ID NO: 103591 - protein, 322 aa, Arabidopsis thaliana
  peptide (1)..(322): Ceres Seq. ID no. 13613125
NTTINRFIVFGNNQNLKTIRMGTFLGHFVPGLSLALLGLWHLFNTIRSYCLKGPEAFSAKFWFPFPKLKHLELILILFFSFLSITLLTLDFPNFNFSSLKPDNLEHASMFLHLIIFACFALFCELTLCSDLFSGLIGVLSASVFAQELFLLHFHSTDHSGLEGHYHFLLQLIAFVSFSSALASASFPKSFSAALFLPISVMFQGCWFLNMGFMLWIPEYVPRGCVSNMSTSTDNNRRSVYHSGAVACESPGAEIRAKALANLQFSWMLSAILIITCALCLKYSGKVVLPKIRSSLEYERLCRQGSDRSATVTVEAPASSDQQ

SEQ ID NO: 103592 - protein, 302 aa, Arabidopsis thaliana
  peptide (1)..(302): Ceres Seq. ID no. 13613126
MGTFLGHFVPGLSLALLGLWHLFNTIRSYCLKGPEAFSAKFWFPFPKLKHLELILILFFSFLSITLLTLDFPNFNFSSLKPDNLEHASMFLHLIIFACFALFCELTLCSDLFSGLIGVLSASVFAQELFLLHFHSTDHSGLEGHYHFLLQLIAFVSFSSALASASFPKSFSAALFLPISVMFQGCWFLNMGFMLWIPEYVPRGCVSNMSTSTDNNRRSVYHSGAVACESPGAEIRAKALANLQFSWMLSAILIITCALCLKYSGKVVLPKIRSSLEYERLCRQGSDRSATVTVEAPASSDQQ

SEQ ID NO: 103593 - protein, 214 aa, Arabidopsis thaliana
  peptide (1)..(214): Ceres Seq. ID no. 13613127
MFLHLIIFACFALFCELTLCSDLFSGLIGVLSASVFAQELFLLHFHSTDHSGLEGHYHFLLQLIAFVSFSSALASASFPKSFSAALFLPISVMFQGCWFLNMGFMLWIPEYVPRGCVSNMSTSTDNNRRSVYHSGAVACESPGAEIRAKALANLQFSWMLSAILIITCALCLKYSGKVVLPKIRSSLEYERLCRQGSDRSATVTVEAPASSDQQ

SEQ ID NO: 103594 - DNA, 1322 bp, Arabidopsis thaliana
  misc_feature (1)..(1322): Ceres Seq. ID no. 13613128
  misc_feature (1)..(1322): Ortholog of  Ceres SEQ ID NO 13596474 as cited in SEQ ID NO 62169
  misc_feature (1)..(1322): Ortholog of  Ceres SEQ ID NO 13598714 as cited in SEQ ID NO 62656
  misc_feature (1)..(1322): Ortholog of  Ceres SEQ ID NO 13597519 as cited in SEQ ID NO 64759
  misc_feature (1)..(1322): Ortholog of  Ceres SEQ ID NO 13597870 as cited in SEQ ID NO 64982
  misc_feature (1)..(1322): Ortholog of  Ceres SEQ ID NO 13587054 as cited in SEQ ID NO 0
atcaatctacgatcatatatctttcatttcatcatcatggaccacaaaatgtcaatgtatttgtttgtgtcttacctagcaatctttactcttttcttcaaaggctttgtctcctcgtttccttcgggatataacaatggttacaacaatggtcacggacatggactaactagcaatctcaactatcgattctatgaccggtcttgtccgcgtcttcaaacgattgttaagtccggagtttggagagcttttaaagatgattctcgaatcgctgcatctcttcttcgactccatttccacgattgttttgtcaatggatgtgatggatctatacttctgaacgattcagaggatttcaaaggagagaagaacgctcagccaaaccgaaactcagtccgtggattcgaagtcattgaagacattaaatctgatatcgaaagttcttgtcccttaacagtttcatgcgctgacatagttgctctcgcggctagagaagctgtcgtcctcactggaggaccgttttggcccgtgcctttgggacgaagggactcattaacggcgagtgagcaagcggcgaatacaaatctgccatctccgtttgaggcgttggagaatataacagccaagttcgtgacccttggactcgacctcaaggacgttgttgtcctctcaggagcacatactataggatttgctcaatgtttcgtgatcaagcatagactcttcaacttcaagggctcaggccagcctgacccaaacctagccgcttcctcagcacttctctctaagctaaaggacacgtgtcctaacgtggactcctcagactctaagctcgctgctcttgacgcagctagctcagtcaagtttgacaatgcttactacgtgaacttaatgaacaacataggactgttggattctgatcaaaccctaatgacagatcctacggctgccgccttggtgaagtcgtacagcgagaatccgtacttgttctcgagggatttcgcagtttcaatggttaaaatggggaatatcggagttatgaccggaagtgatggagtaattcgaggaaaatgtggatttccaggttaagttatatatagactcttcacaaaatccaaatcagtctattatatatctagagctaatctagctttaatgaggaatcaaataaaccaaagtctatgaataaaatatgttttatatatatggtgtaaaagcgtccttatgtatcaatatatatatatatggatcccataaacaaaaatacttggacttgtatgtgtgttacgtttgtgtgtaatggaaaatgtatttgtctttgt

SEQ ID NO: 103595 - protein, 362 aa, Arabidopsis thaliana
  peptide (1)..(362): Ceres Seq. ID no. 13613129
INLRSYIFHFIIMDHKMSMYLFVSYLAIFTLFFKGFVSSFPSGYNNGYNNGHGHGLTSNLNYRFYDRSCPRLQTIVKSGVWRAFKDDSRIAASLLRLHFHDCFVNGCDGSILLNDSEDFKGEKNAQPNRNSVRGFEVIEDIKSDIESSCPLTVSCADIVALAAREAVVLTGGPFWPVPLGRRDSLTASEQAANTNLPSPFEALENITAKFVTLGLDLKDVVVLSGAHTIGFAQCFVIKHRLFNFKGSGQPDPNLAASSALLSKLKDTCPNVDSSDSKLAALDAASSVKFDNAYYVNLMNNIGLLDSDQTLMTDPTAAALVKSYSENPYLFSRDFAVSMVKMGNIGVMTGSDGVIRGKCGFPG

SEQ ID NO: 103596 - protein, 350 aa, Arabidopsis thaliana; identical to SEQ ID NO: 30852
  peptide (1)..(350): Ceres Seq. ID no. 13613130

SEQ ID NO: 103597 - protein, 346 aa, Arabidopsis thaliana; identical to SEQ ID NO: 30853
  peptide (1)..(346): Ceres Seq. ID no. 13613131

SEQ ID NO: 103598 - DNA, 1510 bp, Arabidopsis thaliana
  misc_feature (1)..(1510): Ceres Seq. ID no. 13613136
  misc_feature (1)..(1510): Ortholog of  Ceres SEQ ID NO 14304502 as cited in SEQ ID NO 53212
  misc_feature (1)..(1510): Ortholog of  Ceres SEQ ID NO 15179323 as cited in SEQ ID NO 0
actttattttatttgtttcttagaatctttttcacgcaaatgcaaaccaccaacaaatctatattctagcatgatgatgaagtagctacttgcttcttcttcttcttcttcttaaattttggggtttttactttttggtgaagacagccatgtttcaaagattattactcttccttctcattgctcttctgctccaatcttctttccttttagagatttcctctgctctcaaggaaggaaaaacatgtataacaaacagcaactgtgacgctggattacactgcgaaacatgtatagccaacactgattttagacctagatgctccagaacccaacccatcaaccccatcaccaaggcaaaggggttgccttttaacaagtattcatggttaaccacacacaactcttttgctcgtttgggggaagtatcacggaccggttctgctattttggctcctactaaccagcaagattcaatcacaagccaactcaataatggtgtaagagggtttatgctcgacatgtatgacttccaaaacgatatctggctttgccattctttcgatggaacatgtttcaatttcaccgcttttcaaccggctattaacattttaagggagtttcaagtgtttctagagaagaacaaagaggaagttgtaacgattatcatcgaagattatgtgaaatcgcctaaaggtctcacaaaagtgtttgatgcggctggcttacgaaagttcatgtttccagtatctagaatgcccaaaaatggaggggactggccaaggcttgatgacatggtgcgaaaaaaccaacggttgctagtttttacatccgattcacataaagaagcaaccgaagggatcgcctatcaatggaagtatatggttgagaatcaatatggaaatggagggttgaaggtaggagtgtgtccaaatagagctcaatcagcgccaatgagcgataaatcaaaatctcttgttcttgtgaaccatttccctgatgctgcggatgtgatagtagcatgtaagcaaaactcagcttctcttcttgaatccataaagacatgttaccaagccgcgggacagcgatggcctaacttcatagcagtcgatttctacaagagaagcgatggtggaggagctccgcaagcggttgatgttgcgaatggcaatttgatatgcggttgcgataactttgcagcgtgcaaggctgacggcaaatgtggatagtaagaaagactgagccaccagaagcaactcccataaccaaaggctttctgcgtttgttgtcacctttgtgtcatcttttccataaagttttagctagtgtagtaacggttagtttttgttttagattatttagagattagtactgtactggttagtttcattactctaaatttcctaatcatatatgaactagtcaccgaataatctatatatactgaaaacactggtgactaaaaatgttaaacacaaagttatttaatagctaaaaatctaaattaggg

SEQ ID NO: 103599 - protein, 359 aa, Arabidopsis thaliana; identical to SEQ ID NO: 30404
  peptide (1)..(359): Ceres Seq. ID no. 13613137

SEQ ID NO: 103600 - protein, 238 aa, Arabidopsis thaliana; identical to SEQ ID NO: 30405
  peptide (1)..(238): Ceres Seq. ID no. 13613138

SEQ ID NO: 103601 - protein, 235 aa, Arabidopsis thaliana; identical to SEQ ID NO: 30406
  peptide (1)..(235): Ceres Seq. ID no. 13613139

SEQ ID NO: 103602 - DNA, 1383 bp, Arabidopsis thaliana
  misc_feature (1)..(1383): Ceres Seq. ID no. 13613149
  misc_feature (1)..(1383): Ortholog of  Ceres SEQ ID NO 12609528 as cited in SEQ ID NO 51902
  misc_feature (1)..(1383): Ortholog of  Ceres SEQ ID NO 12625248 as cited in SEQ ID NO 68797
gaattgacggaggtccgttactctgaatccttgtattcgcattaaccctaactttttctgcttcccaagcgtctcgaaatctgaatccagagattaaacaaaaattgaacggacttgctttgacacagcagaccgtaaatcgggatgggtgctcctaagcagaaatggactcaagaagaagagtcagctttaaagtctggagttataaagcatggacctggtaaatggcgcacaattctcaaagatcctgaatttagcggagtcttgtacctgcgttccaatgttgatcttaaggacaaatggagaaacatgagtgtcatggcaaatggctggggatcgcgcgaaaagtctaggttagctgttaaaaggacgttctcccttcctaaacaggaagagaactcactagccctaaccaattctttgcaaagtgatgaagaaaatgtggatgcgacctctggactccaagtttcttctaatcctcctccaaggagacctaatgtaaggttggatagccttataatggaagcaatagctaccctgaaagaacctggtggctgtaacaaaacaacaattggtgcctacattgaggatcaatatcatgctccaccagacttcaaacgcttgttgtctaccaagctaaagtacttgacatcttgcgggaaacttgtgaaggttaaacgtaagtacagaattccaaactccactcccttgtcttcccacaggagaaaaggtctgggggtgtttggaggaaaacagaggacttcttctttgccttcacctaaaacagacatagatgaagtgaattttcagacaaggtcacagattgatacagagatagccagaatgaagagtatgaacgtacatgaggcggcagcagttgcagcacaggcagtagcagaggcagaagctgccatggcagaggctgaggaagctgcaaaggaagcggaggcagcagaagccgaagcagaagcagctcaagctttcgctgaggaagcttcaaagacattgaaaggaagaaacatctgcaaaatgatgatccgtgcctgaggtaatggaaagcgagagaagaaggagactaaatgtgaagagagagtagagagaagcctagtgtttgtgttgatcattctctttacttgggaagttgttttttagtagtaagcaatcaaatatgtttgtcagtatgtcgtcgctctgactcttttgattcctgcacaacttttgggaaaaaatgttttatttggctcttctcactctccaatatacatacaactatcgttagtaatgtgtataatttatagaccgatctatctatgcactatcatgcttatcgccaatgagcattttgattatgtatgtattatcaattaatagtagtactgtttt

SEQ ID NO: 103603 - protein, 300 aa, Arabidopsis thaliana; identical to SEQ ID NO: 74539
  peptide (1)..(300): Ceres Seq. ID no. 13613150

SEQ ID NO: 103604 - protein, 245 aa, Arabidopsis thaliana; identical to SEQ ID NO: 74540
  peptide (1)..(245): Ceres Seq. ID no. 13613151

SEQ ID NO: 103605 - protein, 242 aa, Arabidopsis thaliana; identical to SEQ ID NO: 74541
  peptide (1)..(242): Ceres Seq. ID no. 13613152

SEQ ID NO: 103606 - DNA, 1478 bp, Arabidopsis thaliana
  misc_feature (1)..(1478): Ceres Seq. ID no. 13613153
  misc_feature (1)..(1478): Ortholog of  Ceres SEQ ID NO 14303542 as cited in SEQ ID NO 63539
  misc_feature (1)..(1478): Ortholog of  Ceres SEQ ID NO 12407937 as cited in SEQ ID NO 0
gtactcagtacttacatcttcttcatctgacgatagcaaaaatgacaagcaatccctaatttcgcctcaaaaaatcccaaaaagcttcgttcttttttagtcatcatcatcttcttcttttcttcttcttcggttgctaaatcgaagatggcgactgctctggtttctcctcttacttcacaactcaaccatgaagctgtctgttccaagtttgtgttacccaaatcgccgttcatgtcgggatctaagctcttttcatcgaacatgccttgctctactgttcctagacgcacaagaagatcacactgctttgcttctgctaaagatatgagctttgaccatatccctaaacaatttcgtggagacaatctcaaagacggagtgatgcagaacttcaagaacgtaccacaatatttttacgggcttaattcagctcaaatggatatgttcatgacagaagatagccctgtccgtaggcaagcggaaaaagttacagaggaaagcatctcgtctagaaataactatttgaacaatggaggaatatggagtatgtccggtatgaatgcagcagatgctagaagatatagcatgagtgtccagatgtacagaggtggaggtggcggcggaggatctgaaagaccaagaactgctcctccagatttgccttctttgctattggatgctcgcatatgctaccttggcatgccaatcgtacctgcagttactgagttactcgttgctcaatttatgtggttagactatgataacccaacaaagcccatctacttatatataaattcacccgggacccagaatgagaagatggaaactgttggatcagaaacagaggcttatgccatagccgatactatttcttattgcaaatcagatgtatacactatcaattgtggcatggcttttggtcaagcagcaatgcttctttctctcgggaaaaaaggttatcgtgccgtacaaccacattcatcaacaaaattatatctgccaaaagtaaacagatcgagtggagctgccatagacatgtggataaaggccaaggaacttgatgcaaataccgagtactacatcgagctgttagctaagggaacagggaaatccaaagagcagatcaacgaggacatcaagcgacctaaatatctccaagctcaagcagccattgactatggaattgcagacaagatagctgactcgcaggacagttctttcgagaaacgggattacgatgggacccttgcccagagagctatgagacctggaggaggcagtccagcagctccagccggactaagatgatcaattcccaccagaaagaaagaggttgaatcctaatttcctagtcactctggaatatgtagctcttacaatctataagcaaacacatgtggtagtaacatacaaaaaagtgttggcaaaaagggaaataacatcaaaagttatctaggtggaaagttatttgtatt

SEQ ID NO: 103607 - protein, 387 aa, Arabidopsis thaliana; identical to SEQ ID NO: 21252
  peptide (1)..(387): Ceres Seq. ID no. 13613154

SEQ ID NO: 103608 - protein, 358 aa, Arabidopsis thaliana; identical to SEQ ID NO: 21253
  peptide (1)..(358): Ceres Seq. ID no. 13613155

SEQ ID NO: 103609 - protein, 348 aa, Arabidopsis thaliana; identical to SEQ ID NO: 21254
  peptide (1)..(348): Ceres Seq. ID no. 13613156

SEQ ID NO: 103610 - DNA, 1277 bp, Arabidopsis thaliana
  misc_feature (1)..(1277): Ceres Seq. ID no. 13613165
  misc_feature (1)..(1277): Ortholog of  Ceres SEQ ID NO 14315189 as cited in SEQ ID NO 57702
acgcctctcttcttctgcttcacttcactactgctttctctatttctccatagatggctccttcttcatcacctcttcgtactacaagtgaaacagatgaaaaatatgcgaatgtcaaatgggaagagcttggattcgctctgactccaatagattatatgtatgtagccaaatgcagacaaggagagagctttacacaagggaagattgttccttatggcgacatttcaattagcccttgttctccgattctcaattacggccagggactatttgaaggtctcaaagcttacagaacagaagacgaccggattaggattttccggcctgaccaaaacgctcttcgcatgcaaactggtgcggagaggctttgtatgacacctcctactctagaacaatttgtcgaggcagttaagcaaactgtgcttgccaacaagaaatgggttcctcctccgggtaaaggaactctgtatataaggcctctgctactagggagtggtgctacccttggagtagctccagcacctgaatacacttttctcatatatgcatctcccgtaggagattaccataaggtaagctcaggcttgaacctcaaagttgatcataagtatcaccgagcccattcaggtggaacggggggtgtcaagagctgcacaaactattctccagttgtgaaatcgttactcgaagcaaagtcagcgggtttctctgatgtcctgttcctggatgcagcaactggtagaaacatcgaagagcttactgcttgtaacatcttcattgtcaagggaaacattgtatccaccccaccaacttcaggaaccattttacctggagtcacgaggaaaagcataagtgagctggctcatgatattggctaccaggtcgaagaacgcgatgtatctgtggatgagctactagaggcagaagaagttttctgcacagggactgcagtggtcgttaaagctgttgaaactgtgaccttccatgacaaaaaggtaaaatacaggacaggagaagcagcattgtctacgaagcttcactcgatgttgaccaatattcagatgggagttgttgaagataagaaaggttggatggtggacattgatccttgtcaaggttgaaagaagaagtttagaaagctgatgattctatgtactcaaacgtgtatcttttcttctcatgtgttggtttttattaggattcttctttttttatcatgggacttgtaataaataatgggtaactcttaagatacaagaggcggcagtatgttc

SEQ ID NO: 103611 - protein, 356 aa, Arabidopsis thaliana; identical to SEQ ID NO: 28085
  peptide (1)..(356): Ceres Seq. ID no. 13613166

SEQ ID NO: 103612 - protein, 321 aa, Arabidopsis thaliana; identical to SEQ ID NO: 28086
  peptide (1)..(321): Ceres Seq. ID no. 13613167

SEQ ID NO: 103613 - protein, 258 aa, Arabidopsis thaliana; identical to SEQ ID NO: 28087
  peptide (1)..(258): Ceres Seq. ID no. 13613168

SEQ ID NO: 103614 - DNA, 904 bp, Arabidopsis thaliana
  misc_feature (1)..(904): Ceres Seq. ID no. 13613169
  misc_feature (1)..(904): Ortholog of  Ceres SEQ ID NO 14301502 as cited in SEQ ID NO 61205
aacagtcaattggcggcgaagatgacgactcagtcgcagttcttagtgaacctctcttacggaggcctcgcctcccaaagtaatctcagagcgaataatcgtgtttcaccttcttcttgtcaaattacacgaacaaatcgctcatgggcattaccagtttcctttaaagttgagaaatttcaactccaacgaggaaggaggagaagaggatcaccatgttttggggagagcgaagggttggtcaaaaatgggattggtgatgctgatgggattataattgttgatcacggttctcgtcgccgtgaatccaatcttatgcttgaggagtttgtgaaaatgttcaaagaaaaaactggttacccaattgtagagcctgctcatatggaattggctgagccatctataaaagatgcattcagtttgtgtgtacaacaaggggcgaaacgtgtagttgtgagcccgttttttctatttcctggaagacattggcatacggacattccctcgttgacggctgatgctgcaaaggagttctctggcatctcatacctcataactgcacctctcggcccccataatctcctcctggacgttgtaaatgacagaatccaacattgcttgagccatgttgaaggtgatgctgacgagtgtcttgtttgtgctggaacaaataagtgcaagctctacaatagttcttaggtgtacatgtaagaacgtttttgtatatctgctcatcttctctaaccttcggatgcgggaaaaaaaggaggcatagtatattgttcatactcatcatttagtacgcgtcctatgtttcaacaagggagttttgagatttatgttcttttcttcttattgcagaccaatttgaaagactacgataatataataaaagctgtctgtt

SEQ ID NO: 103615 - protein, 232 aa, Arabidopsis thaliana; identical to SEQ ID NO: 38345
  peptide (1)..(232): Ceres Seq. ID no. 13613170

SEQ ID NO: 103616 - protein, 225 aa, Arabidopsis thaliana; identical to SEQ ID NO: 38346
  peptide (1)..(225): Ceres Seq. ID no. 13613171

SEQ ID NO: 103617 - protein, 127 aa, Arabidopsis thaliana; identical to SEQ ID NO: 38347
  peptide (1)..(127): Ceres Seq. ID no. 13613172

SEQ ID NO: 103618 - DNA, 1195 bp, Arabidopsis thaliana
  misc_feature (1)..(1195): Ceres Seq. ID no. 13613183
  misc_feature (1)..(1195): Ortholog of  Ceres SEQ ID NO 14313893 as cited in SEQ ID NO 54646
  misc_feature (1)..(1195): Ortholog of  Ceres SEQ ID NO 13656797 as cited in SEQ ID NO 65756
  misc_feature (1)..(1195): Ortholog of  Ceres SEQ ID NO 13658498 as cited in SEQ ID NO 66557
  misc_feature (1)..(1195): Ortholog of  Ceres SEQ ID NO 15227053 as cited in SEQ ID NO 0
gaagaaaaaacacttccaaacaaaataatgagttcttcgtcttcctcatcctcttcttcttcttcttctcgcagtaaatttatggattcaggatttataatcgggcgaaaagaactaacaagaattttgatactgtttcttggtttaaccgcttcatgtctggttttatacaaaacagcttatcctctgcaacgacttaatgtcagcaatctaacctctctccaagcttctccatctccactattaccaaacctcaactcatcagagatttctccagaaacgacaaaaccaaagttgagtttcaaggagattttggagaacgcatcaacgaagaacaatacagtgattataacgacattgaatcaagcttgggcagaaccaaactctttgtttgatctcttcttagagagttttcgtattggacaaggaacacaacaacttctgaaacatgtagtagtggtttgcttggatatcaaggcgtttgaacgatgctcacaacttcatactaactgttaccacattgaaacatcagaaactgatttctctggcgagaaagtttacaacactcctgattatcttaagatgatgtgggccagaatcgaccttcttactcaagtacttgagatgggttttaacttcatcttcacggacgcagatataatgtggcttagagatccatttcctcggttatatccagatggagacttccaaatggcgtgtgacagattctttggaaatccttatgattcagacaattgggtcaatggtggtttcacatacgtgagatcaaacaatcgaagcattgagttttacaaattttggcacaaatctcgtctagattatccagacttgcatgatcaagatgtgttcaacagaatcaagcatgagccttttatctcagagattggaatccaaatgagattctttgatacagtttactttggtgggttttgtcaaacgagcagagacataaacttggtttgcacaatgcatgctaattgttgtattggtttggacaagaagcttcatgatctgaatcttgtccttgatgattggagaaagtacctgtctttgtcagaaccagtgcagaacacgacgtggagtgttcctatgaagtgtttggaagattgagatttccttctttctttgttttgttgagatttggatgaaaagtatatttaaaaatgaagagttt

SEQ ID NO: 103619 - protein, 376 aa, Arabidopsis thaliana
  peptide (1)..(376): Ceres Seq. ID no. 13613184
EEKTLPNKIMSSSSSSSSSSSSSRSKFMDSGFIIGRKELTRILILFLGLTASCLVLYKTAYPLQRLNVSNLTSLQASPSPLLPNLNSSEISPETTKPKLSFKEILENASTKNNTVIITTLNQAWAEPNSLFDLFLESFRIGQGTQQLLKHVVVVCLDIKAFERCSQLHTNCYHIETSETDFSGEKVYNTPDYLKMMWARIDLLTQVLEMGFNFIFTDADIMWLRDPFPRLYPDGDFQMACDRFFGNPYDSDNWVNGGFTYVRSNNRSIEFYKFWHKSRLDYPDLHDQDVFNRIKHEPFISEIGIQMRFFDTVYFGGFCQTSRDINLVCTMHANCCIGLDKKLHDLNLVLDDWRKYLSLSEPVQNTTWSVPMKCLED

SEQ ID NO: 103620 - protein, 367 aa, Arabidopsis thaliana
  peptide (1)..(367): Ceres Seq. ID no. 13613185
MSSSSSSSSSSSSSRSKFMDSGFIIGRKELTRILILFLGLTASCLVLYKTAYPLQRLNVSNLTSLQASPSPLLPNLNSSEISPETTKPKLSFKEILENASTKNNTVIITTLNQAWAEPNSLFDLFLESFRIGQGTQQLLKHVVVVCLDIKAFERCSQLHTNCYHIETSETDFSGEKVYNTPDYLKMMWARIDLLTQVLEMGFNFIFTDADIMWLRDPFPRLYPDGDFQMACDRFFGNPYDSDNWVNGGFTYVRSNNRSIEFYKFWHKSRLDYPDLHDQDVFNRIKHEPFISEIGIQMRFFDTVYFGGFCQTSRDINLVCTMHANCCIGLDKKLHDLNLVLDDWRKYLSLSEPVQNTTWSVPMKCLED

SEQ ID NO: 103621 - protein, 349 aa, Arabidopsis thaliana
  peptide (1)..(349): Ceres Seq. ID no. 13613186
MDSGFIIGRKELTRILILFLGLTASCLVLYKTAYPLQRLNVSNLTSLQASPSPLLPNLNSSEISPETTKPKLSFKEILENASTKNNTVIITTLNQAWAEPNSLFDLFLESFRIGQGTQQLLKHVVVVCLDIKAFERCSQLHTNCYHIETSETDFSGEKVYNTPDYLKMMWARIDLLTQVLEMGFNFIFTDADIMWLRDPFPRLYPDGDFQMACDRFFGNPYDSDNWVNGGFTYVRSNNRSIEFYKFWHKSRLDYPDLHDQDVFNRIKHEPFISEIGIQMRFFDTVYFGGFCQTSRDINLVCTMHANCCIGLDKKLHDLNLVLDDWRKYLSLSEPVQNTTWSVPMKCLED

SEQ ID NO: 103622 - DNA, 1326 bp, Arabidopsis thaliana
  misc_feature (1)..(1326): Ceres Seq. ID no. 13613187
  misc_feature (1)..(1326): Ortholog of  Ceres SEQ ID NO 15224520 as cited in SEQ ID NO 58188
  misc_feature (1)..(1326): Ortholog of  Ceres SEQ ID NO 12777206 as cited in SEQ ID NO 60246
gaagtgaccgtcttccttgtcttttttctctccctgttgagatctctgagaaaaaaaaaatccatccgatcttcaaaaaaagtcaccccctttaacattcttctccaatctctctacaaaccctaatctcagccatggatctcgctgcagaagagcttcaatttctcaacattcaaggcatattacgtgaatccacaacaatccccaaattttccccaaaaaccttctacctcataaccctaaccctaattttccctctctccttcgcaatcctcgctcattccctctttacccaaccaatcttagctcagctagatgcaactcctccttcagatcaatctaaaaccaatcacgaatggacccttcttctcatttatcaattcatctacgtcatcttcctcttcgccttctctcttctctcaacagccgccgtcgtcttcaccgtcgcttcgctttacacgggaaagccagtttctttctcttcaacaatgtcagcgattcctctggttttgaagcgtttgttcattaccttcctttgggtttctttaatgatgcttgtgtacaactctgtcttcttgttgtttctcgttgttttgatcgtagctatcgatttacaaagcgtgattctcgctgtcttctcgatggttgtgattttcgttctgtttttgggtgttcatgtttacatgactgcttggtggcatttagctagtgtagtctctgttcttgaaccgatttacggtatcgccgcgatgaagaagagttacgagttgcttaatggaagaactaatatggcgtgttcgatggtttttatgtatcttgctctttgtggaatcactgctggtgttttcggtggtgttgtggttcatggaggtgatgatttcgggttgtttacgaagattgttgttggtggtttcttggttgggattctagtgattgtgaatctagttgggctgcttgtgcagagtgtgttttactatgtttgtaagagttttcatcatcagccgattgataaatctgcgttgcacgatcatcttggtggatatcttggtgactatgtgccgttaaagagcagtattcagatggagaactttgatatttaatcgttaaatggattggatgatgatgatgaagaagaaacggtttttgcggtttgtcattgtaagttgtaatgtttgtaattttctatagtgtttgtattagcttttgcataatctgaattaatttgggggatagacttatattgcagatgttctgttcctttgtaatttcatagtgttgtttttttcttcccaaaattggaagattaatgaaataaatttgtttatt

SEQ ID NO: 103623 - protein, 321 aa, Arabidopsis thaliana; identical to SEQ ID NO: 21682
  peptide (1)..(321): Ceres Seq. ID no. 13613188

SEQ ID NO: 103624 - protein, 203 aa, Arabidopsis thaliana; identical to SEQ ID NO: 21683
  peptide (1)..(203): Ceres Seq. ID no. 13613189

SEQ ID NO: 103625 - protein, 183 aa, Arabidopsis thaliana; identical to SEQ ID NO: 21684
  peptide (1)..(183): Ceres Seq. ID no. 13613190

SEQ ID NO: 103626 - DNA, 1280 bp, Arabidopsis thaliana
  misc_feature (1)..(1280): Ceres Seq. ID no. 13613215
  misc_feature (1)..(1280): Ortholog of  Ceres SEQ ID NO 15172958 as cited in SEQ ID NO 51206
  misc_feature (1)..(1280): Ortholog of  Ceres SEQ ID NO 15171139 as cited in SEQ ID NO 60093
  misc_feature (1)..(1280): Ortholog of  Ceres SEQ ID NO 12634262 as cited in SEQ ID NO 0
ttttttttatcatcttctctacactcttcaccaatagcttcactctttttggtcatggcttgtataaacggcgagaatcgtgatttttcttcctcgtcatctttgtcttctcttccaatgattgtctcccggaacttttctgccagagacgatggagagaccggtgacgagtttcctttcgagaggattttcccggtttacgctagaggaacccttaatcccgtggccgacccggttttgctggattttaccaattctagttatgacccaatttgggattctataagagaagaagctaagcttgaggcagaagaggagccggttttgagtagcttcttgtatgctagtatcttgtcgcatgactgtttagagcaagcattgagttttgttctagctaaccgtctccaaaaccctaccttgttggcaactcagcttatggatatattttgcaacgttatggtacatgacagaggtattcaaagctcgattcgtcttgatgttcaggcattcaaagacagagatcctgcttgtctatcgtatagttcggctattttacatctgaagggctatcttgcactgcaggcgtatagagtagcacataagttgtggaagcaaggaagaaaactattagcattggcactgcaaagccgagtaagcgaggtttttggaatcgatattcatcccgctgcaagaattgggaaaggaatattgttggatcatggaactggtgtggtcataggtgagactgctgtgataggcgaccgtgtctcaattttgcatggtgtgacattaggaggaactgggaaagaaaccggtgaccgccatccaaatataggcgacggtgctcttcttggagcatgtgtgactatacttggtaacattaagataggcgctggagcaatggtagctgctggttcgcttgtgttaaaggatgttccttcgcatagcatggtggctggaaatccagcaaaactcatcgggtttgttgatgagcaagatccatctatgacaatggagcatgatgctaccagagagttctttcaaaatgtagctgttgcttatagagagacaataccaaatggatcttcagtttcagggagttgcagggaaaggagacattaaaaagagaacatgagatcacctgcagcttctttaaggcggttttcatcatcaatcataatcacttcaaacaaataacaaagctctttgtttgttaacaaacttgtttttccaattgatggagaaagattttgatacattgttaaacattattcattctg

SEQ ID NO: 103627 - protein, 373 aa, Arabidopsis thaliana
  peptide (1)..(373): Ceres Seq. ID no. 13613216
FFLSSSLHSSPIASLFLVMACINGENRDFSSSSSLSSLPMIVSRNFSARDDGETGDEFPFERIFPVYARGTLNPVADPVLLDFTNSSYDPIWDSIREEAKLEAEEEPVLSSFLYASILSHDCLEQALSFVLANRLQNPTLLATQLMDIFCNVMVHDRGIQSSIRLDVQAFKDRDPACLSYSSAILHLKGYLALQAYRVAHKLWKQGRKLLALALQSRVSEVFGIDIHPAARIGKGILLDHGTGVVIGETAVIGDRVSILHGVTLGGTGKETGDRHPNIGDGALLGACVTILGNIKIGAGAMVAAGSLVLKDVPSHSMVAGNPAKLIGFVDEQDPSMTMEHDATREFFQNVAVAYRETIPNGSSVSGSCRERRH

SEQ ID NO: 103628 - protein, 355 aa, Arabidopsis thaliana
  peptide (1)..(355): Ceres Seq. ID no. 13613217
MACINGENRDFSSSSSLSSLPMIVSRNFSARDDGETGDEFPFERIFPVYARGTLNPVADPVLLDFTNSSYDPIWDSIREEAKLEAEEEPVLSSFLYASILSHDCLEQALSFVLANRLQNPTLLATQLMDIFCNVMVHDRGIQSSIRLDVQAFKDRDPACLSYSSAILHLKGYLALQAYRVAHKLWKQGRKLLALALQSRVSEVFGIDIHPAARIGKGILLDHGTGVVIGETAVIGDRVSILHGVTLGGTGKETGDRHPNIGDGALLGACVTILGNIKIGAGAMVAAGSLVLKDVPSHSMVAGNPAKLIGFVDEQDPSMTMEHDATREFFQNVAVAYRETIPNGSSVSGSCRERRH

SEQ ID NO: 103629 - protein, 334 aa, Arabidopsis thaliana
  peptide (1)..(334): Ceres Seq. ID no. 13613218
MIVSRNFSARDDGETGDEFPFERIFPVYARGTLNPVADPVLLDFTNSSYDPIWDSIREEAKLEAEEEPVLSSFLYASILSHDCLEQALSFVLANRLQNPTLLATQLMDIFCNVMVHDRGIQSSIRLDVQAFKDRDPACLSYSSAILHLKGYLALQAYRVAHKLWKQGRKLLALALQSRVSEVFGIDIHPAARIGKGILLDHGTGVVIGETAVIGDRVSILHGVTLGGTGKETGDRHPNIGDGALLGACVTILGNIKIGAGAMVAAGSLVLKDVPSHSMVAGNPAKLIGFVDEQDPSMTMEHDATREFFQNVAVAYRETIPNGSSVSGSCRERRH

SEQ ID NO: 103630 - DNA, 1121 bp, Arabidopsis thaliana
  misc_feature (1)..(1121): Ceres Seq. ID no. 13613219
  misc_feature (1)..(1121): Ortholog of  Ceres SEQ ID NO 13504447 as cited in SEQ ID NO 57609
aagagcccgtcgtttctcccattaccctccaattaatacactattttttttatttttttgtctttccctttttaaaatgatcatcatcttcttcttcactcgcctcaatttttgttcccttcttcttctataattcaactgtgaatttcaccgacgaaacaaaaaagagagagagagagagagaaacgatgagttctcagatttcggagattgaacaagagcagctgatcgagaagcttgagatcttcaagatccatggcagagacaaacgtggccgtaagatccttcgtattatcggaaaattcttcccagctcgatttctgtcactggatgtgttgaagaagtatctagaggagaagatatttcctcgattaggtagaaaaccattcgccgtactctacgtccacaccggcgtacagagaagcgagaacttcccaggtatctcagctctacgagcgatctacgacgcaattccggtaaacgtcagagacaatcttcaggaggtttacttcctccatccaggtcttcaatcacgtctcttcctcgccacctgcggccgatttctattttccggcgggttgtacgggaagctgaggtacataagcagagttgattatctgtgggaacatgtgaggaggaatgagatagagatgccggagtttgtatacgatcacgatgatgatctggagtatcgtccgatgatggattacggtcaagaaagcgatcacgcgagggttttcgccggagccgccgtggattcatcagtctcaagtttctccatgaggtgtatctcatagcgtaaaaggctaaaactccacccactagatatcggatcgtatcttataaaccatataatatacgaatacgattaataatatatcaaaaagattggaaataggtgtgctttttgaaattagtgagcgttttttatggaaaagaaaagaaaagaaagcagttggcgtctggataaagggaaggaggagaatctttagattttttctttaatctgtttttcttttgtcttgattagttttttctttagtggtggtggttgtgagttagtgtgtaaaatgtatattgtcatatgtgaatttaataataagtccttttgtaagatgatc

SEQ ID NO: 103631 - protein, 202 aa, Arabidopsis thaliana; identical to SEQ ID NO: 30212
  peptide (1)..(202): Ceres Seq. ID no. 13613220

SEQ ID NO: 103632 - DNA, 1134 bp, Arabidopsis thaliana
  misc_feature (1)..(1134): Ceres Seq. ID no. 13613221
  misc_feature (1)..(1134): Ortholog of  Ceres SEQ ID NO 12784064 as cited in SEQ ID NO 66982
  misc_feature (1)..(1134): Ortholog of  Ceres SEQ ID NO 15177907 as cited in SEQ ID NO 0
ctatctttcgagcattgaaatgattaaaaaaaaattagtggtgttttcaacatagatcatgacaggcaaaccctagattttacttcacctacttgaggttaaaaaacttaattgcaagtaggccagacatcggatcttctctcttaagggctaagcaaaacccatctctcctctttcttctatcttctttctcttccttctctcttctcttgtataaactccactgagctctgtttttgtttttaccgtagatcgtttcgagtctctttaatctttggcgggttccgtaaaaaaaaaaatggcctcttctagattccaatctgggttttgtcctatctcttcgtgtccctctcttgagaatttcatcgaaaggattaaagacgcatgtcgtttcaccctctccgctgttctagggacaattctctcggcggtcttgactttcttcttcgctttagtgggcacattgcttggagcacttactggagctttgataggccaagaaaccgaaagtgggtttatccgaggagcggcggttggagccatttcgggagctgttttctctatcgaagtctttgagtcatctcttgttctttggaaatctaatgagtcacgttttggatgtctcctctacttgattgatgtcattgttagtctgataagtggtagacttgtgcgggaacgaataggtccagcaatgctaagtgcggttcaaagtcagatgggagctgtggattcaactttcgaagagctctcgagtattttcgataccggtggctcaaaggggttaacaggagatttggttgataaaatacctaaaatcaaaatcactggcaaaaacaacttagatgcttctggcaacaaagactcatgttctgtttgtcttcaggattttcaacttggtgaaacggtgagaagcttgccacattgtcatcacatgtttcacttgccttgcatagacaattggctcttcaggcacggatcttgtccaatgtgtagacgcgatctgtaatctcttttcttaccatttgcacagcctcttccctctctctccttcttcttgtatggtcgtaaattcgtaatcatgtggttagagtctctatatatgtacaaagaaatgaaaaaaaaaaagttttg

SEQ ID NO: 103633 - protein, 236 aa, Arabidopsis thaliana; identical to SEQ ID NO: 41212
  peptide (1)..(236): Ceres Seq. ID no. 13613222

SEQ ID NO: 103634 - DNA, 1070 bp, Arabidopsis thaliana
  misc_feature (1)..(1070): Ceres Seq. ID no. 13613227
  misc_feature (1)..(1070): Ortholog of  Ceres SEQ ID NO 15175425 as cited in SEQ ID NO 0
tttctctctctagttgttgttctctctctctctcgcatcctccaattcatcgtcctcacgttcccttttgtttattcatcttccttccttcttcacatttctgattttctctatttggggggtttgtttccacattatacatatctagggttttgagatggttaattgaaagataatggtcgaagtttcggaggaattggcttcacattgtgggtgtttctggcttcctcaggtttaaatctgaggttgatctcttttgttttttggtaaattgtgacatattttggctcgaagaagaagaagaagaggcaatgagcgcatcaaggttcataaagtgcgtcaccgttggtgatggagctgttggtaaaacctgtttgctgatttcttataccagcaacacctttcccacggattatgttccgactgttttcgataactttagtgcaaatgtggttgttaatggagccacggtgaatcttggattgtgggatactgcagggcaagaggactataacagattaagacctttgagttaccgtggtgctgatgttttcattcttgccttctctctcattagtaaggctagttatgagaatgtttccaagaagtggattcctgagttgaagcactatgctcctggtgtcccaattgtccttgttggaaccaaactagatcttcgagatgacaaacagtttttcatcgaccatcctggtgctgtccctattaccactgttcagggagaggagctgaagaagctaattggagcgccagcttacatcgagtgcagttcaaaatcacaagagaacgtgaagggcgtgtttgatgcagcgatcagagtggtccttcaacctccaaagcagaagaaaaagaagaacaaagcacaaaaggcctgctccatcttgtaatagcactcatggaagtcaagaagctctttgagatgaggatgacagggtggtttaaaaaagtatcgctttttcatttttgttgttgttttccgttttcatttgtgatctcttagttccgtacaaaacgaattgtgaggttaattcaacttctattttaactgatag

SEQ ID NO: 103635 - protein, 197 aa, Arabidopsis thaliana; identical to SEQ ID NO: 22729
  peptide (1)..(197): Ceres Seq. ID no. 13613228

SEQ ID NO: 103636 - DNA, 1188 bp, Arabidopsis thaliana
  misc_feature (1)..(1188): Ceres Seq. ID no. 13613231
  misc_feature (1)..(1188): Ortholog of  Ceres SEQ ID NO 12635446 as cited in SEQ ID NO 0
ccaacttaaaaaaccctaatttctcaatctcttcttcaacttttttttttaacgatggcttcagaggatcaatcggcggcgagatctaccgggaaggtgaactggttcaacgcttctaaaggctatggtttcattactcctgacgatggcagcgtagagcttttcgttcatcaatcttcaattgtctccgaaggttaccggagtttaaccgtcggcgatgcggttgagttcgctattactcagggaagcgacggtaagactaaagccgtcaatgttactgctcctggtggtggttctctcaagaaggagaataactctcgtggtaacggtgctaggcgcggcggcggtggaagcggttgctacaattgcggtgagttaggtcatatctctaaagattgtggtattggtggcggcggcggaggtggtgaacgtagatctagaggaggagaaggttgttacaattgtggtgatactggtcacttcgctagggattgtacttcagctggaaacggtgaccaacgtggagccaccaaaggtggaaacgatggttgctacacttgcggtgatgttggtcacgtggctagggattgtactcagaaatcagttggaaacggagaccaacgtggagcggtcaaaggtggaaacgatggttgctacacttgtggtgatgttggtcactttgctagggattgtactcagaaggttgctgccggaaacgtcagaagcggtggtggtggtagtggaacttgttattcatgcggtggagttggtcacattgcaagagattgtgcgactaagagacagccttctcgtgggtgttaccagtgtggtggttctggtcacttggctcgtgattgtgaccagagaggaagcggtggaggaggtaatgataatgcgtgctacaagtgtggtaaggaaggtcactttgcaagggaatgttcttctgtagcttaatcgatttcctaatcaacaaaacaaaaaaacaagaatgaaattgaatcgagttatatagtttggtatatattactcttcgttttcatttatctttttttttgttgttgatgggaatgaaattgcctggtccttttggtgtgtttttgagcttttattattatacagagtgatccctttttgttataactattacaagtttttagctttatttgatatggatgctctctccttttc

SEQ ID NO: 103637 - protein, 299 aa, Arabidopsis thaliana
  peptide (1)..(299): Ceres Seq. ID no. 13613232
MASEDQSAARSTGKVNWFNASKGYGFITPDDGSVELFVHQSSIVSEGYRSLTVGDAVEFAITQGSDGKTKAVNVTAPGGGSLKKENNSRGNGARRGGGGSGCYNCGELGHISKDCGIGGGGGGGERRSRGGEGCYNCGDTGHFARDCTSAGNGDQRGATKGGNDGCYTCGDVGHVARDCTQKSVGNGDQRGAVKGGNDGCYTCGDVGHFARDCTQKVAAGNVRSGGGGSGTCYSCGGVGHIARDCATKRQPSRGCYQCGGSGHLARDCDQRGSGGGGNDNACYKCGKEGHFARECSSVA

SEQ ID NO: 103638 - DNA, 1696 bp, Arabidopsis thaliana
  misc_feature (1)..(1696): Ceres Seq. ID no. 13613239
  misc_feature (1)..(1696): Ortholog of  Ceres SEQ ID NO 15225553 as cited in SEQ ID NO 51170
attatattgtccttgcaatttataagtaaaaacatttcttttctggtccactcgttttaacttccggcgatcgattttcacggcgagaaatgttgtcggcgcttggctttgctttactcagcatcttcgcgatcctcttgtcgttatcaaccttgtctaatggattacttcaacctcgtaggatttctcatggcttgacggaaagtagcaagtacttgacgagggatgagctctggttcaatcaaaccctagatcattactctccttctgatcatcgcgaattcaaacagcgatactatgaatatctagaccatttacgagttcctgatggacctatctttatgatgatctgtggcgaaggaccttgcaatggaatccccaatgactatataactgtgttagcaaagaagtttgatgcaggcattgtttcacttgagcatcgttattacggaaagagctcaccgtttaagtcattagccactgagaatctcaagtatctttcttctaaacaggctcttttcgatttagctgctttccgccaatattaccaggactctttgaatgttaagtttaatagaagtggcgatgttgagaatccgtggtttttcttcggagcttcttattctggagctttaagtgcttggttccggcttaagttccctcatttgacctgtggaagccttgctagttctgcagttgttcgtgcagtctacgaattccctgaatttgatcaacagataggtgagtcggctggaccggaatgtaaagctgcactacaagagactaataagctcttggaactagggcttaaagtgaataacagggctgtgaaagctctcttcaatgccaccgagcttgacgttgatgctgatttcttatacttgatagcagatgcagaagttatggcgatccaatacggaaacccagataaactatgtgtaccactcgtggaagctcagaagaatcgtgatgatttagtggaagcatatgctaaatatgttagagagttttgtgtgggggttttcgggctaagctctaaaacatatagccggaaacatctgctagacactgcggtcaccccagaaagtgcagataggctttggtggttccaagtttgcactgaagtggcatatttccaagtggcacctgcaaacgatagcatccggtctcatcaaatcaatacagagtatcatttggatctatgcaagagtctgtttgggaaaggtgtttaccctgaagtcgatgcaacaaacctgtattatggaagtgacagaattgctgcgaccaagattatcttcacaaatgggtcacaggatccatggcgtcatgcatccaaacagacctcatctcctgaactgccttcttacattgtgacttgccacaactgtggccatggaagtgatctccgtggatgccctcaatctcccatggtcattggaggtgattccaagaattgcagttcacctgatgcagtgaacaaagtgaggcaacatatagtagatcatatggacttgtggctctctgagtgtcgtggagggattaggagttccatgtaaagagtcacacgaagtcagaaactgcggttatgcaaataaataaaacatcagatgtatgtttcaaacctgtatctgtgtaactgtaacctctgatgtatgtttcgaacttgtctctacggacctaatacagtagtttacac

SEQ ID NO: 103639 - protein, 488 aa, Arabidopsis thaliana; identical to SEQ ID NO: 23326
  peptide (1)..(488): Ceres Seq. ID no. 13613240

SEQ ID NO: 103640 - protein, 404 aa, Arabidopsis thaliana; identical to SEQ ID NO: 23327
  peptide (1)..(404): Ceres Seq. ID no. 13613241

SEQ ID NO: 103641 - protein, 403 aa, Arabidopsis thaliana; identical to SEQ ID NO: 23328
  peptide (1)..(403): Ceres Seq. ID no. 13613242

SEQ ID NO: 103642 - DNA, 1263 bp, Arabidopsis thaliana
  misc_feature (1)..(1263): Ceres Seq. ID no. 13613246
  misc_feature (1)..(1263): Ortholog of  Ceres SEQ ID NO 13581611 as cited in SEQ ID NO 59028
  misc_feature (1)..(1263): Ortholog of  Ceres SEQ ID NO 13596689 as cited in SEQ ID NO 62728
aatggattacttttcttccacacatatataacttaactctctctttttctcttttgctttaaccccctcaaagaaaagataagagccttttaaagttttttttttaccttctcttcatggacttgtctgtacttgataggcttaagtggctgcaacagcaacaaatggtttcacctgagtttcttcagatacttggctcagatgggagagaagagctcaaaagagttgagagttacttgggaaacaacaatgatgagctgcagagtttcagacattttcccgaattcggaccggattatgatactactgatggctgcatttctaggacaagtagcttccatatggagccagtgaagaataatggacacagcagagccattaccttgcagaacaagagaaaaccagagggtaagacagaaaagagagagaagaagaagatcaaagcagaggatgaaacagagccaagcatgaaagggaaatcaaacatgagtaacacagagacatcttcagaaattcagaaaccagattacattcatgttagggctagacgaggtgaagccaccgacagacatagcttagcagagagggcaagaagagaaaagataagcaagaagatgaaatgtctacaagatattgttcctggatgcaacaaagttactggaaaagctggtatgcttgatgagatcatcaactatgtccaatctctgcaacaacaagtcgagttcttgtcgatgaaactctctgtcataaatccagaacttgagtgtcatatcgatgatttatccgcaaaacagtttcaggcttacttcacaggtcctccagaaggtgactcgaagcagtcaatcatggcggattttcggtcttttccattacatcagcaaggatctttagattactcagtcataaactcagaccacaccacatctctcggcgctaaagatcatacatcatcaagctgggaaactcactcacagtgtctttacaacagcttgagaaccgattctgtttccaatttcttcagcctcaagtaaaaaaattagggatagcctcattaaaaaaatcgcggttttttgttgttgtcttatccatttatctatcttatctgaaatttgaaccaaaagagacagaggaaaccaatccaaagatctttctcaatctattatcttcatacaaatatagtgatttacatatattccaggggatatgtatatgtgtagaagaaagagaaaaaactcttgtggtcatagcaattcctttttttgt

SEQ ID NO: 103643 - protein, 304 aa, Arabidopsis thaliana
  peptide (1)..(304): Ceres Seq. ID no. 13613247
MDLSVLDRLKWLQQQQMVSPEFLQILGSDGREELKRVESYLGNNNDELQSFRHFPEFGPDYDTTDGCISRTSSFHMEPVKNNGHSRAITLQNKRKPEGKTEKREKKKIKAEDETEPSMKGKSNMSNTETSSEIQKPDYIHVRARRGEATDRHSLAERARREKISKKMKCLQDIVPGCNKVTGKAGMLDEIINYVQSLQQQVEFLSMKLSVINPELECHIDDLSAKQFQAYFTGPPEGDSKQSIMADFRSFPLHQQGSLDYSVINSDHTTSLGAKDHTSSSWETHSQCLYNSLRTDSVSNFFSLK

SEQ ID NO: 103644 - protein, 288 aa, Arabidopsis thaliana
  peptide (1)..(288): Ceres Seq. ID no. 13613248
MVSPEFLQILGSDGREELKRVESYLGNNNDELQSFRHFPEFGPDYDTTDGCISRTSSFHMEPVKNNGHSRAITLQNKRKPEGKTEKREKKKIKAEDETEPSMKGKSNMSNTETSSEIQKPDYIHVRARRGEATDRHSLAERARREKISKKMKCLQDIVPGCNKVTGKAGMLDEIINYVQSLQQQVEFLSMKLSVINPELECHIDDLSAKQFQAYFTGPPEGDSKQSIMADFRSFPLHQQGSLDYSVINSDHTTSLGAKDHTSSSWETHSQCLYNSLRTDSVSNFFSLK

SEQ ID NO: 103645 - protein, 229 aa, Arabidopsis thaliana
  peptide (1)..(229): Ceres Seq. ID no. 13613249
MEPVKNNGHSRAITLQNKRKPEGKTEKREKKKIKAEDETEPSMKGKSNMSNTETSSEIQKPDYIHVRARRGEATDRHSLAERARREKISKKMKCLQDIVPGCNKVTGKAGMLDEIINYVQSLQQQVEFLSMKLSVINPELECHIDDLSAKQFQAYFTGPPEGDSKQSIMADFRSFPLHQQGSLDYSVINSDHTTSLGAKDHTSSSWETHSQCLYNSLRTDSVSNFFSLK

SEQ ID NO: 103646 - DNA, 1136 bp, Arabidopsis thaliana
  misc_feature (1)..(1136): Ceres Seq. ID no. 13613258
  misc_feature (1)..(1136): Ortholog of  Ceres SEQ ID NO 13594828 as cited in SEQ ID NO 56431
  misc_feature (1)..(1136): Ortholog of  Ceres SEQ ID NO 14316363 as cited in SEQ ID NO 57222
  misc_feature (1)..(1136): Ortholog of  Ceres SEQ ID NO 15177754 as cited in SEQ ID NO 57945
  misc_feature (1)..(1136): Ortholog of  Ceres SEQ ID NO 13594354 as cited in SEQ ID NO 58082
  misc_feature (1)..(1136): Ortholog of  Ceres SEQ ID NO 14316408 as cited in SEQ ID NO 58228
  misc_feature (1)..(1136): Ortholog of  Ceres SEQ ID NO 13528075 as cited in SEQ ID NO 60188
  misc_feature (1)..(1136): Ortholog of  Ceres SEQ ID NO 13664389 as cited in SEQ ID NO 60564
  misc_feature (1)..(1136): Ortholog of  Ceres SEQ ID NO 13600483 as cited in SEQ ID NO 0
gttttcatttatttaaattttaaattaatccaactttatcgttgacggaaaatttgggagagaatattctcgatggggaaaggaggaggttgtgttccgagcaagaagaagaagccggccaccaccggcgatggtcccggaatcgatgatgataacgacgctactaatgctccgatccaaattgacgatgatcaaaccaccattgacggcgatcgaacaacggcgacgaatactggaggaacaacaacaccagcgattactactacggctgctaagatctcgtcaccgctcaagatcttcgtcgtgttctattcgatgtacggacatgtggagagcttagcgaagaggatgaaaaagggagtggatagcgtcgaaggagtggaggcgacgttgtacagagttccggagacgctttcgcaggaggttgttgagcagatgaaggcgccggttaaggatttggagattccggagattacggcggcggaattgacggcggctgatggatttctgtttggatttccgactaggtatggttgtatggctgcgcagatgaaggcgttttttgattcgacgggatcattgtggaaggagcagagtcttgctggtaagcctgctggattctttgtgagcactggcactcaaggaggtggccaagagaccactgcatggacagcaatcacacagcttgtgcaccatgggatgctatttgtaccaataggctacacatttggagctggaatgttcaagatggactcgatacgtggaggctctccttatggagcaggtgtgttcgctggtgatgggtcaagagaagcaacagaaacagaattggctcttgctgaacatcaaggaaactacatggctgcaatagtcaaaagacttgctcaaccttaaaacaaaaacaaaaattgcttcctctatttgtctcttttcattcaattcctcctcctgctaaataatcataaaaaaaaaaatcttcctttcttttctcaattccatcgaaatttctttcttttctttatgagtgttttcagtttcgccattaatggttagtgtgtacatgtttctttatattatttgtctcttatttattccttgttgtaaaataaaaacaaaatttcattacgtgttctttc

SEQ ID NO: 103647 - protein, 273 aa, Arabidopsis thaliana
  peptide (1)..(273): Ceres Seq. ID no. 13613259
MGKGGGCVPSKKKKPATTGDGPGIDDDNDATNAPIQIDDDQTTIDGDRTTATNTGGTTTPAITTTAAKISSPLKIFVVFYSMYGHVESLAKRMKKGVDSVEGVEATLYRVPETLSQEVVEQMKAPVKDLEIPEITAAELTAADGFLFGFPTRYGCMAAQMKAFFDSTGSLWKEQSLAGKPAGFFVSTGTQGGGQETTAWTAITQLVHHGMLFVPIGYTFGAGMFKMDSIRGGSPYGAGVFAGDGSREATETELALAEHQGNYMAAIVKRLAQP

SEQ ID NO: 103648 - protein, 192 aa, Arabidopsis thaliana
  peptide (1)..(192): Ceres Seq. ID no. 13613260
MYGHVESLAKRMKKGVDSVEGVEATLYRVPETLSQEVVEQMKAPVKDLEIPEITAAELTAADGFLFGFPTRYGCMAAQMKAFFDSTGSLWKEQSLAGKPAGFFVSTGTQGGGQETTAWTAITQLVHHGMLFVPIGYTFGAGMFKMDSIRGGSPYGAGVFAGDGSREATETELALAEHQGNYMAAIVKRLAQP

SEQ ID NO: 103649 - protein, 181 aa, Arabidopsis thaliana
  peptide (1)..(181): Ceres Seq. ID no. 13613261
MKKGVDSVEGVEATLYRVPETLSQEVVEQMKAPVKDLEIPEITAAELTAADGFLFGFPTRYGCMAAQMKAFFDSTGSLWKEQSLAGKPAGFFVSTGTQGGGQETTAWTAITQLVHHGMLFVPIGYTFGAGMFKMDSIRGGSPYGAGVFAGDGSREATETELALAEHQGNYMAAIVKRLAQP

SEQ ID NO: 103650 - DNA, 1260 bp, Arabidopsis thaliana
  misc_feature (1)..(1260): Ceres Seq. ID no. 13613274
  misc_feature (1)..(1260): Ortholog of  Ceres SEQ ID NO 13595509 as cited in SEQ ID NO 59833
ataataaaattcaattccataaatatttttttttttgttctttcctctgactggaaaaagcttcctcagatcgtttcatcgtccaagcggaagaagcgtctccttcaatcaccgtggacacctccgagactgtctccgattgaatgggaattgaagacatgcattcaaaatctgacagtggtgggaacaaggttgattcagaggttcatggtacagtatcgtcgtcgataaatagtttaaacccttggcatcgtgctgctgctgcttgcaatgcaaattctagtgtggaagctggagataaatcttctaagtcaatagcattagcattggaatcaaacggttccaaatcaccatccaatagagataatactgttaacaaggaatcacaagtcacaacgtctccacaatcagctggagattatagtgataaaaaccaagaatctctgcatcatggcatcacacaacctcctcctcaccctcaacttgttggccacacagttggatgggcatcctcaaatccataccaggatccatattatgcaggagtgatgggagcctatggacatcatcccctggggtttgttccatatggtgggatgcctcattcaagaatgccactgccgcctgagatggcacaagaaccagttttcgtgaatgctaaacagtaccaggcgattctgaggcgaaggcaggcacgcgccaaggcagagctagagaagaagctaataaaatccagaaagccttatctacatgaatctcggcatcaacatgctatgaggaggccaaggggtactggaggacggtttgcaaagaaaaccaacaccgaagcttcaaagcgtaaagctgaagaaaagagcaatggtcatgttactcagtccccgtcatcatctaattctgatcaaggtgaagcttggaatggtgactatagaacacctcagggagatgagatgcagagctcagcttataagagaagggaagaaggagagtgttcagggcagcaatggaacagcctttcctcaaaccatccttctcaagctcgtctagccattaaatgacctcacaaggcggcaattcattcttggctttctctttgttggcttattcggtagcagccatgaaagagtattttctctcgtttttttttcttctgattttgtacaaatactttttgtagctttttgtgactttttccctttcagtttggaatacttcagatgttgccacttttctttttcaattctatcttaactaaacatttct

SEQ ID NO: 103651 - protein, 303 aa, Arabidopsis thaliana [sequence omitted]

SEQ ID NO: 103652 - protein, 298 aa, Arabidopsis thaliana; identical to SEQ ID NO: 24145
  peptide (1)..(298): Ceres Seq. ID no. 13613276

SEQ ID NO: 103653 - protein, 168 aa, Arabidopsis thaliana; identical to SEQ ID NO: 24146
  peptide (1)..(168): Ceres Seq. ID no. 13613277

SEQ ID NO: 103654 - DNA, 2143 bp, Arabidopsis thaliana
  misc_feature (1)..(2143): Ceres Seq. ID no. 13613301
  misc_feature (1)..(2143): Ortholog of  Ceres SEQ ID NO 12613725 as cited in SEQ ID NO 68196
atctctcttcacatgcccatttgaatcgtatctcctctcatttcttcttttgttttgttggagttagataaaatcaaaggtctaataaaagtgtcaaaacccttatcgctataacctccactaccatcttaaacttctccttataactcacgcttctctgctttcttctctcagagtctaactgctcaaataagaaaatggttcatgtgtcatcatctcatggagccaaagatggctctgaagaagcctatgattacagaggaaacccaccagataagtctaaaaccggtggatggttaggcgccggtttaattttagggagcgagctatcagagagaatatgcgtgatgggcatatcaatgaatctagtgacgtaccttgttggagatttacacatctcatcagctaaatcagcgaccatagtcaccaacttcatgggaactcttaaccttctagggcttctcggtggttttttggctgacgctaaactcggtcgctacaagatggttgcaatctcagcttctgtcacagctctgggagtgttgcttttgacggtggctacaactatctcaagcatgagaccaccaatatgtgacgatttcaggagacttcatcatcagtgcatagaagcaaacggacaccagttggctcttctctatgttgctctctataccatagctctaggcggaggaggaatcaaatccaacgtctctggttttgggtctgaccagttcgatactagtgatcctaaagaagagaaacagatgattttcttcttcaacagattctatttctccatcagcgtcggctctctcttcgccgtgattgctcttgtttacgttcaggacaacgtcgggagaggctggggttacgggatctctgccgcgactatggtggttgcagccattgttttactctgcggaacgaaacggtaccgtttcaagaaacctaaaggaagcccttttacaacaatatggagggttggtttcttggcttggaagaaaagaaaggagagttaccctgcgcatccaagtcttttgaacggttatgacaacaccacggttccacacacagagatgcttaagtgtttagacaaagccgcaatttccaagaacgagagctctcctagctcgaaggacttcgaagagaaggatccgtggatcgtttcgactgttacacaagtcgaagaagtgaaactcgtgatgaaattggtaccgatttgggcaacgaacattcttttctggacgatttactcccaaatgacgactttcacggtcgaacaagcgacgtttatggaccgaaaactcggatctttcactgttcctgcaggctcttactctgctttcctcatactcacaattctcctcttcacttcccttaacgagagagtctttgttcctttaacaagaaggctcacaaaaaagcctcaaggaatcacaagcctacagagaatcggagtagggctagtattctcaatggctgcaatggctgtagccgcggttatagagaacgctagacgcgaggcagcggttaacaacgataagaaaataagcgcgttttggttggttccacaatatttcttagtcggtgcgggtgaggcctttgcttacgttggacagcttgagttctttataagagaagcaccagagaggatgaaatcgatgagcaccggattgtttctaagcacgatatcgatgggattcttcgtgagtagcttgcttgtttcgcttgttgatagggttacagacaaaagctggcttagaagtaaccttaacaaagcgagattgaactacttctactggttacttgttgtcttgggagcattgaacttcttgatttttattgtgtttgccatgaaacatcagtataaagctgatgtgattactgttgttgtgactgatgatgattcagtggagaaggaagtgacgaagaaagagagctctgaatttgagcttaaggacattccttgaaaccagatttagaagaagaaaaaaaacctctggttttgttatttgctttgaagatttcattttgtctttgtatttttagtatattgtgtgtatgaaatagaaagattactatatggtttggattgtatttttttttgtaagatttttaaaaatttagttactatagttttttc

SEQ ID NO: 103655 - protein, 590 aa, Arabidopsis thaliana; identical to SEQ ID NO: 39905
  peptide (1)..(590): Ceres Seq. ID no. 13613302

SEQ ID NO: 103656 - protein, 540 aa, Arabidopsis thaliana; identical to SEQ ID NO: 39906
  peptide (1)..(540): Ceres Seq. ID no. 13613303

SEQ ID NO: 103657 - protein, 536 aa, Arabidopsis thaliana; identical to SEQ ID NO: 39907
  peptide (1)..(536): Ceres Seq. ID no. 13613304

SEQ ID NO: 103658 - DNA, 1237 bp, Arabidopsis thaliana
  misc_feature (1)..(1237): Ceres Seq. ID no. 13613305
  misc_feature (1)..(1237): Ortholog of  Ceres SEQ ID NO 15175700 as cited in SEQ ID NO 58584
  misc_feature (1)..(1237): Ortholog of  Ceres SEQ ID NO 13596474 as cited in SEQ ID NO 62169
  misc_feature (1)..(1237): Ortholog of  Ceres SEQ ID NO 13596969 as cited in SEQ ID NO 63375
  misc_feature (1)..(1237): Ortholog of  Ceres SEQ ID NO 13597519 as cited in SEQ ID NO 64759
  misc_feature (1)..(1237): Ortholog of  Ceres SEQ ID NO 13597870 as cited in SEQ ID NO 64982
  misc_feature (1)..(1237): Ortholog of  Ceres SEQ ID NO 13656123 as cited in SEQ ID NO 65212
  misc_feature (1)..(1237): Ortholog of  Ceres SEQ ID NO 13595926 as cited in SEQ ID NO 67778
atcctgtctctcttcagtgacacaaacccaaagaaaagtagtgagaaacaaaatcgaggtaactactagatgaagacgatgacgcaattaaatattgcggttgtggttgtagtgacggttcttattggaatgttgagatcatcggaggctcaacttcaaatgaatttctacgcgaagagctgtccaaacgcagagaaaatcatttcagatcatattcaaaatcatatccacaatggtccttctcttgcagctcctctcatccgaatgcacttccatgattgcttcgttaggggatgtgacggatcggtgttgataaattcaacatctggtaacgcagagagagatgcaccaccgaatctaacacttagaggattcggtttcgtggaaaggattaaggctcttcttgaaaaagtgtgtcctaagactgtttcttgcgcagatatcattgctttgactgctagagacgcagttgtcgccaccggaggtccttcatggagtgttccaacgggtagaagagacggtaggatctcaaataagacggaggctactaataacattccacctccaacgagtaatttcacgactttacaacgacttttcaaaaaccaaggccttaatctcaaggaccttgttctgctctctggggctcacacgattggcgtctcacattgttcttccatgaatacgcgtctctacaacttctcgactacagtaaaacaagatccatctctcgatagccagtatgcagcaaatctaaaggctaacaaatgtaagagccttaacgacaatagcaccatcctcgagatggatcccggtagtagcagaagcttcgatctcagttattataggcttgtcttgaagaggagaggcttgtttcagtctgattctgcattaacaacgaactcagcgactttgaaggtgatcaacgacttggtcaacggttctgaaaagaagtttttcaaagcttttgctaagtcaatggagaagatggggagagttaaagtgaagactggctcagctggtgtgatcaggacacggtgttctgtcgctggaagttagtaagcttcagggtcggaatgtggtgtgttatggtcattgttgttttgtgtgactttcggaaaaaacaaatgttgttaatttaattttgttgttgtttgatttgtgtttatgcacccaagaatgatgtgttatggttcaattaatatgtgaatcatttaaatttacaataattcttatt

SEQ ID NO: 103659 - protein, 329 aa, Arabidopsis thaliana
  peptide (1)..(329): Ceres Seq. ID no. 13613306
MKTMTQLNIAVVVVVTVLIGMLRSSEAQLQMNFYAKSCPNAEKIISDHIQNHIHNGPSLAAPLIRMHFHDCFVRGCDGSVLINSTSGNAERDAPPNLTLRGFGFVERIKALLEKVCPKTVSCADIIALTARDAVVATGGPSWSVPTGRRDGRISNKTEATNNIPPPTSNFTTLQRLFKNQGLNLKDLVLLSGAHTIGVSHCSSMNTRLYNFSTTVKQDPSLDSQYAANLKANKCKSLNDNSTILEMDPGSSRSFDLSYYRLVLKRRGLFQSDSALTTNSATLKVINDLVNGSEKKFFKAFAKSMEKMGRVKVKTGSAGVIRTRCSVAGS

SEQ ID NO: 103660 - protein, 326 aa, Arabidopsis thaliana
  peptide (1)..(326): Ceres Seq. ID no. 13613307
MTQLNIAVVVVVTVLIGMLRSSEAQLQMNFYAKSCPNAEKIISDHIQNHIHNGPSLAAPLIRMHFHDCFVRGCDGSVLINSTSGNAERDAPPNLTLRGFGFVERIKALLEKVCPKTVSCADIIALTARDAVVATGGPSWSVPTGRRDGRISNKTEATNNIPPPTSNFTTLQRLFKNQGLNLKDLVLLSGAHTIGVSHCSSMNTRLYNFSTTVKQDPSLDSQYAANLKANKCKSLNDNSTILEMDPGSSRSFDLSYYRLVLKRRGLFQSDSALTTNSATLKVINDLVNGSEKKFFKAFAKSMEKMGRVKVKTGSAGVIRTRCSVAGS

SEQ ID NO: 103661 - protein, 309 aa, Arabidopsis thaliana
  peptide (1)..(309): Ceres Seq. ID no. 13613308
MLRSSEAQLQMNFYAKSCPNAEKIISDHIQNHIHNGPSLAAPLIRMHFHDCFVRGCDGSVLINSTSGNAERDAPPNLTLRGFGFVERIKALLEKVCPKTVSCADIIALTARDAVVATGGPSWSVPTGRRDGRISNKTEATNNIPPPTSNFTTLQRLFKNQGLNLKDLVLLSGAHTIGVSHCSSMNTRLYNFSTTVKQDPSLDSQYAANLKANKCKSLNDNSTILEMDPGSSRSFDLSYYRLVLKRRGLFQSDSALTTNSATLKVINDLVNGSEKKFFKAFAKSMEKMGRVKVKTGSAGVIRTRCSVAGS

SEQ ID NO: 103662 - DNA, 1191 bp, Arabidopsis thaliana
  misc_feature (1)..(1191): Ceres Seq. ID no. 13613309
  misc_feature (1)..(1191): Ortholog of  Ceres SEQ ID NO 15227018 as cited in SEQ ID NO 0
gatatcttatcaaaaactcgctctccatccaacaaaacccgaagaaagagagattcagactcaaatctctcagtaggaatggcaagtgaaacagagaacatcaagtatgaagagagtttcatcaagaacactcgaggaatgaaactgttcacgtgcaaatgggtaccagcaaagcaagagccaaaggctttagtctttatttgccatggatatgcaatggaatgtagcatcaccatgaacagtactgcgaggaggctggtgaaagcaggatttgcggtatatggaattgattacgaagggcatggaaaatctgatgggcttagtgcttatgtcccaaactttgaccatctcgttgatgatgtctctactcactacacaagcatttgcgagaaagaagagaataaagggaagatgaggttcttgttaggagaatcaatgggaggagcagtgcttttgttgttacacagaaagaagcctcagttttgggatggggctgtcttggttgctccaatgtgtaagattgctgaagaaatgaaaccaagccctttggtaatttcgatattggccaaacttagtggagtgataccttcgtggaaaatcatccctggccaagatatcattgagactgcttttaagcagccagaaatcaggaaacaggttagggaaaatccctactgctacaagggacgtccacgtttgaagactgcttatgagcttttgagggttagcaccgatctcgagaagaggcttaatgaggtttcattaccgttcatagttttgcacggtgaagacgataaagtcacagataaagcggtgagtcgacaactgtatgaagttgcatctagttcggacaagactttcaagttgtaccctgggatgtggcatggtttactctatggagagacaccagagaatatcgagactgtttttgctgacatcattggctggttggataagaaagttgctgatgaaagtggaggctttgaatccgagcttaaacgtaaaaatgatggtattcctttgaaagggtagttatcactttaacataaacaaataaaggatagttaaaatctgtttgtctgtttgtttttctctcttttcctgaattctgtttatgttaattagttgttaccatgtttgtcactctctgacttagtgtaatactatttaataatttatggatttgatttc

SEQ ID NO: 103663 - protein, 343 aa, Arabidopsis thaliana
  peptide (1)..(343): Ceres Seq. ID no. 13613310
DILSKTRSPSNKTRRKRDSDSNLSVGMASETENIKYEESFIKNTRGMKLFTCKWVPAKQEPKALVFICHGYAMECSITMNSTARRLVKAGFAVYGIDYEGHGKSDGLSAYVPNFDHLVDDVSTHYTSICEKEENKGKMRFLLGESMGGAVLLLLHRKKPQFWDGAVLVAPMCKIAEEMKPSPLVISILAKLSGVIPSWKIIPGQDIIETAFKQPEIRKQVRENPYCYKGRPRLKTAYELLRVSTDLEKRLNEVSLPFIVLHGEDDKVTDKAVSRQLYEVASSSDKTFKLYPGMWHGLLYGETPENIETVFADIIGWLDKKVADESGGFESELKRKNDGIPLKG

SEQ ID NO: 103664 - protein, 317 aa, Arabidopsis thaliana
  peptide (1)..(317): Ceres Seq. ID no. 13613311
MASETENIKYEESFIKNTRGMKLFTCKWVPAKQEPKALVFICHGYAMECSITMNSTARRLVKAGFAVYGIDYEGHGKSDGLSAYVPNFDHLVDDVSTHYTSICEKEENKGKMRFLLGESMGGAVLLLLHRKKPQFWDGAVLVAPMCKIAEEMKPSPLVISILAKLSGVIPSWKIIPGQDIIETAFKQPEIRKQVRENPYCYKGRPRLKTAYELLRVSTDLEKRLNEVSLPFIVLHGEDDKVTDKAVSRQLYEVASSSDKTFKLYPGMWHGLLYGETPENIETVFADIIGWLDKKVADESGGFESELKRKNDGIPLKG

SEQ ID NO: 103665 - protein, 297 aa, Arabidopsis thaliana
  peptide (1)..(297): Ceres Seq. ID no. 13613312
MKLFTCKWVPAKQEPKALVFICHGYAMECSITMNSTARRLVKAGFAVYGIDYEGHGKSDGLSAYVPNFDHLVDDVSTHYTSICEKEENKGKMRFLLGESMGGAVLLLLHRKKPQFWDGAVLVAPMCKIAEEMKPSPLVISILAKLSGVIPSWKIIPGQDIIETAFKQPEIRKQVRENPYCYKGRPRLKTAYELLRVSTDLEKRLNEVSLPFIVLHGEDDKVTDKAVSRQLYEVASSSDKTFKLYPGMWHGLLYGETPENIETVFADIIGWLDKKVADESGGFESELKRKNDGIPLKG

SEQ ID NO: 103666 - DNA, 1611 bp, Arabidopsis thaliana
  misc_feature (1)..(1611): Ceres Seq. ID no. 13613323
  misc_feature (1)..(1611): Ortholog of  Ceres SEQ ID NO 14303866 as cited in SEQ ID NO 53689
  misc_feature (1)..(1611): Ortholog of  Ceres SEQ ID NO 14315958 as cited in SEQ ID NO 59979
  misc_feature (1)..(1611): Ortholog of  Ceres SEQ ID NO 13597037 as cited in SEQ ID NO 69005
aaattaaaagtcaatcatatcaaatcccaaatcctcccagatgtttttatcatcttcttcttcctgaagatttgatttcattttcctctctttcagatccctattctcatggcttctggatcttactggtgctatagttgtagccgattcgtttgggtttccgattcaatctcttgccctgattgcgacggtggtttcctcgaactcatccaagagcctctcgatttcacaccttccgattccttcaccaccaccaccaccactcaacatcgcagccccactcgcttccctcctccttcttcttcttcctccaccccatccgcttctatgcacgccgataacagtcccactcctaccatcgttactcgtacacgaagcaatcgatctcctaatccagttattgttctccgtggatctgctgctgctccttcttctgatgttgtttccgaaggtttagatcgatctgcttttcagatgtattacgatgatggtactgattctggtcttagacctttaccaccgagtatgactgagtttttgttaggttctggatttgatcgtttgttagatcagatttctcagatcgagcttaacaccaatcggaatcttcgttcttgtgaacatccaccggcttctaaatcggccattgaagctttgcctctgattgaaatcgatccgactcatctcttatcggattctcaatctcattgcgctgtttgcaaagagaatttcgttttgaaatcatctgctcgcgagatgccttgtaatcacatctatcatcctgattgtattcttccttggcttgcgattcgtaactcttgtccggtttgccgtcatgagctaccggcggaggatctcaccgacggaaccggtgctgctttgactgctgttaccgctactgcagaggaagaggaagactcagctgcggggttaacgatttggaggttaccaggtggaggattcgctgtagggagaatccctggtggttggagaggtggagatagaatgatgccggtggtttacacggaggttgatggtggtagactcggtgatgagagacttccgagaagagtagcttggggttcgagaagaggtggaagagatggtggaggtagtagagagagaggtggtggctttgcgggtcggatcatgaggcttttcggatgttttagtggatcatctggatccattgctgctgctgctgctgcatcatccgggtccgggtccagaattcgggttactcgtagaaccaggtcgttctctatgttcagtacggcgtcgtcttcgtcaaggagacgaaattggctagcgtgattactagaattaccaagctctcttctcaggtgaaaactaaacacgaaagaacacactcttcttctgtttaaatttttcctatgttccttattaagtttttgtctatttcagtgtaatgattatattcattcctaaaatttgaatctatgcgagtaaattgatacaaaattaggtgacatagtgtcttcagtggcaaatttaggaggatatgttactgtgagtctgtgactagataagtgagagtgtagatgaattgaagaatgtactctgaaggagattcatagttgttctatttgt

SEQ ID NO: 103667 - protein, 401 aa, Arabidopsis thaliana; identical to SEQ ID NO: 36705
  peptide (1)..(401): Ceres Seq. ID no. 13613324

SEQ ID NO: 103668 - protein, 328 aa, Arabidopsis thaliana; identical to SEQ ID NO: 36706
  peptide (1)..(328): Ceres Seq. ID no. 13613325

SEQ ID NO: 103669 - protein, 279 aa, Arabidopsis thaliana; identical to SEQ ID NO: 36707
  peptide (1)..(279): Ceres Seq. ID no. 13613326

SEQ ID NO: 103670 - DNA, 1478 bp, Arabidopsis thaliana
  misc_feature (1)..(1478): Ceres Seq. ID no. 13613331
  misc_feature (1)..(1478): Ortholog of  Ceres SEQ ID NO 13595142 as cited in SEQ ID NO 56671
  misc_feature (1)..(1478): Ortholog of  Ceres SEQ ID NO 15168569 as cited in SEQ ID NO 58123
  misc_feature (1)..(1478): Ortholog of  Ceres SEQ ID NO 15226382 as cited in SEQ ID NO 63295
  misc_feature (1)..(1478): Ortholog of  Ceres SEQ ID NO 13598460 as cited in SEQ ID NO 63382
  misc_feature (1)..(1478): Ortholog of  Ceres SEQ ID NO 13597403 as cited in SEQ ID NO 64085
tttcccccaaattctcataattttcacaaacaacctctcgtcttctaggttaatccaatttcgtcgattcatgaagttcacaattctcccatcggaaaattcttcgtaatcgacgacgaagagatcatgagtaccgtcggaggtatagagcagttgatacctgattccgtttcaacgtcgttcatcgaaacggtgaacggttcgcaccagttcacgattcaaggttactctctagccaaaggcatgagccctgggaagtttatacagagcgatatcttctccgttggtggatacgattgggcgatttacttctatcctgatgggaagaacccggaggaccagtcctcgtatatctctttgttcatcgctttagcgagtgattctaatgatattagggctttgtttgagcttacgcttatggatcagagtgggaaagggaaacataaggtgcatagtcactttgatcgggcgcttgaaggtggtccttatacacttaagtataaaggaagcatgtggggttacaaacgctttttcaaacgatcagctttagaaacctctgactacttaaaggatgattgtcttgtcatcaattgtactgttggcgttgttagagcccgactcgagggtccaaaacagtatggcattgtgctacccctgtcgaatatgggtcagggattgaaagacttgttagattctgaagttggttgtgacatagctttccaagtcggagatgaaacatacaaagctcacaaactgattctcgcggcacgctccccagtttttagagctcagttttttggaccaattgggaataacaatgtggatagaatagtgatagacgacatcgaaccttctatcttcaaggctatgcttagcttcatttacaccgatgtacttcctaatgtgcatgaaattaccgggtcaacttctgccagttcgtttacaaacatgatacaacatctcttggcagctgctgacctctatgaccttgcaaggttaaagatattatgtgaagttttgctatgcgaaaaacttgatgttgataatgtggcaacaacacttgcgttggctgaacagcaccaattcttacagctcaaagcgttctgcttagaatttgttgcatctccagcaaacttgggagctgtaatgaagtccgaagggttcaagcacttgaaacagagctgtcccactttgttatctgagttgctgaacactgttgcagcagcagataagagctcgacgagtggacaatcaaacaagaaaagaagtgcgagcagtgtattagggtgtgacactacaaatgtgaggcaattgaggaggagaacacgaaaagaagtgcgagcagtgtcttaggatcattacataccgtatgcaaaattctagaattatgcattgtgtttcaagcagagtttatgaattccaagtcatcccgtgaacttttttaccagtgagaattatagaggcctgaactctgaacc

SEQ ID NO: 103671 - protein, 408 aa, Arabidopsis thaliana; identical to SEQ ID NO: 28014
  peptide (1)..(408): Ceres Seq. ID no. 13613332

SEQ ID NO: 103672 - protein, 369 aa, Arabidopsis thaliana; identical to SEQ ID NO: 28015
  peptide (1)..(369): Ceres Seq. ID no. 13613333

SEQ ID NO: 103673 - protein, 311 aa, Arabidopsis thaliana; identical to SEQ ID NO: 28016
  peptide (1)..(311): Ceres Seq. ID no. 13613334

SEQ ID NO: 103674 - DNA, 1240 bp, Arabidopsis thaliana
  misc_feature (1)..(1240): Ceres Seq. ID no. 13613346
  misc_feature (1)..(1240): Ortholog of  Ceres SEQ ID NO 12609146 as cited in SEQ ID NO 52118
  misc_feature (1)..(1240): Ortholog of  Ceres SEQ ID NO 13594056 as cited in SEQ ID NO 55691
  misc_feature (1)..(1240): Ortholog of  Ceres SEQ ID NO 13638136 as cited in SEQ ID NO 58644
  misc_feature (1)..(1240): Ortholog of  Ceres SEQ ID NO 13596868 as cited in SEQ ID NO 62806
  misc_feature (1)..(1240): Ortholog of  Ceres SEQ ID NO 12587035 as cited in SEQ ID NO 63605
  misc_feature (1)..(1240): Ortholog of  Ceres SEQ ID NO 14301886 as cited in SEQ ID NO 64201
  misc_feature (1)..(1240): Ortholog of  Ceres SEQ ID NO 13595885 as cited in SEQ ID NO 69265
  misc_feature (1)..(1240): Ortholog of  Ceres SEQ ID NO 12566239 as cited in SEQ ID NO 0
  misc_feature (1)..(1240): Ortholog of  Ceres SEQ ID NO 13599119 as cited in SEQ ID NO 0
  misc_feature (1)..(1240): Ortholog of  Ceres SEQ ID NO 15179992 as cited in SEQ ID NO 0
aaagaaataaagtaatgaagaaaactagaaatgttgcttcttctcctattgaatgtgtccacctccagaccaaacccaccaccactcttgttcggtctttcttcttcttcctcttcaactctcaaacaatctcttcctttatcatcttctatctcttcctctgttccttcttctggttttgccaatcaccaaacctgactaacccttctcctcctcctctctccgtcgctccccttcgcggggatgccaattctccaccgccggaatcttcttcttctccggcgacgaaatcttctttaatgatttcttctagagatcccaatgccctctttagcggcggtggaatcagctttttagcaggagttagaactgtgaagtttagttatggttattctagtcttaaaggtaaaagagcaacaatggaggattacttcgaaactagaatctctgatgttaatggacaaatggttgctttctttggtgtctttgatggtcatggtggagcaagaactgcagaatatcttaaaaacaatcttttcaagaatttagttagtcatgatgattttatctcagacactaagaaagctattgttgaagtttttaagcagacagatgaagagtatcttattgaagaggcaggacaaccgaagaatgctggctcgactgctgcgactgcttttcttataggtgataagttgattgttgctaacgttggtgattctagagttgtagcgtcaagaaatggttcagctgttccactctctgatgatcataaacctgatagatcagatgagcgacaacggattgaagatgctggtggctttattatttgggctggaacatggcgagttggtggaattcttgcggtctctcgggcttttggagataagcaacttaagccatatgtgattgcggagccagaaattcaggaggaggatataagcacattggagtttattgttgttgctagtgatggactgtggaatgtgttgtcaaacaaggatgccgtggcaatagtacgagacatttcagatgcggaaacagcagcaagaaagcttgtgcaagaaggttacgcacggggtagctgcgacaatatcacttgcattgttgtacgattcgaggtttcttgagcaagaaccaaattcatattgttcttgttctatgaatgtaccatcttcagctgttgaatacactaacatatttgggttatacaattttataaaagaaagatatatttatg

SEQ ID NO: 103675 - protein, 375 aa, Arabidopsis thaliana; identical to SEQ ID NO: 23002
  peptide (1)..(375): Ceres Seq. ID no. 13613347

SEQ ID NO: 103676 - protein, 371 aa, Arabidopsis thaliana; identical to SEQ ID NO: 23003
  peptide (1)..(371): Ceres Seq. ID no. 13613348

SEQ ID NO: 103677 - protein, 276 aa, Arabidopsis thaliana; identical to SEQ ID NO: 23004
  peptide (1)..(276): Ceres Seq. ID no. 13613349

SEQ ID NO: 103678 - DNA, 2019 bp, Arabidopsis thaliana
  misc_feature (1)..(2019): Ceres Seq. ID no. 13613350
  misc_feature (1)..(2019): Ortholog of  Ceres SEQ ID NO 12593464 as cited in SEQ ID NO 69039
atcctctctcttcactcagcatccttttataaccaaaacaaactttatctccctctctctctctcacagacaagaacacaaagttatggacaatctccggaaacttaatcttctctctgtctctctaaccataatctttgtctctcttaccatagccaccaacttacctttctttgaagtgaaatatcccaacaacaacccttttgggatgttactacggccgacaccgatcaagaaccaatccttgggtctaccggctcatgtcgggtcagatgagtgtcgggtttggaccaaagcatgttctgatgagattcttaggctgacttatcagccggataacgttgcgtggcttaaacgcgttaggaggacgatccatgagaacccggagctagcgtttgaggagtatgagactagtaggcttattaggtcggagctggaccgtatgggtatcatgtatagatatccgttagcgaaaacgggtattcgggcttggatcggatccggtggaccgccttttgttgcggttcgggctgatatggacgcactacctattcaggaagcagttgaatgggaacatataagcaaagttgcaggcaaaatgcatgcatgtggtcatgacgcacatgtgactatgcttcttggtgctgcccatattcttaaggctcgtgaacatcttctcaagggaacagtggttctgttattccaaccggctgaagaagctggaaatggtgcaaagaatatgatcgaagacggagctttggatgacgtggaggctatcttcgcggtccatgtgtcccatatccatccaacgggtgtgattggatcaagaagtggtcctttgctcgcgggatgtggaattttccgggcggttatcacttcggaagatagccgtggcgccgctaatctccttcttgcagcttcttccgcggtcattagtcttcaaggcattgtatcccgtgaagctagtcctcttgactctcaggttgtgtcggttacttcatttgatggcggtcatagtctcgatgtggcgccggacacggtggtcctcggtggtactttcagagctttttctaactcaagcttctactacctcaagaaacgtattcaagaggtactcatggatcaggtcggggttttcggttgccaagcgacagtgaacttctttgagaagcagaatgcgatatacccgccaactacgaacaatgatgcaacatacaatcacttgaagaaagtcaccatagatttgctcggagatagccatttcaccttggctccacagatgatgggagccgaagatttcgccttctactcagaaatcatcccagccgctttctacttcattggcataagaaatgaagaactcggatcagtccacattgctcattcaccacatttcatgatcgatgaagatagtttacccgttggagccgcggttcatgccgccgtggctgagagatacttaaatgataaacattcataagagtaaaaacaatctccccggcttttttttgggtggttatatttctaggcgttacggaaattatattgttcttaatctatctttgcttggaaatgtttgtgaagagtagtttttttttttaaacgtgtaaaccgcatattgcatatggtgtatggattttagctaaagaggttagagtaaaagatagctagcggtacaaaatcttagacaactattttcttgatatcatgaaatatttggacgtttgagtatttgctacgaaattgtattaccatgtgattattaaggtttatattgacaacagaggtttcatatgtgattattagcttgtaagtgaaacaaagaaaagtaacgtcaattgaagataactgcaaggttgacaatttccaaagtccaagaagaaaattacggaatccgaaagcatacaaacgaggaagattttcaagattttaggtcataattttcttggttcgtgtgggatattaatttttgggtactttctaaggattgataaactataatatctctttttagcatct

SEQ ID NO: 103679 - protein, 492 aa, Arabidopsis thaliana; identical to SEQ ID NO: 21893
  peptide (1)..(492): Ceres Seq. ID no. 13613351

SEQ ID NO: 103680 - protein, 464 aa, Arabidopsis thaliana; identical to SEQ ID NO: 21894
  peptide (1)..(464): Ceres Seq. ID no. 13613352

SEQ ID NO: 103681 - protein, 423 aa, Arabidopsis thaliana; identical to SEQ ID NO: 21895
  peptide (1)..(423): Ceres Seq. ID no. 13613353

SEQ ID NO: 103682 - DNA, 1090 bp, Arabidopsis thaliana
  misc_feature (1)..(1090): Ceres Seq. ID no. 13613358
  misc_feature (1)..(1090): Ortholog of  Ceres SEQ ID NO 13585461 as cited in SEQ ID NO 69106
aaacgacaagtagtttcctttagaatttatcattatccagattttcgagaaggagacggtgaagaagaagaagaagatcaaaaccatgacgagtcaccacgcgatcgaagtgacgaagacggtgctggaagtagccgacgtagcatggaccgcggtggaaacttaccatcaccaccaccaccaccaagacgaaaatcacgagtcaacgaatccaatttctgatccacgagatcgtgaattagaagctcttcgtcaagagaatcgtcgtctcaggactttgcttgaatcgaatcttaaactctttgagactctcgctgaatctgctgcgttctctcatgattgccctagcgacctctatgctaggcttgtaacgatggttacttcaagagatttcttggctagattagagaatctaagacaagctttatctaatggaactcagaatcaatttccattcaaggaaccaacagaagatgatgtgaagactgttgaagttcttatagagatggatcatcaagagccaagttggtgggttttagttactgatgatatggttcctagtaatgtcgaggaacaaagcgcgatcgataacgaacattacattgttgtgaatgaagaacatgtgattgatgctgttgctcactttttggctaaatgtattatgtcaaatcccaaagctaagaatctcaaacctgaagagcttcagaaacttttggtgcaagaagttactgctctgagcaaggtagggaaggtagtggatatatggcatgctgggaaaatgttctacacactgtccacttggggacttgcatttggagggttataccaagctcgtggtgtgctgaagatagctgctaagggtgttcatgcgaccagcaaggttgttcttagggctctttgaaagttataagaggtctatctaatactatctttgggtttgtctttctgtgcgagactctgtttttaaattaatagcattgcgtgtgtaaatagtgtaaatagggtttgatcaatgttgtatttcatattgatttcaaattcgacatttgttctttgattctcgtttataaacgcagacaatttgtgaata

SEQ ID NO: 103683 - protein, 271 aa, Arabidopsis thaliana
  peptide (1)..(271): Ceres Seq. ID no. 13613359
MTSHHAIEVTKTVLEVADVAWTAVETYHHHHHHQDENHESTNPISDPRDRELEALRQENRRLRTLLESNLKLFETLAESAAFSHDCPSDLYARLVTMVTSRDFLARLENLRQALSNGTQNQFPFKEPTEDDVKTVEVLIEMDHQEPSWWVLVTDDMVPSNVEEQSAIDNEHYIVVNEEHVIDAVAHFLAKCIMSNPKAKNLKPEELQKLLVQEVTALSKVGKVVDIWHAGKMFYTLSTWGLAFGGLYQARGVLKIAAKGVHATSKVVLRAL

SEQ ID NO: 103684 - protein, 175 aa, Arabidopsis thaliana
  peptide (1)..(175): Ceres Seq. ID no. 13613360
MVTSRDFLARLENLRQALSNGTQNQFPFKEPTEDDVKTVEVLIEMDHQEPSWWVLVTDDMVPSNVEEQSAIDNEHYIVVNEEHVIDAVAHFLAKCIMSNPKAKNLKPEELQKLLVQEVTALSKVGKVVDIWHAGKMFYTLSTWGLAFGGLYQARGVLKIAAKGVHATSKVVLRAL

SEQ ID NO: 103685 - DNA, 808 bp, Arabidopsis thaliana
  misc_feature (1)..(808): Ceres Seq. ID no. 13613361
  misc_feature (1)..(808): Ortholog of  Ceres SEQ ID NO 14308225 as cited in SEQ ID NO 59062
  misc_feature (1)..(808): Ortholog of  Ceres SEQ ID NO 15176615 as cited in SEQ ID NO 0
aaacatgtggtaattggttcatttatccttctttctttcttctccaatcggatctctcactttctctacatcaccggtaaaaatggcgatgtgggtattcgggtacggatctttaatatggaaaacgggttttcctttcgacgaaagcctccctggtttcattaaaggctatcgccgtgtcttccatcaaggtagtactgatcatagaggaactccggattttccgggaagaacagtgacattagaagctgctcatgaagaagtttgttgtggagttgcttacaagataactaaagaggaagataaaagagatgctttattgcatttggaagtgagggagaagcaatatgatcagaaagagtatcttgatttcttcactgactctaatgcttcggaaccggctgtggcaggagtaatggtgtacatagcttcacctgacaagaagagcaacaacaactacttaggaccagctcctcttgaagatattgccaaacagatagttaaagcgaaaggaccttcagggccaaacagagactatctcttcaacctcgaagaggctcttgctcaactcgggtttaaagataaacatgtcacagatcttgcaaaccaagttaggcacattctttcagaatccgaagagttagacattgatgccaccgccgccaccgccaacaatgtctagattcacagcttcttttcgatttatccgaaaagaacaaaacccaatttttaagagatgcattttgcatcccccaattgaatctgttatcactatcaatcaactctcttctttatcatatttgatcac

SEQ ID NO: 103686 - protein, 199 aa, Arabidopsis thaliana
  peptide (1)..(199): Ceres Seq. ID no. 13613362
MAMWVFGYGSLIWKTGFPFDESLPGFIKGYRRVFHQGSTDHRGTPDFPGRTVTLEAAHEEVCCGVAYKITKEEDKRDALLHLEVREKQYDQKEYLDFFTDSNASEPAVAGVMVYIASPDKKSNNNYLGPAPLEDIAKQIVKAKGPSGPNRDYLFNLEEALAQLGFKDKHVTDLANQVRHILSESEELDIDATAATANNV

SEQ ID NO: 103687 - protein, 197 aa, Arabidopsis thaliana
  peptide (1)..(197): Ceres Seq. ID no. 13613363
MWVFGYGSLIWKTGFPFDESLPGFIKGYRRVFHQGSTDHRGTPDFPGRTVTLEAAHEEVCCGVAYKITKEEDKRDALLHLEVREKQYDQKEYLDFFTDSNASEPAVAGVMVYIASPDKKSNNNYLGPAPLEDIAKQIVKAKGPSGPNRDYLFNLEEALAQLGFKDKHVTDLANQVRHILSESEELDIDATAATANNV

SEQ ID NO: 103688 - DNA, 1477 bp, Arabidopsis thaliana
  misc_feature (1)..(1477): Ceres Seq. ID no. 13613364
  misc_feature (1)..(1477): Ortholog of  Ceres SEQ ID NO 13595351 as cited in SEQ ID NO 55934
  misc_feature (1)..(1477): Ortholog of  Ceres SEQ ID NO 13595513 as cited in SEQ ID NO 56663
  misc_feature (1)..(1477): Ortholog of  Ceres SEQ ID NO 13639645 as cited in SEQ ID NO 57488
ctgcctcaaacaaatagagcttatctcatcactcaccaaacaactctcatcaatataaagagaagagagtggtagagttatatattacacacataaacttagatatagtagtgttatattcttgattaagtaataaagatgaaaggtggaagcatggagaaaattaagccgatattggcgataatttcactgcaatttgggtatgcaggcatgtacatcatcaccatggtctcgttcaaacatggcatggaccattgggttcttgctacataccgtcatgtcgtagccacggttgtcatggctccctttgctctcatgttcgagaggaaaattaggcccaagatgacactagcaatattctggaggcttcttgctcttggaatattagagcccctcatggaccagaatttgtactacataggattgaaaaacacatcagcatcgtacacttctgcctttaccaatgcacttcccgccgtcaccttcattctcgccctcattttcaggcttgagacggtgaactttagaaaggtccacagtgttgcaaaagtggtaggaacggtaataacggttggaggagcaatgatcatgactttgtacaaaggtccggccattgagattgtgaaggccgcacataattctttccacggtggttcgagcagcacacccaccggccaacattgggtccttggaaccatagccattatgggcagtatctctacatgggctgctttcttcattttacagtcatacacattaaaagtctatccagctgagctatcactagtaacgttgatatgtgggatagggacgatcctaaacgctattgcttcgctaataatggttcgtgacccgagtgcatggaaaatcggcatggattcagggacactcgccgcggtttactctggagtggtttgttcgggaatagcttattacatacaaagcattgtgattaagcaacgtggaccggtttttacgacgtcgtttagtcctatgtgtatgatcatcactgccttcctcggtgcattggttttggctgagaaaatccatctcggaagcataatcggggcggttttcatagtgcttggactatacagtgtggtatggggtaaaagtaaagacgaagtgaatcctttggatgagaaaatcgtagccaagtcccaagagcttccgattactaacgtagtcaaacaaacgaacggtcacgatgtctcgggagcaccgactaacggtgtggttaccagtacctgatccaagtcccaaaagagaagaaagatacttaaacaaagatctcatctccatgcattggaggtggaagttttgattatctttcttgttgtttttgtgttttttcttttacattttctaatcgatctacgcttaacttttagtatctttttaccttatgtaatgattttctgcttctactttcttgtatttgaaatttccaaaacgaatgatgaatgcatcatttggt

SEQ ID NO: 103689 - protein, 370 aa, Arabidopsis thaliana; identical to SEQ ID NO: 42641
  peptide (1)..(370): Ceres Seq. ID no. 13613365

SEQ ID NO: 103690 - protein, 365 aa, Arabidopsis thaliana; identical to SEQ ID NO: 42642
  peptide (1)..(365): Ceres Seq. ID no. 13613366

SEQ ID NO: 103691 - protein, 346 aa, Arabidopsis thaliana; identical to SEQ ID NO: 42643
  peptide (1)..(346): Ceres Seq. ID no. 13613367

SEQ ID NO: 103692 - DNA, 1149 bp, Arabidopsis thaliana
  misc_feature (1)..(1149): Ceres Seq. ID no. 13613368
  misc_feature (1)..(1149): Ortholog of  Ceres SEQ ID NO 13655404 as cited in SEQ ID NO 63283
aaactttcgtcttctcaacaaaatctgcagttccttgctcctttctcagtccaaattctctgatttttgattttttcgattcaatgggtttcaccaaagatcagttgcttgatcgacttcaggaacttgagattgattattccaagtatgaacatccgcctgtactaaccgtcgaagaacaggccaagtatgttagcagtagtaagggtgcactgagtaagaatctcttcttgaaggacaagaaacatcggtattatattgtttcagcgatggtggatacgaaagttgacatgaaagttttatctcagagacttggtcttggaaaaggagggattagaatggctccagaagaagcacttggtgagcttttgcaggtatccctcggatgtgttaccccgtttgcagttgtaaatgaatcagcaagagacgtgtctctcttgttagaccaaaaattcaagaaccaaacgcgttgcatcttccacccattgtctaacgatgtctcagtctctctgaacacattgggtctggacaagtttctgaagtcgattgggagagatcccgtatacgttgaccttgaggctaacccggtagttggtaaagaccaggctccagatctagctgtttgtgttccgtctaattcagttattgttcccgagattcctaatcaaacatcttctacacaaattcctcttccaaaaagtgtgtcagcagaggtcaagcctgtggcttcagccaaaacgagcaagccagcttgtaaggtgaagagcgtcgctgaaaattcagctccatcagcttacaagaacccggagaaatttgtgcaggagattttggacaaaacttcggctctattattgtccgaggctaagggagagtgcgtggaggctttggcagaaacactaagaaaacgacttacctcagagttgacccacctctctattatgtacaagaactcagcgtacgcagaaggtttttatgctggtacacgccaccagccgaagcgattgtaagaggtttggtttacatgttgaaccggagatatttgggagagaaacattaccggttcagcaatatattttccttcgttggacagcaaattttagataagactgaaaatgattacatttacatgaaagctcgaaccatttattc

SEQ ID NO: 103693 - protein, 334 aa, Arabidopsis thaliana
  peptide (1)..(334): Ceres Seq. ID no. 13613369
TFVFSTKSAVPCSFLSPNSLIFDFFDSMGFTKDQLLDRLQELEIDYSKYEHPPVLTVEEQAKYVSSSKGALSKNLFLKDKKHRYYIVSAMVDTKVDMKVLSQRLGLGKGGIRMAPEEALGELLQVSLGCVTPFAVVNESARDVSLLLDQKFKNQTRCIFHPLSNDVSVSLNTLGLDKFLKSIGRDPVYVDLEANPVVGKDQAPDLAVCVPSNSVIVPEIPNQTSSTQIPLPKSVSAEVKPVASAKTSKPACKVKSVAENSAPSAYKNPEKFVQEILDKTSALLLSEAKGECVEALAETLRKRLTSELTHLSIMYKNSAYAEGFYAGTRHQPKRL

SEQ ID NO: 103694 - protein, 307 aa, Arabidopsis thaliana; identical to SEQ ID NO: 37872
  peptide (1)..(307): Ceres Seq. ID no. 13613370

SEQ ID NO: 103695 - protein, 245 aa, Arabidopsis thaliana; identical to SEQ ID NO: 37873
  peptide (1)..(245): Ceres Seq. ID no. 13613371

SEQ ID NO: 103696 - DNA, 1163 bp, Arabidopsis thaliana
  misc_feature (1)..(1163): Ceres Seq. ID no. 13613376
  misc_feature (1)..(1163): Ortholog of  Ceres SEQ ID NO 12618740 as cited in SEQ ID NO 65846
  misc_feature (1)..(1163): Ortholog of  Ceres SEQ ID NO 12635446 as cited in SEQ ID NO 0
cgagattttttattttaatatcacgctcgaatatacaattcggaatgtgcagatgttttttttgaaggcaatttagaaaaatagacaaaaatcgaacaaacatatatagaaatagagatctaaataaaaacatttattttatttcctcttggaaacaaggaaaaaatgaattggggtgggtgacgtggcagtcatacccttgccacacccttcctatacgcatataaacagcagctgcgaggagagagagatttcagagtattttctagggtttcgttttttttaaagatttagagaaaaaagtgagttattaagagattccaatcaaaatgagcggagacaacggcggtggtgagaggcgcaaaggctccgtcaagtggtttgatacccagaagggtttcggcttcatcactcctgacgacggtggcgacgatctcttcgttcaccagtcctccatcagatctgagggtttccgtagcctcgctgccgaagaagccgtagagttcgaggttgagatcgacaacaacaaccgtcccaaggccatcgatgtttctggacccgacggcgctcccgtccaaggaaacagcggtggtggttcatctggcggacgcggcggtttcggtggaggaagaggaggtggacgcggatctggaggtggatacggcggtggcggtggtggatacggaggaagaggaggtggtggtcgaggaggcagcgactgctacaagtgtggtgagcccggtcacatggcgagagactgttctgaaggcggtggaggttacggaggaggcggcggtggctacggaggtggaggcggatacggcggaggaggtggtggttacggaggtggtggccgtggaggtggtggcggcgggggaagctgctacagctgtggcgagtcgggacatttcgccagggattgcaccagcggtggacgttaaaaccaacgccggttacgcggtggagaagagtgagttggttatctcacaagtgatcggttctttctcccgccgccttctatctctctattatccactttttgcttattatgatggatctctatctttgttagttggttttttcttgatggtttcggattaggactcttcttttggttttgctacttatggttggttttatttatggtacttgtgatatgggtg

SEQ ID NO: 103697 - protein, 203 aa, Arabidopsis thaliana; identical to SEQ ID NO: 26302
  peptide (1)..(203): Ceres Seq. ID no. 13613377

SEQ ID NO: 103698 - protein, 184 aa, Arabidopsis thaliana; identical to SEQ ID NO: 26303
  peptide (1)..(184): Ceres Seq. ID no. 13613378

SEQ ID NO: 103699 - DNA, 1361 bp, Arabidopsis thaliana
  misc_feature (1)..(1361): Ceres Seq. ID no. 13613379
  misc_feature (1)..(1361): Ortholog of  Ceres SEQ ID NO 12563124 as cited in SEQ ID NO 57104
  misc_feature (1)..(1361): Ortholog of  Ceres SEQ ID NO 13598373 as cited in SEQ ID NO 62185
  misc_feature (1)..(1361): Ortholog of  Ceres SEQ ID NO 12584664 as cited in SEQ ID NO 62232
  misc_feature (1)..(1361): Ortholog of  Ceres SEQ ID NO 12617639 as cited in SEQ ID NO 65219
ttgtatgacataatgacgacgagacgaaggacaaaattgtcatttaaggaataaaagatattcttacaaagatattttttgctcgaaacgaggagaaaaaatcattagttatcgaaaatgctcacatgatgtgggcctaaccactaacccaattaaccacacatcttaatcagagtaagttgaaacaaatctttcagcaaaccctagaaaacatgtttaaccctagttattacgtcacacctgttctataaattaaggctgcgtcttatcacctcaaatcacataagtctctctcttacattttgaaaccctaatttctcttcttttccccaaaaaaaaatgtctgaagttgagtaccggtgctttgtcggcggccttgcctgggccaccaatgatgaagatcttcaaaggacgttctcacagttcggcgacgttatcgattctaaggtctgttacacgagagatcggtctcccggatcgagccgattccgatgattctgatcctcgacggatctgattccgatctgtttctctgttacttgattcgattactgttactatgttctctctcgttctttgttactgttacttaatttgtcccatcggtacgttcatcttcctgcttctatgagctcggagatcgatcgatttttgctttatattcatcgctttgttttatattccttccacgattgtttttgctgatgtgtatgattttgtttgtttacagatcattaacgaccgcgagagtggaagatcaaggggattcggattcgtcaccttcaaggacgagaaagccatgagggatgcgattgaagagatgaacggtaaagagctcgatggacgtgtcatcaccgtgaacgaggctcagtcgagaggtagcggcggtggcggaggaggccgtggtggaagcggtggtggttaccgcagcggaggcggtggtggatactcaggaggcggtggcggcggatactcaggaggaggcggtggtggttacgagagacgtagcggaggttacggatctggtggaggcggtggtggccgaggatacggtggtggtggacgccgtgagggaggtggctacggaggcggtgatggtggaagttacggaggcggtggtggcggctggtaatcaaagatagagttgtttgcgtgctgctgctctgtttttggtttagatttggttttgtgtcaccacttctggtttggttatcgttcgtttggtttacttttttgatgaaacagtttcgtttaagtcttctttgtctggaacgaaatgttaattcgcgtgttgtttactaaatttataacgtttccttttaaccagattcgagattttccctcaaataatttatcttgtt

SEQ ID NO: 103700 - protein, 110 aa, Arabidopsis thaliana; identical to SEQ ID NO: 22060
  peptide (1)..(110): Ceres Seq. ID no. 13613380

SEQ ID NO: 103701 - protein, 103 aa, Arabidopsis thaliana; identical to SEQ ID NO: 22061
  peptide (1)..(103): Ceres Seq. ID no. 13613381

SEQ ID NO: 103702 - DNA, 767 bp, Arabidopsis thaliana
  misc_feature (1)..(767): Ceres Seq. ID no. 13613385
  misc_feature (1)..(767): Ortholog of  Ceres SEQ ID NO 12563124 as cited in SEQ ID NO 57104
  misc_feature (1)..(767): Ortholog of  Ceres SEQ ID NO 13598373 as cited in SEQ ID NO 62185
  misc_feature (1)..(767): Ortholog of  Ceres SEQ ID NO 12584664 as cited in SEQ ID NO 62232
  misc_feature (1)..(767): Ortholog of  Ceres SEQ ID NO 12617639 as cited in SEQ ID NO 65219
  misc_feature (1)..(767): Ortholog of  Ceres SEQ ID NO 15179982 as cited in SEQ ID NO 0
aaatcacataagtctctctcttacattttgaaaccctaatttctcttcttttccccaaaaaaaaatgtctgaagttgagtaccggtgctttgtcggcggccttgcctgggccaccaatgatgaagatcttcaaaggacgttctcacagttcggcgacgttatcgattctaagatcattaacgaccgcgagagtggaagatcaaggggattcggattcgtcaccttcaaggacgagaaagccatgagggatgcgattgaagagatgaacggtaaagagctcgatggacgtgtcatcaccgtgaacgaggctcagtcgagaggtagcggcggtggcggaggaggccgtggtggaagcggtggtggttaccgcagcggaggcggtggtggatactcaggaggcggtggcggcggatactcaggaggaggcggtggtggttacgagagacgtagcggaggttacggatctggtggaggcggtggtggccgaggatacggtggtggtggacgccgtgagggaggtggctacggaggcggtgatggtggaagttacggaggcggtggtggcggctggtaatcaaagatagagttgtttgcgtgctgctgctctgtttttggtttagatttggttttgtgtcaccacttctggtttggttatcgttcgtttggtttacttttttgatgaaacagtttcgtttaagtcttctttgtctggaacgaaatgttaattcgcgtgttgtttactaaatttataacgtttccttttaacc

SEQ ID NO: 103703 - protein, 169 aa, Arabidopsis thaliana; identical to SEQ ID NO: 22059
  peptide (1)..(169): Ceres Seq. ID no. 13613386

SEQ ID NO: 103704 - protein, 110 aa, Arabidopsis thaliana; identical to SEQ ID NO: 22060
  peptide (1)..(110): Ceres Seq. ID no. 13613387

SEQ ID NO: 103705 - protein, 103 aa, Arabidopsis thaliana; identical to SEQ ID NO: 22061
  peptide (1)..(103): Ceres Seq. ID no. 13613388

SEQ ID NO: 103706 - DNA, 686 bp, Arabidopsis thaliana
  misc_feature (1)..(686): Ceres Seq. ID no. 13613393
  misc_feature (1)..(686): Ortholog of  Ceres SEQ ID NO 12563124 as cited in SEQ ID NO 57104
  misc_feature (1)..(686): Ortholog of  Ceres SEQ ID NO 12617639 as cited in SEQ ID NO 65219
  misc_feature (1)..(686): Ortholog of  Ceres SEQ ID NO 15179982 as cited in SEQ ID NO 0
acataagtctctctcttacattttgaaaccctaatttctcttcttttccccaaaaaaaaatgtctgaagttgagtaccggtgctttgtcggcggccttgcctgggccaccaatgatgaagatcttcaaaggacgttctcacagttcggcgacgttatcgattctaagatcattaacgaccgcgagagtggaagatcaaggggattcggattcgtcaccttcaaggacgagaaagccatgagggatgcgattgaagagatgaacggtaaagagctcgatggacgtgtcatcaccgtgaacgaggctcagtcgagaggtagcggcggtggcggcggatactcaggaggaggcggtggtggttacgagagacgtagcggaggttacggatctggtggaggcggtggtggccgaggatacggtggtggtggacgccgtgagggaggtggctacggaggcggtgatggtggaagttacggaggcggtggtggcggctggtaatcaaagatagagttgtttgcgtgctgctgctctgtttttggtttagatttggttttgtgtcaccacttctggtttggttatcgttcgtttggtttacttttttgatgaaacagtttcgtttaagtcttctttgtctggaacgaaatgttaattcgcgtgttgtttactaaatttataacgtttcctttt

SEQ ID NO: 103707 - protein, 145 aa, Arabidopsis thaliana; identical to SEQ ID NO: 22120
  peptide (1)..(145): Ceres Seq. ID no. 13613394

SEQ ID NO: 103708 - protein, 86 aa, Arabidopsis thaliana; identical to SEQ ID NO: 22121
  peptide (1)..(86): Ceres Seq. ID no. 13613395

SEQ ID NO: 103709 - protein, 79 aa, Arabidopsis thaliana; identical to SEQ ID NO: 22122
  peptide (1)..(79): Ceres Seq. ID no. 13613396

SEQ ID NO: 103710 - DNA, 729 bp, Arabidopsis thaliana
  misc_feature (1)..(729): Ceres Seq. ID no. 13613397
  misc_feature (1)..(729): Ortholog of  Ceres SEQ ID NO 12563124 as cited in SEQ ID NO 57104
  misc_feature (1)..(729): Ortholog of  Ceres SEQ ID NO 12584664 as cited in SEQ ID NO 62232
  misc_feature (1)..(729): Ortholog of  Ceres SEQ ID NO 12617639 as cited in SEQ ID NO 65219
  misc_feature (1)..(729): Ortholog of  Ceres SEQ ID NO 15179982 as cited in SEQ ID NO 0
ataagtctctctcttacattttgaaaccctaatttctcttcttttccccaaaaaaaaatgtctgaagttgagtaccggtgctttgtcggcggccttgcctgggccaccaatgatgaagatcttcaaaggacgttctcacagttcggcgacgttatcgattctaagatcattaacgaccgcgagagtggaagatcaaggggattcggattcgtcaccttcaaggacgagaaagccatgagggatgcgattgaagagatgaacggtaaagagctcgatggacgtgtcatcaccgtgaacgaggctcagtcgagaggtagcggcggtggcggaggaggccgtggtggaagcggtggtggttaccgcagcggaggcggtggtggatactcaggaggcggtggtggttacgagagacgtagcggaggttacggatctggtggaggcggtggtggccgaggatacggtggtggtggacgccgtgagggaggtggctacggaggcggtgatggtggaagttacggaggcggtggtggcggctggtaatcaaagatagagttgtttgcgtgctgctgctctgtttttggtttagatttggttttgtgtcaccacttctggtttggttatcgttcgtttggtttacttttttgatgaaacagtttcgtttaagtcttctttgtctggaacgaaatgttaattcgcgtgttgtttactaaatttataacgtttcctttt

SEQ ID NO: 103711 - protein, 160 aa, Arabidopsis thaliana
  peptide (1)..(160): Ceres Seq. ID no. 13613398
MSEVEYRCFVGGLAWATNDEDLQRTFSQFGDVIDSKIINDRESGRSRGFGFVTFKDEKAMRDAIEEMNGKELDGRVITVNEAQSRGSGGGGGGRGGSGGGYRSGGGGGYSGGGGGYERRSGGYGSGGGGGGRGYGGGGRREGGGYGGGDGGSYGGGGGGW

SEQ ID NO: 103712 - protein, 101 aa, Arabidopsis thaliana; identical to SEQ ID NO: 36932
  peptide (1)..(101): Ceres Seq. ID no. 13613399

SEQ ID NO: 103713 - protein, 94 aa, Arabidopsis thaliana; identical to SEQ ID NO: 36933
  peptide (1)..(94): Ceres Seq. ID no. 13613400

SEQ ID NO: 103714 - DNA, 680 bp, Arabidopsis thaliana
  misc_feature (1)..(680): Ceres Seq. ID no. 13613401
  misc_feature (1)..(680): Ortholog of  Ceres SEQ ID NO 12563124 as cited in SEQ ID NO 57104
  misc_feature (1)..(680): Ortholog of  Ceres SEQ ID NO 12617639 as cited in SEQ ID NO 65219
acataagtctctctcttacattttgaaaccctaatttctcttcttttccccaaaaaaaaatgtctgaagttgagtaccggtgctttgtcggcggccttgcctgggccaccaatgatgaagatcttcaaaggacgttctcacagttcggcgacgttatcgattctaagatcattaacgaccgcgagagtggaagatcaaggggattcggattcgtcaccttcaaggacgagaaagccatgagggatgcgattgaagagatgaacggtaaagagctcgatggacgtgtcatcaccgtgaacgaggctcagtcgagaggtagcggcggtggcggaggaggccgtggtggaagcggtggtggttaccgcagcggaggttacggatctggtggaggcggtggtggccgaggatacggtggtggtggacgccgtgagggaggtggctacggaggcggtgatggtggaagttacggaggcggtggtggcggctggtaatcaaagatagagttgtttgcgtgctgctgctctgtttttggtttagatttggttttgtgtcaccacttctggtttggttatcgttcgtttggtttacttttttgatgaaacagtttcgtttaagtcttctttgtctggaacgaaatgttaattcgcgtgttgtttactaaatttataacgtttcctttt

SEQ ID NO: 103715 - protein, 143 aa, Arabidopsis thaliana
  peptide (1)..(143): Ceres Seq. ID no. 13613402
MSEVEYRCFVGGLAWATNDEDLQRTFSQFGDVIDSKIINDRESGRSRGFGFVTFKDEKAMRDAIEEMNGKELDGRVITVNEAQSRGSGGGGGGRGGSGGGYRSGGYGSGGGGGGRGYGGGGRREGGGYGGGDGGSYGGGGGGW

SEQ ID NO: 103716 - protein, 84 aa, Arabidopsis thaliana
  peptide (1)..(84): Ceres Seq. ID no. 13613403
MRDAIEEMNGKELDGRVITVNEAQSRGSGGGGGGRGGSGGGYRSGGYGSGGGGGGRGYGGGGRREGGGYGGGDGGSYGGGGGGW

SEQ ID NO: 103717 - protein, 77 aa, Arabidopsis thaliana
  peptide (1)..(77): Ceres Seq. ID no. 13613404
MNGKELDGRVITVNEAQSRGSGGGGGGRGGSGGGYRSGGYGSGGGGGGRGYGGGGRREGGGYGGGDGGSYGGGGGGW

SEQ ID NO: 103718 - DNA, 698 bp, Arabidopsis thaliana
  misc_feature (1)..(698): Ceres Seq. ID no. 13613409
  misc_feature (1)..(698): Ortholog of  Ceres SEQ ID NO 12563124 as cited in SEQ ID NO 57104
  misc_feature (1)..(698): Ortholog of  Ceres SEQ ID NO 13598373 as cited in SEQ ID NO 62185
  misc_feature (1)..(698): Ortholog of  Ceres SEQ ID NO 12617639 as cited in SEQ ID NO 65219
atcacataagtctctctcttacattttgaaaccctaatttctcttcttttccccaaaaaaaaatgtctgaagttgagtaccggtgctttgtcggcggccttgcctgggccaccaatgatgaagatcttcaaaggacgttctcacagttcggcgacgttatcgattctaagatcattaacgaccgcgagagtggaagatcaaggggattcggattcgtcaccttcaaggacgagaaagccatgagggatgcgattgaagagatgaacggtaaagagctcgatggacgtgtcatcaccgtgaacgaggctcagtcgagaggtagcggcggtggcggaggaggccgtggtggaagcggtggtggttaccgcagcggaggcggtggtggatactcaggaggcggtggcggcggatactcaggaggaggcggtggtggttacgagaggcggtgatggtggaagttacggaggcggtggtggcggctggtaatcaaagatagagttgtttgcgtgctgctgctctgtttttggtttagatttggttttgtgtcaccacttctggtttggttatcgttcgtttggtttacttttttgatgaaacagtttcgtttaagtcttctttgtctggaacgaaatgttaattcgcgtgttgtttactaaatttataacgtttccttttaaccagattcgagattttccctc

SEQ ID NO: 103719 - protein, 128 aa, Arabidopsis thaliana; identical to SEQ ID NO: 44013
  peptide (1)..(128): Ceres Seq. ID no. 13613410

SEQ ID NO: 103720 - protein, 69 aa, Arabidopsis thaliana; identical to SEQ ID NO: 44014
  peptide (1)..(69): Ceres Seq. ID no. 13613411

SEQ ID NO: 103721 - DNA, 1592 bp, Arabidopsis thaliana
  misc_feature (1)..(1592): Ceres Seq. ID no. 13613412
  misc_feature (1)..(1592): Ortholog of  Ceres SEQ ID NO 15172560 as cited in SEQ ID NO 57325
  misc_feature (1)..(1592): Ortholog of  Ceres SEQ ID NO 13655716 as cited in SEQ ID NO 68965
ataacgagaaccctttaccataaaaatctcaactttatcccttattcttatctgcaaaattcgttctcgtcccttggattatgggtttttttgttcctcgagaaagttgattgctttcttggaatccatgcgtgccctttctctttgttgttttaaaggatgcgtctgcgttagattgttttagtaactttgtgaattgattaagcacttcttcaccataatcaagtttatagcttttgcttctgatcagatcctgttatggaatctccacattctgaggcatcaatcgtgaatggtagtatccatttgaatggcagtggtgaaaccaaaacaaagaatatagtcatgtcgtctgattcagacagtttcatcggtgtgcttgaggtttttgttcaccaagctagggacatccacaacatctgtatctatcataagcaagatgtgtatgctaagctttgtctcacaaatgatcccgaaaactccttgtccacaaagatcatcaatggtggagggcaaaaccctgtcttcgacgatacccttcagttcgacgttaagaacctggattgttcgcttaagtgtgagatatttatgatgagccgcgtgaagaattatcttgaggatcagttacttggattctctcttgtacctttgtctgaagtgattgtgaggaatgggaaattggagaaagagttctccctttcttcaaccgatttgtatcactctcctgcaggttttgtcgagttgtctctctcgtacgcaggagattcgcctgacgtgatgcatattcctgcggttccaactgcggatgagaccgagttggctcctatcgagtttgatgagagtgagtttttggatccaaagattgtctgtgaaaacaatcaaatggtgtctaagtacttctccactacgtgttctgattctgatgattttgcaagctctgaaactggctttgtggaagtaaacagcatcctgtctgcagttgttgaaactgctgttgacgaagcagcaccggccaattctgtctcaacaaatggaatctcatctccatcaactgcagttagctctggctcctcgggaactcatgatgtttcaaagcaatctagtgaaggaaacaactcagattcagaacaagaagcgaagaagccaacagatatcatcaagagtggtgatttagataagactgatgaagaagcagttgtgaaaccggttctgacagtgaacattgaaccagagcaaaaggtagtgcaacaagatattgttgacatgtacacaaaaagcttgcagcaattcactgagtcactggctaagatgaaacttcctttggacatcgatagcccaacccaatcagagaactcaagctcctcccagcagacgccaaagagtgctagctcccgtgttttctacgggagtagagccttcttctgaagctcagaaatcatctcaagtttggcatcagaagtagcgagcatgtagtgaaagtgtaataagttaaaagtagacactatctaaaatgtgtaactatcttcctttgaagcctttagcttttcttgttatctgcaacttttccaatttagtactaaagtttcataatc

SEQ ID NO: 103722 - protein, 388 aa, Arabidopsis thaliana; identical to SEQ ID NO: 75377
  peptide (1)..(388): Ceres Seq. ID no. 13613413

SEQ ID NO: 103723 - protein, 359 aa, Arabidopsis thaliana; identical to SEQ ID NO: 75378
  peptide (1)..(359): Ceres Seq. ID no. 13613414

SEQ ID NO: 103724 - protein, 278 aa, Arabidopsis thaliana; identical to SEQ ID NO: 75379
  peptide (1)..(278): Ceres Seq. ID no. 13613415

SEQ ID NO: 103725 - DNA, 1282 bp, Arabidopsis thaliana
  misc_feature (1)..(1282): Ceres Seq. ID no. 13613420
  misc_feature (1)..(1282): Ortholog of  Ceres SEQ ID NO 15177289 as cited in SEQ ID NO 59364
gctttttgtgttgaagagagagtttcctatcttctccattcctcccaccatctccctcatcttcatcttcctctctctttctctctttctcaacaatctctattagatctttctccattaccattacctctggctttctcttaaatccaccatcatgaggagaggaagaggctcttccgccgtcgccggacctaccgtcgttgccgccatcaacggatctgtaaaagaaatcagattcagaggcgtaaggaagagaccttggggacgattcgcagctgagatccgtgatccatggaaaaaagctcgtgtttggttaggtactttcgattccgccgaagaagctgctcgcgcttacgactccgccgctcgtaacctccgtggtcctaaagccaaaactaatttccccatcgattcttcttctcctcctcctcctaatctccgatttaatcagattcgtaatcaaaatcaaaaccaagtcgatccgtttatggaccaccggttattcaccgaccatcaacaacagttcccgattgttaaccggcctactagtagcagcatgagcagcaccgttgaatcgtttagcggacccagacctacgacgatgaaaccggccacgacgaagagatatcctagaactccaccggttgttccggaggattgtcacagcgattgcgattcgtcgtcgtctgtaatcgacgacgacgacgatatcgcatcgtcttcacggcgacggaatccgccgtttcaattcgatcttaattttccaccgttggattgtgttgacttgttcaatggcgctgatgatcttcactgtaccgatctacgtctctaatgaattggtaaaatcaaaatcaaaatcacagatccgtgatcggtttgattttaatcgaaaacacacaacaaaatcctttttttttttttttttaaattttctgtttcgttgatctcatataatttttactatgcgggagaaatagaaagacaaagaaacgaagaagaagaagaagatggtgatgagcttgagagagcttgagctggttctgtgtttcttctgtgatgatattgtaagagtattattattttactattattactaaatcttcaaaaccaagaagaagaagaccgaacacgatgatctgttgtgtctgtttgttttactgtaagaaaaacgcagatctgggtttcgtttttttcttgagatagatcaaacaacccccatctttgtaacatatacatttggaacactcatgattctaaataaaaaatctagaatctttttttc

SEQ ID NO: 103726 - protein, 225 aa, Arabidopsis thaliana; identical to SEQ ID NO: 29620
  peptide (1)..(225): Ceres Seq. ID no. 13613421

SEQ ID NO: 103727 - protein, 114 aa, Arabidopsis thaliana; identical to SEQ ID NO: 29621
  peptide (1)..(114): Ceres Seq. ID no. 13613422

SEQ ID NO: 103728 - DNA, 723 bp, Arabidopsis thaliana
  misc_feature (1)..(723): Ceres Seq. ID no. 13613426
  misc_feature (1)..(723): Ortholog of  Ceres SEQ ID NO 12624105 as cited in SEQ ID NO 61361
  misc_feature (1)..(723): Ortholog of  Ceres SEQ ID NO 14309166 as cited in SEQ ID NO 0
aaaatgagtggataatacaaccactgaatctgttttgctttagttggaagcattaagagaacagccatggcttcttcttcaatctcattctcctgtgcaccttctttggccacctcactcttctccaccacttcttcttccccaaggctgctctcctctagatttctcggaacccgaaacttaaagcttcggatccgacctgccagactaggaccctccaatggttcaagaaccacttgctggttcaagttcggcaagaatggtgtcgatgctgaaaatgccggaatctatggcagccagtctcgagatgatttcgacagagacgacgtcgaacagtatttcaactacatgggtatgcttgcagtagaaggaacctattcaaagatggaagctcttcttaacctaaacattcacccagttgatatcttgttgatgttagccgctacagaaggtgacagacctaagatcgaggagcttctcaaagccggtgctgattattcggtcaaggacgctgatggaagaaccgctatcgacagagccaacagtgaagagatccgtgatttgatccttggctactcgactcaaaaggcttgactccgcttggttttaatacacaggaacaacacaagttatgttcttgagttttgaaatgtttgtgtttgctagaacaaactgtctttctgtgttccgcggatgagtagattataaaatccatcttcttcc

SEQ ID NO: 103729 - protein, 175 aa, Arabidopsis thaliana; identical to SEQ ID NO: 30737
  peptide (1)..(175): Ceres Seq. ID no. 13613427

SEQ ID NO: 103730 - DNA, 1259 bp, Arabidopsis thaliana
  misc_feature (1)..(1259): Ceres Seq. ID no. 13613452
  misc_feature (1)..(1259): Ortholog of  Ceres SEQ ID NO 14307839 as cited in SEQ ID NO 54379
  misc_feature (1)..(1259): Ortholog of  Ceres SEQ ID NO 13596109 as cited in SEQ ID NO 68619
gatttttacaaaacaaagatggaagagcaagtcagaagtcaaaatagctcgaagatgtaagtgacggcgcctgaatactcttggctggtagatttcacctacctcatttttttcatatatctcaaacgtggaatcgctgttactcagtttttatatataaaaataaacactcgctcttcttcaaccaaactcatttccaaaattccacaaagtttttcaaatggcgattgctttcaaatccggcgtcttcttcctccaatccccaaaatctcaaattggattccgccattcttctcctcctgattcatcgctttctttcaagagattcactcccatggcttctctctccacctcttctcctactctcggtctcgctgatactttcacacagctcaaaaaacaaggcaaagtagcattcataccatatatcacagctggtgatccggatctctctactactgctgaagcattgaaagttcttgatgcttgtggttctgacataatcgaattgggtgttccttactctgaccctttagctgatggacctgttattcaggctgcggcaacaaggtcgttggagaggggaacaaacctcgatagcatccttgagatgttggataaggttgttccacaaatatcttgtccgatttcgttgttcacgtattacaacccgattcttaaacgtgggttggggaagttcatgtccagcatcagagctgttggtgtacagggacttgtggttcccgatgttcctcttgaggaaactgagatgctgagaaaagaagccctcaacaacgacattgagctggtcctactcactacaccaaccacaccaacagagcgaatgaagctaattgttgatgcgtcagaaggatttatttaccttgtgagctcaattggagtgactggtgcacgatcatctgtaagcggaaaggttcagtcgctcttgaaggatatcaaagaggcgacagacaagccggtggcagtcggttttggaatatcaaagccggagcatgtgaaacagatagctggatggggagctgatggagtgatcgtaggcagtgcaatggtaaagctattgggtgatgcaaagtcgccaactgaaggacttaaggagcttgagaaactaaccaagtctcttaaatctgctcttctttgaaacacaaacatttgcagacaacatctttagattgtgtttttgattattatcggtgtgtgacaatgatgtctcaatcttttgatacatttcaagtatgatt

SEQ ID NO: 103731 - protein, 312 aa, Arabidopsis thaliana
  peptide (1)..(312): Ceres Seq. ID no. 13613453
MAIAFKSGVFFLQSPKSQIGFRHSSPPDSSLSFKRFTPMASLSTSSPTLGLADTFTQLKKQGKVAFIPYITAGDPDLSTTAEALKVLDACGSDIIELGVPYSDPLADGPVIQAAATRSLERGTNLDSILEMLDKVVPQISCPISLFTYYNPILKRGLGKFMSSIRAVGVQGLVVPDVPLEETEMLRKEALNNDIELVLLTTPTTPTERMKLIVDASEGFIYLVSSIGVTGARSSVSGKVQSLLKDIKEATDKPVAVGFGISKPEHVKQIAGWGADGVIVGSAMVKLLGDAKSPTEGLKELEKLTKSLKSALL

SEQ ID NO: 103732 - protein, 274 aa, Arabidopsis thaliana
  peptide (1)..(274): Ceres Seq. ID no. 13613454
MASLSTSSPTLGLADTFTQLKKQGKVAFIPYITAGDPDLSTTAEALKVLDACGSDIIELGVPYSDPLADGPVIQAAATRSLERGTNLDSILEMLDKVVPQISCPISLFTYYNPILKRGLGKFMSSIRAVGVQGLVVPDVPLEETEMLRKEALNNDIELVLLTTPTTPTERMKLIVDASEGFIYLVSSIGVTGARSSVSGKVQSLLKDIKEATDKPVAVGFGISKPEHVKQIAGWGADGVIVGSAMVKLLGDAKSPTEGLKELEKLTKSLKSALL

SEQ ID NO: 103733 - protein, 182 aa, Arabidopsis thaliana
  peptide (1)..(182): Ceres Seq. ID no. 13613455
MLDKVVPQISCPISLFTYYNPILKRGLGKFMSSIRAVGVQGLVVPDVPLEETEMLRKEALNNDIELVLLTTPTTPTERMKLIVDASEGFIYLVSSIGVTGARSSVSGKVQSLLKDIKEATDKPVAVGFGISKPEHVKQIAGWGADGVIVGSAMVKLLGDAKSPTEGLKELEKLTKSLKSALL

SEQ ID NO: 103734 - DNA, 2040 bp, Arabidopsis thaliana
  misc_feature (1)..(2040): Ceres Seq. ID no. 13613456
  misc_feature (1)..(2040): Ortholog of  Ceres SEQ ID NO 15171040 as cited in SEQ ID NO 55332
aaaaagaaagagagagagagaagaagaatcgtggagatggcttcgaccccgaagcttaccagtacaatttcatcatcttctccatctcttcaattcctctgcaaaaaactcccaatcgcaattcatctaccatcatcttcttcctctagctttctctcgcttcctaaaaccctaacctctctctattctctccgtccccgtatcgccctactctcaaaccaccgctattaccactctcgccggttttctgtttgtgccagtaccgataatggagctgaatcagaccgccactacgattttgatctcttcactatcggtgccggaagcggcggcgtccgcgcctctcgcttcgccactagcttcggtgcatccgccgccgtttgcgagcttcctttttccactatctcttccgatactgctggaggcgttggaggaacgtgtgtattgagaggatgtgtaccaaagaagttacttgtgtatgcatccaaatacagtcatgagtttgaagacagtcatggatttggttggaagtatgagactgagccttctcatgattggactactttgattgctaacaagaatgctgagttacagcggttgactggtatttataagaatatactgagcaaagctaatgtcaagttgattgaaggtcgtggaaaggttatagacccacacactgttgatgtagatgggaaaatctatactacgaggaatattctgattgcagttggtggacgtcctttcattcctgacattccaggaaaagagtttgctattgattctgatgccgcgcttgatttgccttccaagcctaagaaaattgcaatagttggtggtggctacatagccctggagtttgcggggatcttcaatggtcttaactgtgaagttcatgtatttataaggcaaaagaaggtgctgaggggatttgatgaagatgtcagggatttcgttggagagcagatgtctttaagaggtattgagtttcacactgaagaatcccctgaagccatcatcaaagctggagatggctcgttctctctgaagaccagcaagggaactgttgagggattttcgcatgttatgtttgcaactggtcgcaagcccaacacaaagaacttagggttggagaatgttggcgttaaaatggcgaaaaatggagcaatagaggttgacgaatattcacagacatctgttccatccatctgggctgttggggatgttactgaccgaatcaatttgactccagttgctttgatggagggaggtgcattggctaaaactttgtttcaaaatgagccaacaaagcctgattatagagctgttccctgcgccgttttctcccagccacctattggaacagttggtctaactgaagagcaggccatagaacaatatggtgatgtggatgtttacacatcgaactttaggccattaaaggctaccctttcaggacttccagaccgagtatttatgaaactcattgtctgtgcaaacaccaataaagttctcggtgttcacatgtgtggagaagattcaccagaaatcatccagggatttggggttgcagttaaagctggtttaactaaggccgactttgatgctacagtgggtgttcaccccacagcagctgaggagtttgtcactatgagggctccaaccaggaaattccgcaaagactcctctgagggaaaggcaagtcctgaagctaaaacagctgctggggtgtagagaaggttgcaaaaaagattgtatttacggcattggagccccctgataaggagaacattgtgtctgtgaagaagaagcttttcttttggcagagaatattttttcataatgtcgtgtgaagatatgatcgctgtcctgcaatacttttgatcgtttgacacacgaccaaattcctcgagagagagaggttgtaactattccgaaagagctctaaaactgaagctttcagttcttgtgacatcataatgaaggctgtatagatataacagtttcgagttttatttggatttgtagtatttttgtttt

SEQ ID NO: 103735 - protein, 577 aa, Arabidopsis thaliana
  peptide (1)..(577): Ceres Seq. ID no. 13613457
KKKERERRRIVEMASTPKLTSTISSSSPSLQFLCKKLPIAIHLPSSSSSSFLSLPKTLTSLYSLRPRIALLSNHRYYHSRRFSVCASTDNGAESDRHYDFDLFTIGAGSGGVRASRFATSFGASAAVCELPFSTISSDTAGGVGGTCVLRGCVPKKLLVYASKYSHEFEDSHGFGWKYETEPSHDWTTLIANKNAELQRLTGIYKNILSKANVKLIEGRGKVIDPHTVDVDGKIYTTRNILIAVGGRPFIPDIPGKEFAIDSDAALDLPSKPKKIAIVGGGYIALEFAGIFNGLNCEVHVFIRQKKVLRGFDEDVRDFVGEQMSLRGIEFHTEESPEAIIKAGDGSFSLKTSKGTVEGFSHVMFATGRKPNTKNLGLENVGVKMAKNGAIEVDEYSQTSVPSIWAVGDVTDRINLTPVALMEGGALAKTLFQNEPTKPDYRAVPCAVFSQPPIGTVGLTEEQAIEQYGDVDVYTSNFRPLKATLSGLPDRVFMKLIVCANTNKVLGVHMCGEDSPEIIQGFGVAVKAGLTKADFDATVGVHPTAAEEFVTMRAPTRKFRKDSSEGKASPEAKTAAGV

SEQ ID NO: 103736 - protein, 565 aa, Arabidopsis thaliana; identical to SEQ ID NO: 44131
  peptide (1)..(565): Ceres Seq. ID no. 13613458

SEQ ID NO: 103737 - DNA, 998 bp, Arabidopsis thaliana
  misc_feature (1)..(998): Ceres Seq. ID no. 13613467
  misc_feature (1)..(998): Ortholog of  Ceres SEQ ID NO 14309384 as cited in SEQ ID NO 52806
  misc_feature (1)..(998): Ortholog of  Ceres SEQ ID NO 14304136 as cited in SEQ ID NO 59024
ataattcaattcgctctccttctctctctatctctgccctttctttctctctcacacacaaacacgatccaatgacgacgagcaacaacgtgaacggatgtttcggagacacgaagctgaccaaagtgttcgtaggaggattggcttgggatactcacaaagaagcaatgtatgatcatttcatcaagtatggggacatcttggaggcagtcattatctccgacaaactcactcgccgttccaaaggatatggctttgtgactttcaaagatgcgaaagctgccacgagagcttgcgaagactctactccgatcatcaatggccgccgtgccaactgcaatctcgcctccctcggtggccgtcttcgtaaatcccctaccatgacctctcctcaacaaggaccaaaaaatgggaacagggccacgccaccacatgttggaaatcattctcagtggtactacccgtccggattcacaaaccagcaacatcaacaacaaaatcatcaagccgttcctttctatgggtacccttccgcctacgttgccccgaacatgaccttcaatcaaaaagttggatatgtcggaggaacctatatgaacggatactatgcacaaatgcaaccacaaccgcaatcgcagccacaaccgcaatattaccaccatcacatgtatggtggaggacgagttatggttggggcagcaagtccaatggtgcctttctacactgtctatccttatcatcaatctcaagccatcgggtttccacaaccttcattttcgaaacctctttctttttccactcctcctatatcaggcacagttggaggagagagcatacagaagaaggccatacattgataggctagaagctgttaatcaaacgattgactcagcccaaaattattcattttatccatctcactaagctttatttttttctagagacttgtatttgtaataatttaatttcgttacatttaataatttattcattgaagc

SEQ ID NO: 103738 - protein, 284 aa, Arabidopsis thaliana
  peptide (1)..(284): Ceres Seq. ID no. 13613468
NSIRSPSLSISALSFSLTHKHDPMTTSNNVNGCFGDTKLTKVFVGGLAWDTHKEAMYDHFIKYGDILEAVIISDKLTRRSKGYGFVTFKDAKAATRACEDSTPIINGRRANCNLASLGGRLRKSPTMTSPQQGPKNGNRATPPHVGNHSQWYYPSGFTNQQHQQQNHQAVPFYGYPSAYVAPNMTFNQKVGYVGGTYMNGYYAQMQPQPQSQPQPQYYHHHMYGGGRVMVGAASPMVPFYTVYPYHQSQAIGFPQPSFSKPLSFSTPPISGTVGGESIQKKAIH

SEQ ID NO: 103739 - protein, 261 aa, Arabidopsis thaliana
  peptide (1)..(261): Ceres Seq. ID no. 13613469
MTTSNNVNGCFGDTKLTKVFVGGLAWDTHKEAMYDHFIKYGDILEAVIISDKLTRRSKGYGFVTFKDAKAATRACEDSTPIINGRRANCNLASLGGRLRKSPTMTSPQQGPKNGNRATPPHVGNHSQWYYPSGFTNQQHQQQNHQAVPFYGYPSAYVAPNMTFNQKVGYVGGTYMNGYYAQMQPQPQSQPQPQYYHHHMYGGGRVMVGAASPMVPFYTVYPYHQSQAIGFPQPSFSKPLSFSTPPISGTVGGESIQKKAIH

SEQ ID NO: 103740 - protein, 229 aa, Arabidopsis thaliana
  peptide (1)..(229): Ceres Seq. ID no. 13613470
MYDHFIKYGDILEAVIISDKLTRRSKGYGFVTFKDAKAATRACEDSTPIINGRRANCNLASLGGRLRKSPTMTSPQQGPKNGNRATPPHVGNHSQWYYPSGFTNQQHQQQNHQAVPFYGYPSAYVAPNMTFNQKVGYVGGTYMNGYYAQMQPQPQSQPQPQYYHHHMYGGGRVMVGAASPMVPFYTVYPYHQSQAIGFPQPSFSKPLSFSTPPISGTVGGESIQKKAIH

SEQ ID NO: 103741 - DNA, 784 bp, Arabidopsis thaliana
  misc_feature (1)..(784): Ceres Seq. ID no. 13613471
  misc_feature (1)..(784): Ortholog of  Ceres SEQ ID NO 13594411 as cited in SEQ ID NO 58223
  misc_feature (1)..(784): Ortholog of  Ceres SEQ ID NO 13661991 as cited in SEQ ID NO 61245
aaaatttcacggaaaatagaagcgtcgagttcctcctctccctcaggttgtcaatggccgctaggttacttgctttgagacgcgctttgtctcttttcagcaaccaacaacatcgttttcctttgtctcaagtctcaacagagcagttgtcgctatcaaactcactcttcagcagaagtcatgtttatggaagattatttcagagacagttatctgtaatccgtgaggcaaatgaagcttctgtaaccaatgtctgcaactcgtcaaactctgctactgaatcggccaaagttccctcccctgcgacgccctctgaggaaatgatggtgaagtacaagtcccagttaaaaataaacccgaggcatgacttcatgatggtcttcacttgcaaggtctgtgatacaagatctatgaagatggcgagccgagaatcatatgaaaacggcgttgtggtggtacgatgtggagggtgtgataatctacatttgattgcagaccgtcgtggttggtttggagaaccaggaagcgtggaggacttccttgcttctcaaggggaagaattcaagaaaggatccatggattctcttaacctaactcctgaagatttagctggaggaaagatttctactgaataaggagtgatcttctttgcttttgctacttaaccattatggaacagaacttcaccttatgttccagtattataattgtttcttgtagttcactgtttggtaacatttaaatgcagaagatgtttaatacaattatgtgtttggaatgttcc

SEQ ID NO: 103742 - protein, 210 aa, Arabidopsis thaliana
  peptide (1)..(210): Ceres Seq. ID no. 13613472
NFTENRSVEFLLSLRLSMAARLLALRRALSLFSNQQHRFPLSQVSTEQLSLSNSLFSRSHVYGRLFQRQLSVIREANEASVTNVCNSSNSATESAKVPSPATPSEEMMVKYKSQLKINPRHDFMMVFTCKVCDTRSMKMASRESYENGVVVVRCGGCDNLHLIADRRGWFGEPGSVEDFLASQGEEFKKGSMDSLNLTPEDLAGGKISTE

SEQ ID NO: 103743 - protein, 193 aa, Arabidopsis thaliana
  peptide (1)..(193): Ceres Seq. ID no. 13613473
MAARLLALRRALSLFSNQQHRFPLSQVSTEQLSLSNSLFSRSHVYGRLFQRQLSVIREANEASVTNVCNSSNSATESAKVPSPATPSEEMMVKYKSQLKINPRHDFMMVFTCKVCDTRSMKMASRESYENGVVVVRCGGCDNLHLIADRRGWFGEPGSVEDFLASQGEEFKKGSMDSLNLTPEDLAGGKISTE

SEQ ID NO: 103744 - DNA, 2071 bp, Arabidopsis thaliana
  misc_feature (1)..(2071): Ceres Seq. ID no. 13613477
  misc_feature (1)..(2071): Ortholog of  Ceres SEQ ID NO 15176057 as cited in SEQ ID NO 56363
  misc_feature (1)..(2071): Ortholog of  Ceres SEQ ID NO 14316269 as cited in SEQ ID NO 60082
gcctcttcttcttcttcttcttcttcatcttcttctatatattggtgtttcatttgttctgctttaaaagtacacaaagattcatcttttttcggtcctctgattgggcaaaagactagctcggtcgtgttttgaacaagagatacatgttttgaaaaattcctcgcaaaagaagagaaagaaagactcaaacttttgtttgaatttgataccattttttatatatataccaaaagtccaagactggtttcatttttgggtttggtctgaaacctctcttcgtgttgtttgttcatggtatgtcttaattagggtaaaaaaatacttgattgttttctctcaatcatcatgcatagagtacgcaataaaccggttaaatccaccgctactgcttccgtcaagcatttaatcaaacagagaggcggcgacggagctacggcggcttccaagtcggcgaatgattataataataatgatagtctcttgacggatatgcaggaaccaagcatcgatacagataaactcagctacgagattttctctattcttgagagcaaatttcttttcgggtacgacgactcgaaacccgaacccgcgaattcggttgttgctgggtcgattaagaaccagagaggtaaaatctgtattctgagtatcgatggaggtggaatgagagggatcttacccggtaaggctttggcttatctagaacacgctctgaaatctaaatcgggtgacccgaatgcccgaatcgccgattactttgacgtagccgccgggtccggtataggtgggatttacacagccatgttgttcgggtcaagagacggtaaccgccccatcttcaaagcagatgacacgtggcagttcttaacgagaaacgccaagggtctttacggaggagcaggaatcttgaaacgggtcttgagaaccgggtcgggttgttgttccgggacggctaagttaaagaaagtgatgaaagagtctttctcggagctaaccttaaaggacacgcttaaaccggtgcttataccttgctacgacctcaaaagctctggcccgtttctgttctcacgggccgatgcgcttgagacggacggctatgattttaggctctcggaggtttgtagagcgacttgggctgagccgggtgtgtttgagcccgtggagatgaagtcggttgatgggcagaccaagtgtgtggctgttggtggaggattagccatgagcaatcccacagcggctgcaatcacgcatgtcctgcacaacaagcaggagtttccgtttgtgcgaggtgttgaggatttgcttgtgttgtctcttggtatgggtcagttgcttgatgttagctatgagtatgatcggattatcaagtggaaggctaagcattgggctcgccccgcagctcttatttctaatgacggtgctgctgacactgtcgatcaagctgtggccatggcttttggtcactgccgcagtagtaactatgtccggattcaggcgaatgggtcgaacttaggaccttggagtcctaacatggacacagaccctagtgggagcaatgtgaatatgctgatgggagtagcagaggagatgcttaaacaaaagaatgttgaatctgttttgtttggaggtaaaagaatcgatgaacagagcaacttcgagaagcttgactggttagctggggaacttgttctcgagcatcaaaggagaaatagcagaatcgctccaaccgtagcgttcaagcaatccgtgcatagagcagatcaaaagacaagtgataaagatatcggtgtgaccgcaagagaacgatgaaataagaaatggtttgcttagatgatttttttaagataaggtttttatttctttcttcttaggttatgatttgttgtatagatttgtgtttttgagattgagtttctgagacatgatgagaaaaggggaaacacctatcatcttgcaaagagggctcaagctccttaatccatgctgcccaaaaaaaaaaaaaaaaatatgattcctgtaatttcggtttgtctttgttttcctatgtaatcatcatgatttcttc

SEQ ID NO: 103745 - protein, 488 aa, Arabidopsis thaliana
  peptide (1)..(488): Ceres Seq. ID no. 13613478
MHRVRNKPVKSTATASVKHLIKQRGGDGATAASKSANDYNNNDSLLTDMQEPSIDTDKLSYEIFSILESKFLFGYDDSKPEPANSVVAGSIKNQRGKICILSIDGGGMRGILPGKALAYLEHALKSKSGDPNARIADYFDVAAGSGIGGIYTAMLFGSRDGNRPIFKADDTWQFLTRNAKGLYGGAGILKRVLRTGSGCCSGTAKLKKVMKESFSELTLKDTLKPVLIPCYDLKSSGPFLFSRADALETDGYDFRLSEVCRATWAEPGVFEPVEMKSVDGQTKCVAVGGGLAMSNPTAAAITHVLHNKQEFPFVRGVEDLLVLSLGMGQLLDVSYEYDRIIKWKAKHWARPAALISNDGAADTVDQAVAMAFGHCRSSNYVRIQANGSNLGPWSPNMDTDPSGSNVNMLMGVAEEMLKQKNVESVLFGGKRIDEQSNFEKLDWLAGELVLEHQRRNSRIAPTVAFKQSVHRADQKTSDKDIGVTARER

SEQ ID NO: 103746 - protein, 440 aa, Arabidopsis thaliana; identical to SEQ ID NO: 27127
  peptide (1)..(440): Ceres Seq. ID no. 13613479

SEQ ID NO: 103747 - protein, 381 aa, Arabidopsis thaliana; identical to SEQ ID NO: 27128
  peptide (1)..(381): Ceres Seq. ID no. 13613480

SEQ ID NO: 103748 - DNA, 1255 bp, Arabidopsis thaliana
  misc_feature (1)..(1255): Ceres Seq. ID no. 13613485
  misc_feature (1)..(1255): Ortholog of  Ceres SEQ ID NO 13594117 as cited in SEQ ID NO 57050
atggaagtatggaaccacaaacgcttagggttccggattcaggtcggtgtcgccaccgcccttcttcgtgcttctcttccttctttgtcggatcgtcaggtttacagatcagctcttgtggaggatatgggtgaagaagacaccgcgacggtggatcagaacagtttcggtggtggcaaagattcattgcttcgtaatcgtcattcgtcgccattgccttcaccgacacagctttcttctaaagtgattacattgcctaccgtattaacccttggccgtgtagctgccgttccgattctcgtcgccaccttttacgttgattgctggtggggaagaactgctacgacaagtattttcattgcagcagccattacagattggcttgatggatatattgcacggaagatgagattgggttctgaatttggtgcatttttggatccagtggcagataagcttatggtagcagctacattgatattgttgtgcactaaaccaatggtcgccgttgtcttaggaccagttccatggttagtgacagtaccttcaatcgccatcattggtagagagattactatgtctgcagtaagagaatgggctgcatctcaaaacggcaagctttcagaggctgttgctgtaaatagcttgggaaagtggaaaactgcaacgcagatgatagcgctaaccatacttcttgcaagccgggatagcagttttgagagactattaccgtcgggtattgggttgctctatgtatctgcagggctctctatatggtctttagttgtttatatgaggaagatatggagagtactgctaaagaagtagcaacaaaaaactcttttttcgggctttttgcattcagtatatacacatagaatggaagatttacctctcttcttcttgaagaaagctgactaatttctctctggatacaaatgaaattagttgggcaagcactataagactcttatatgatgctttagttctgttttcaactttgggcactggggtcgtactctacttggtttggttttgtataatatctctgaatcacattgctccggctagcaccgaattttaatgaagcagcaagcacgatcttatgggcaatgatggaaaagcagcaggcgcaatttcgttctagtcgaagacttggtctcatgaattctgatataaatgaaaacaattgttgcatgtcatgtagatgcttttaccgatacaatataatttatatatataaaaaactttggtt

SEQ ID NO: 103749 - protein, 275 aa, Arabidopsis thaliana
  peptide (1)..(275): Ceres Seq. ID no. 13613486
MEVWNHKRLGFRIQVGVATALLRASLPSLSDRQVYRSALVEDMGEEDTATVDQNSFGGGKDSLLRNRHSSPLPSPTQLSSKVITLPTVLTLGRVAAVPILVATFYVDCWWGRTATTSIFIAAAITDWLDGYIARKMRLGSEFGAFLDPVADKLMVAATLILLCTKPMVAVVLGPVPWLVTVPSIAIIGREITMSAVREWAASQNGKLSEAVAVNSLGKWKTATQMIALTILLASRDSSFERLLPSGIGLLYVSAGLSIWSLVVYMRKIWRVLLKK

SEQ ID NO: 103750 - protein, 233 aa, Arabidopsis thaliana; identical to SEQ ID NO: 21299
  peptide (1)..(233): Ceres Seq. ID no. 13613487

SEQ ID NO: 103751 - protein, 140 aa, Arabidopsis thaliana; identical to SEQ ID NO: 21300
  peptide (1)..(140): Ceres Seq. ID no. 13613488

SEQ ID NO: 103752 - DNA, 901 bp, Arabidopsis thaliana
  misc_feature (1)..(901): Ceres Seq. ID no. 13613489
  misc_feature (1)..(901): Ortholog of  Ceres SEQ ID NO 13595808 as cited in SEQ ID NO 50995
  misc_feature (1)..(901): Ortholog of  Ceres SEQ ID NO 12609096 as cited in SEQ ID NO 52019
  misc_feature (1)..(901): Ortholog of  Ceres SEQ ID NO 15177207 as cited in SEQ ID NO 58287
  misc_feature (1)..(901): Ortholog of  Ceres SEQ ID NO 15178854 as cited in SEQ ID NO 0
aatcaagaaaagctctgtaacattattatcaatcgaaattccaaccgactcaacaatgtcttcatccaacgcctgcgcctctccgtcaccgttccccgccgtcacgaagcttcatgtagactccgtcacgtttgtaccgtccgtcaagtcaccggcctcctccaatccattattcctcggcggcgccggtgtccgaggccttgatatccaaggtaaattcgtgatcttcaccgtcattggagtatacctagagggtaacgccgttccttctctatctgtcaagtggaagggaaaaactacggaggagctaacagaatctatcccgttcttccgtgaaatagtcaccggtgcgtttgagaagtttatcaaggtgacaatgaaactgccgttaacgggacaacaatattcggagaaagtgacggagaattgtgtggctatatggaaacaattagggctttatacggactgtgaagctaaagctgtggagaagttcttggagatcttcaaggaagaaacattccctcccggttcatcgatcctcttcgctctctcccctaccggctctcttacggttgcgttttcgaaagatgatagtatccctgaaaccgggatcgctgtgatcgagaacaaattgttggcggaggcggttctggaatctatcatcgggaagaacggtgtgtcacctggcactaggttaagtgttgcagaaagattatctcagctaatgatgaagaacaaggacgaaaaggaagttagtgatcactctgttgaggaaaaactagccaaagagaactgagaatgatagatttttcttgtgtttttgtcattttctatttcttatgttttctatatctaatttcttatgcggtactcaagtggagaataaagaacatgcatttac

SEQ ID NO: 103753 - protein, 264 aa, Arabidopsis thaliana; identical to SEQ ID NO: 26207
  peptide (1)..(264): Ceres Seq. ID no. 13613490

SEQ ID NO: 103754 - protein, 246 aa, Arabidopsis thaliana; identical to SEQ ID NO: 26208
  peptide (1)..(246): Ceres Seq. ID no. 13613491

SEQ ID NO: 103755 - protein, 139 aa, Arabidopsis thaliana; identical to SEQ ID NO: 26209
  peptide (1)..(139): Ceres Seq. ID no. 13613492

SEQ ID NO: 103756 - DNA, 1310 bp, Arabidopsis thaliana
  misc_feature (1)..(1310): Ceres Seq. ID no. 13613497
  misc_feature (1)..(1310): Ortholog of  Ceres SEQ ID NO 14302021 as cited in SEQ ID NO 68979
  misc_feature (1)..(1310): Ortholog of  Ceres SEQ ID NO 14309296 as cited in SEQ ID NO 0
actcccaactacatcctcttcaatgctcaatctcgtcttcttcttcctctctatttaatttcccttgtctctctatctctctcaatttcctcatctgggtcttcctcgtttgctccgcttaagcaccatgaaggtcaccgtcgtctcccgcagcggcagagaagtcctcaaagctccccttgacctccccgattcggcgactgttgctgatctgcaagaagcgtttcataagagagctaagaagttttacccgtcgaggcaaagactgactcttcccgtgactcctggatcgaaggacaaacctgttgtcctcaatagcaagaaatcactgaaggagtactgtgatggaaacaacaactccttaactgtagtcttcaaagacctgggggcacaagtttcctaccgcacactcttcttcttcgagtatcttggccctctccttatctaccctgtcttttactacttccctgtttacaagtttcttggttatggagaggactgtgtgatccatccggtccagacgtacgctatgtactactggtgctttcactacttcaaacggatcttagaaacgtttttcgtacatcggttcagccacgcaacctccccaatcgggaatgtgttcaggaactgtgcttattactggagctttggtgcttacattgcttattacgtcaaccatcccttgtacactccagttagtgaccttcagatgaagattggtttcgggtttggtttggtttgccaagtcgcaaacttttactgtcacatattgctgaagaatctgagggaccccagtggggctggaggctaccagattccacgcggtttcctcttcaacattgttacatgtgccaattacactaccgagatttaccaatggctaggattcaacatcgctactcagaccattgcaggatatgttttcctcgctgttgctgctctaatcatgactaattgggctcttggaaagcacagccgtctgagaaagatatttgatggaaaagatggaaagccaaagtatccaagaagatgggtgatacttcctccattcctttagaagccattgttgcttatcagtaaaagctcttaataaagctgaaaatgagactttctttgggttctctgtatcgtttccttttttgttcggtctatgtattggttataacatgtttattccttttgtttcaatatgttttgatttttgaagttagagagatttagaaatgtacttgtgtagttgtttctcacgcaaaccaattcctctttatgtatcgcatacatgagtcaataataaatatgattactag

SEQ ID NO: 103757 - protein, 310 aa, Arabidopsis thaliana; identical to SEQ ID NO: 27615
  peptide (1)..(310): Ceres Seq. ID no. 13613498

SEQ ID NO: 103758 - protein, 176 aa, Arabidopsis thaliana; identical to SEQ ID NO: 27616
  peptide (1)..(176): Ceres Seq. ID no. 13613499

SEQ ID NO: 103759 - DNA, 1641 bp, Arabidopsis thaliana
  misc_feature (1)..(1641): Ceres Seq. ID no. 13613500
  misc_feature (1)..(1641): Ortholog of  Ceres SEQ ID NO 13596816 as cited in SEQ ID NO 62287
ctattcgtcgtaataataaaaacacaactcaaacgattcacgggtttcacttggaatcgtttggttttctcatttccgaaatataaaaagatggccaaagcgccaccgtcaatctctcttctcctcctcctctgcgccgccgtattcctcaccatccccgccgtgatctccgccatcggtgttaactacggaactctcggaaacctcccaccaccgactcaggtggctaactttatcaagacacaaacttcgattgatagcgtcaagatcttcgatgtgaatcccgatatcctacgtgccttcgctggaactggtatctccgtcgttgtcaccgttcctaacggtgatattccggcgttggctaacggaagacaagctcgtcggtgggtttcggttaacattttgccgtttcatcctcagacgaagattaagtatatctcagtcggaaatgagattctgctcaccggagataataacatgatcaataatctcttaccggcgatgaggaatcttaacaacgctttggttcgtgctggtgtcagagatgttaaggttacaaccgcacactcacttaacatcatagcctatgacctgaccggtgcaccaagcagcggtagattcaggccgggttgggacaaaggcatattggctccaatcctagcttaccatcgccgaaccaagtcacctttcatggttaacccgtacccttactttggttttgaccccaaaaacgtcaacttcgcaattttccgaacaccgtacaaggcagtccgtgacccgttcacccgccacgtctacaccaacatgtttgatgcactcatggactcgacatactcagccatgaaagctcttggatacggtgatgttaacattgtcgttggcgagactggctggccatctgcttgtgacgcaccttggtgctcgcctgcgaatgctgcttggttcaacctcaacattatcaaacgtgcacaaggccaagggacacctctcatgcctaacagacggttcgagacatacattttcggtctcttcaacgaagaaggcaaacccggtccgaccgcagagcgtaactggggacttttccgagcagatttctccccggtttacgatgttggtcttctccgaaacggacaaggcggtggaggccgcccagcattgcccgcacctagtactgccggcggtaaatggtgtgtagcgaggtccggggcgacgaatactcagctgcaagacagtattaattgggtgtgtggtcagggtgttgactgtaaaccgatccaagctggtggttcgtgctttaacccgagcagtttgaggacgcacgcatcttttgttatgaatgcttatttccagagccacggccgcactgatggtgcttgtaacttcagtggaactggtatgatcgtagggaacaacccaagcaatggtgcatgtaagtactaaggagattgtctatgtagtagtatttgtctggaaaatcctaacataatggttctgaggaactttggatttgagagatcatcagctttgtgtttaatttcggattatcctaattttaagatttttttgttaattattttttcgctgattccttttatttaaataaagtggaacttccataaaatttgcttcagcgttacgctt

SEQ ID NO: 103760 - protein, 479 aa, Arabidopsis thaliana
  peptide (1)..(479): Ceres Seq. ID no. 13613501
LFVVIIKTQLKRFTGFTWNRLVFSFPKYKKMAKAPPSISLLLLLCAAVFLTIPAVISAIGVNYGTLGNLPPPTQVANFIKTQTSIDSVKIFDVNPDILRAFAGTGISVVVTVPNGDIPALANGRQARRWVSVNILPFHPQTKIKYISVGNEILLTGDNNMINNLLPAMRNLNNALVRAGVRDVKVTTAHSLNIIAYDLTGAPSSGRFRPGWDKGILAPILAYHRRTKSPFMVNPYPYFGFDPKNVNFAIFRTPYKAVRDPFTRHVYTNMFDALMDSTYSAMKALGYGDVNIVVGETGWPSACDAPWCSPANAAWFNLNIIKRAQGQGTPLMPNRRFETYIFGLFNEEGKPGPTAERNWGLFRADFSPVYDVGLLRNGQGGGGRPALPAPSTAGGKWCVARSGATNTQLQDSINWVCGQGVDCKPIQAGGSCFNPSSLRTHASFVMNAYFQSHGRTDGACNFSGTGMIVGNNPSNGACKY

SEQ ID NO: 103761 - protein, 449 aa, Arabidopsis thaliana; identical to SEQ ID NO: 28203
  peptide (1)..(449): Ceres Seq. ID no. 13613502

SEQ ID NO: 103762 - protein, 320 aa, Arabidopsis thaliana; identical to SEQ ID NO: 28204
  peptide (1)..(320): Ceres Seq. ID no. 13613503

SEQ ID NO: 103763 - DNA, 1392 bp, Arabidopsis thaliana
  misc_feature (1)..(1392): Ceres Seq. ID no. 13613511
  misc_feature (1)..(1392): Ortholog of  Ceres SEQ ID NO 14315418 as cited in SEQ ID NO 57506
agacgagaggcacacaaaaagagatacaaaaccaaaactttcaagcaaagcaattcaatttcaatcaaaaaccaaatcgaagatctttgaaagtttcctttttttccgaaatctgagcttgggtattgttggataagcttctcggagattgagattgaggattttgataggtgaggagattgaaagatttggatttttgggcggcaaaaatggtgatgcagacggaagctagggttggtgtgagctcaggacatggcgtagcttcgtcttctcatcgtttaacgcaggaccagagatcacatatcgaatcggcgtcgcagctcttagccggaggactcgctggtgcttttagcaagacttgtactgctcctctatctcgtctcaccattctcttccaggtgcaaggtatgcacacaaatgctgcagctttaagaaagccaagcatattacacgaggcttcacggatattgaatgaagaaggattgaaagctttttggaaagggaatctagttactattgctcaccggcttccatattcttctgttaatttctacgcatatgaacactacaagaagttcatgtatatggttactgggatggaaaatcacaaggagggtataagttcaaacctttttgtacattttgtagccggtggtttggctggaatcacagctgcttctgccacttatccacttgatcttgttagaactcgtcttgctgctcagacaaaagtaatctactactcgggtatctggcatactctgcgctctattacaaccgatgaaggtatcttgggcctctacaagggactaggaacaacgcttgtgggtgttgggcctagtattgccattagcttttctgtgtatgaatcattgagatcttattggaggtcaactaggccccatgattcccctatcatggtcagtctagcttgtggaagtctttcaggaatagcatcttcaacagctacgtttccattggatctggtgagaagaaggaagcagctggaaggaataggcgggcgagcggtagtgtacaagacaggtttgttaggcacattaaagcgtattgttcaaacggaaggagcgagaggcctgtacagaggaattcttccagagtactacaaagtggtacctggtgtagggatttgcttcatgacctacgagacactcaagctttacttcaaggatctttcttcgaatctataacggtttaaaaggttggtagatttgtttaggtctatttttggtgagaggaaaaaaactgtaaaaaccaaacagcggaaaatgataatgtatacgaaatgtagaattatatatgtagttgttggatgtagcttatacgagattaacatttgtattggtacaatccttttccattgttacatggctt

SEQ ID NO: 103764 - protein, 332 aa, Arabidopsis thaliana; identical to SEQ ID NO: 36967
  peptide (1)..(332): Ceres Seq. ID no. 13613512

SEQ ID NO: 103765 - protein, 330 aa, Arabidopsis thaliana; identical to SEQ ID NO: 36968
  peptide (1)..(330): Ceres Seq. ID no. 13613513

SEQ ID NO: 103766 - protein, 266 aa, Arabidopsis thaliana; identical to SEQ ID NO: 36969
  peptide (1)..(266): Ceres Seq. ID no. 13613514

SEQ ID NO: 103767 - DNA, 1271 bp, Arabidopsis thaliana
  misc_feature (1)..(1271): Ceres Seq. ID no. 13613515
  misc_feature (1)..(1271): Ortholog of  Ceres SEQ ID NO 15224418 as cited in SEQ ID NO 51528
  misc_feature (1)..(1271): Ortholog of  Ceres SEQ ID NO 13593846 as cited in SEQ ID NO 53152
  misc_feature (1)..(1271): Ortholog of  Ceres SEQ ID NO 12781936 as cited in SEQ ID NO 56320
  misc_feature (1)..(1271): Ortholog of  Ceres SEQ ID NO 13659489 as cited in SEQ ID NO 66986
  misc_feature (1)..(1271): Ortholog of  Ceres SEQ ID NO 15175169 as cited in SEQ ID NO 0
cctttcccaattgcttccacgacgacggaggaggagaagcaaacccagaaaccttaaaaattcagaaaaagggacgaccttttttccgatcttatcgatttttgaatgagattagaagaacctatcttctaagtttttctttgatatctttttctctttgatcgatggatgagtcgttcgctaatctacaatcaagccatttgcttggttcagttccggctgtgatcagcgacgacaagagaagcacaaatgtaccaatagcaagcgtcaatgaaggcccttctgcaagcatgcaaatatttccaccgaatctaggaaacaatacaaagggttatcaaactcttgagagcccaacagaaggaccagcacaacagccatcaaacaactggaagggcttttttaatgtctactcatatacccaatacttcgacgtggacacggacgttgttttgaacagattaatgagctctttatatcctactagtggagattttttcaacaagattgatgcaaaccctgatttgtatggacttgtctggatctgcactacgcttgtgtttgtgcttgcttctctcggaaattgtgctacatatctcgtgaagaaacgaaccgacagtaatgctccttggatctttgatgtgaactatatgaatttggcagcatctataatatatggatatgcaataattgtgcctctgggattttattttgcactccgttatatggggtccaaagctgatcttctaagattctggtgcctttggggatactctctcttcattttcgttccaacctctcttccattgcttattccagtagagtttctgagatgggtgattatactcttagctggtagtgcatcatcgtgttttgttgccctgaatctacggtcttacctcgagacgaacaatgatatcacggttgtaatggctgcagcatttggtctgcaaatggttctttcaatcttcatcaaggtctggttctttccttaatctccatgagacggtcaacaccagacaaaacatatatatgtaaaaacctttagattttgatgtgctgcggtagaactaagaatgtcgttaccagaaaatgaaacccacaaagtagaagaaggaacatatccgctaaatcattcggtttcgtttttactggcggattttcatcgttgcttgtaacgattgtgttttttcattttttggttttgtttgctaccacttattttgcttatggagtaaaaatatataaaagaaaaaaaggaagttttcaagatt

SEQ ID NO: 103768 - protein, 275 aa, Arabidopsis thaliana; identical to SEQ ID NO: 43356
  peptide (1)..(275): Ceres Seq. ID no. 13613516

SEQ ID NO: 103769 - protein, 233 aa, Arabidopsis thaliana; identical to SEQ ID NO: 43357
  peptide (1)..(233): Ceres Seq. ID no. 13613517

SEQ ID NO: 103770 - protein, 176 aa, Arabidopsis thaliana; identical to SEQ ID NO: 43358
  peptide (1)..(176): Ceres Seq. ID no. 13613518

SEQ ID NO: 103771 - DNA, 1723 bp, Arabidopsis thaliana
  misc_feature (1)..(1723): Ceres Seq. ID no. 13613523
  misc_feature (1)..(1723): Ortholog of  Ceres SEQ ID NO 15177285 as cited in SEQ ID NO 52481
  misc_feature (1)..(1723): Ortholog of  Ceres SEQ ID NO 13594068 as cited in SEQ ID NO 58624
aacaaattcagacaagaaacctcaacggctcagacccaccaataccaattttttaaagagatttctgtcacaattgcgaatcgagctggattcttgggctcgctttttctttcaatcaaaagtttcgatattagtgaaggataaaattcgctaaaaaaagagaattttttttgttaaaaaaattataaaagctggctttctcaaaatttctccatgtggtcgacgaagaagacgaagaagacgaagaagaaagagaaagtctcttagcaaacatgaccgccaccgaagctaagaatcgcaaaatcaatgtcggagatggagatgacgttgttgatatcgaaatccctgacactgctcatcaaattagcagcgattcatggtttcaggtggcgttcgttttgaccaccggtataaacagcgcgtatgtgttgggatattcaggaacaattatggttcctttaggttggattggtggtgtggttggtcttcttattgctactgcaatctctctttatgcaaacactctaatagctaagcttcatgagtttggtggcagaagacacattcgctatagagaccttgctggattcatttacggtaggaaggcttatcatcttacatggggattgcaatatgttaatcttttcatgattaattgtggattcattatcctagctggttccgccttaaaggctgtttatgtgcttttcagggatgatcataccatgaaactacctcattttatagccattgctggtttgatttgtgcgattttcgctattgggattcctcatttatcggctcttggggtctggcttggagtttcgaccttcctcagtctcatctatattgttgtggcaatcgtgctatcggttagagatggagtaaaaacaccttcaagagattacgagatacaaggatcatcattgagcaaactttttaccatcacaggagcagccgcaaatctggttttcgcattcaacaccgggatgcttccagaaattcaggcaacagtgaggcaaccagttgttaaaaacatgatgaaggctctatactttcaattcacagcgggtgttttaccgatgtacgcagttacattcatcggatattgggcttatggatcctcaacctcgacctatctactaaacagtgttaatggcccactctgggtcaaagcccttgctaacgtctctgctatccttcaatctgttatctctttgcacatatttgcgagtccaacatatgagtacatggacacaaagtatgggatcaaaggaaacccatttgcgataaagaacctgctgtttaggatcatggcgagaggcgggtacatagcggtaagcacgcttatctcagcgctgttgccgttcctcggtgacttcatgagcctaactggtgcagtgagcacattccctctcacattcattctagccaaccacatgtactataaggcaaagaacaataagctgaatgctatgcaaaagctatggcattggcttaacgttgtcttctttagtttgatgtctgttgctgcagccattgcagctgtcagactcatcgccgttgattccaaaaatttccatgtttttgcagatttgtaattcattatattatatagtcaattgtgtatcctttattcttaggcaggtttatttctcctgtaagcttgtattctctctctatttgtcttaccattagagcctaaataaataaatcaagttct

SEQ ID NO: 103772 - protein, 442 aa, Arabidopsis thaliana; identical to SEQ ID NO: 40259
  peptide (1)..(442): Ceres Seq. ID no. 13613524

SEQ ID NO: 103773 - protein, 383 aa, Arabidopsis thaliana; identical to SEQ ID NO: 40260
  peptide (1)..(383): Ceres Seq. ID no. 13613525

SEQ ID NO: 103774 - protein, 317 aa, Arabidopsis thaliana; identical to SEQ ID NO: 24809
  peptide (1)..(317): Ceres Seq. ID no. 13613526

SEQ ID NO: 103775 - DNA, 1151 bp, Arabidopsis thaliana
  misc_feature (1)..(1151): Ceres Seq. ID no. 13613535
  misc_feature (1)..(1151): Ortholog of  Ceres SEQ ID NO 14302351 as cited in SEQ ID NO 66690
aaacaaatcctctctgattcgatgggttttagcaaagaagagattagtaaaaccagaaagctttggtcatctctatggagaggaatcaaaactatattcgttttgttcacaatgttcttctcttttctccttgtctctgctcctatcttcctcgccgtcgccgatgctctcctcccttccgctctcctccaccgcttctcttcgccggcgactctctcttctcatctcaccaactacgatttccgtcactccctcatcgatattcctttaatctcaatcattagatccgctgttatactctgtgtttatggactctgtgacggaccaaaactatcgagaggaccgtatctgacaataacaatgatttgttcaatatcttctctaatctacgtttcgttaaaagctgcgtttgtgttcggtgagccagcgatcggagacggaggaggaaactacttcagagcggcggaagtggctctgtttctatgctcgtcagtcttagccataggtcacatcgttgtggcttatcgaacaagttgtagagaaagaaaaaagcttctcgtcttcaaaatcgacattgaagccgtttcggcttgtaaaaacgtgtacccgagataccaaaagatcttattacaacaagagagactcaaatagagacgtatttccaagagaatcaatacttgtaaatatatacacatacctcaacatgtaaataaaactaatatataaaaacatacggcgtataaatgtaacttctccttctgcctttcggcgttgacccatcaactccttcgcttttaagtttcagaaggatccaaagcaaaaggaatggagattaattatataacctatgcttttttaaatgagacatttcagatgaactggcagttgttagctttaacattatattagttagggcgatttgtaaataatccagagttcctcaatgagaaaagaagcccaaggctgtctctccgttttgtatatatgtttatgtttgtatttctttgtggttttaatatatgttttgtaattgtaatttgtaagcataagcacatagtatgtgatacgtccgcgtggatttctttatacgtcaccaaaatctctaatagaatcgtaaagcaacctttttacgatcattatctatttatctt

SEQ ID NO: 103776 - protein, 216 aa, Arabidopsis thaliana
  peptide (1)..(216): Ceres Seq. ID no. 13613536
KQILSDSMGFSKEEISKTRKLWSSLWRGIKTIFVLFTMFFSFLLVSAPIFLAVADALLPSALLHRFSSPATLSSHLTNYDFRHSLIDIPLISIIRSAVILCVYGLCDGPKLSRGPYLTITMICSISSLIYVSLKAAFVFGEPAIGDGGGNYFRAAEVALFLCSSVLAIGHIVVAYRTSCRERKKLLVFKIDIEAVSACKNVYPRYQKILLQQERLK

SEQ ID NO: 103777 - protein, 209 aa, Arabidopsis thaliana; identical to SEQ ID NO: 40232
  peptide (1)..(209): Ceres Seq. ID no. 13613537

SEQ ID NO: 103778 - protein, 179 aa, Arabidopsis thaliana; identical to SEQ ID NO: 40233
  peptide (1)..(179): Ceres Seq. ID no. 13613538

SEQ ID NO: 103779 - DNA, 780 bp, Arabidopsis thaliana
  misc_feature (1)..(780): Ceres Seq. ID no. 13613539
  misc_feature (1)..(780): Ortholog of  Ceres SEQ ID NO 15173990 as cited in SEQ ID NO 1070
  misc_feature (1)..(780): Ortholog of  Ceres SEQ ID NO 13594900 as cited in SEQ ID NO 52042
aaagacgttataccttccccatccacattttcttgcttaactgcagaacaacaccaaattcgaccctatcaagttttgattcgtgtctacatagaaagagtctcaattgttctgtccctggacttttttttgtttcgtttttcttgttaagatcgaaaactctgttttggtagatttttgtgttcttgattttgattcaagatggggaggctgtttgtggtgaatcttgaagggaagatctatagctgcaaacactgtaagactcatcttgctacttatgaagacatcatctccaagtcttttcactgcaagcatgggaaagcttatctcttcaataaggttgccaatgtttccattggagagactgaagaaagactgatgatgactggtaaacatactgtggctgatattttctgtgtctcgtgtggatcaatcgttggctggaaatacgagactgctcatgagaagaaccagaagtacaaagaaggaaaatcagtgcttgaaagatttaagatatcgggtcctgatgggagcaactattgggtgagtagccatggaaggcatataggtggaagtgatgcagatgatgcttgaatcatctctctctctctctattctctgatttgaccatttcatgtaaatgtaaattattcaacctccattccaatttcttgtaataagactaaccaatactctttcttctcttgacttattatgtctcagtaaataaaaaatctgattctgtctaatgactatttattggttttctgtgaaaccatc

SEQ ID NO: 103780 - protein, 130 aa, Arabidopsis thaliana; identical to SEQ ID NO: 29995
  peptide (1)..(130): Ceres Seq. ID no. 13613540

SEQ ID NO: 103781 - protein, 71 aa, Arabidopsis thaliana; identical to SEQ ID NO: 29996
  peptide (1)..(71): Ceres Seq. ID no. 13613541

SEQ ID NO: 103782 - protein, 70 aa, Arabidopsis thaliana; identical to SEQ ID NO: 29997
  peptide (1)..(70): Ceres Seq. ID no. 13613542

SEQ ID NO: 103783 - DNA, 1507 bp, Arabidopsis thaliana
  misc_feature (1)..(1507): Ceres Seq. ID no. 13613543
  misc_feature (1)..(1507): Ortholog of  Ceres SEQ ID NO 15177652 as cited in SEQ ID NO 56858
  misc_feature (1)..(1507): Ortholog of  Ceres SEQ ID NO 13597162 as cited in SEQ ID NO 63955
gttgtttatttctgaagaagaagaaaaacagagcatcataagaagaaaaaaaaaagcaatgggatccttagttcatgtgaaagaagccacagttattactccttccgaccaaacaccttcttctgttctgtctctctccgctttagattctcagcttttcctccgattcaccattgaatacctcctcgtttacccacccgtttccgacccggagtattctctctccggtcgtctcaaatccgctctctctcgcgctctcgttccttacttccctttctccggccgcgtccgagaaaaacccgacggcggcggaggtctcgaggtcaattgccgtggccaaggtgctctgtttcttgaagccgtctctgacatcctcacgtgccttgactttcagaaacctccccggcacgtgactagctggagaaagcttctttcgctccacgtcatcgatgtcctcgctggtgctccacctctcgtcgttcagctcacttggctccgtgacggtggtgctgctttagccgtcggtgttaaccactgcgtctccgatggaatcggtagcgccgagtttctcactttattcgccgagttatctaaagactcactgagtcaaaccgagttaaaacggaaacatctctgggatcgtcaattgcttatgccgtctccgattcgtgactcgttgagtcatcccgagttcaaccgtgttcccgatctatgcggattcgttaaccgattcaacgccgagcgactcgttcctacatcggttgtcttcgagagacagaaacttaacgagctaaagaaactcgcgagtcgactcggtgagttcaattctaaacacacatcgttcgaggtactctctgcacatgtatggcggagctgggcgagatcactgaacttgccatcgaatcaggtccttaagcttttgtttagcgtcaacattagagaccgagtcaaaccgagtctacccagtgggttctacgggaacgcattcgtcgtcggatgtgctcaaaccaccgtgaaagacttgacggagaaaggattaagctacgcgacgatgctcgtgaaacaagcgaaggagcgagtcggtgacgagtacgtcagatcggtggtggaagctgtgagcaaggagagagcgagtcctgactcggttggagtcttgatattgtcgcaatggtcacgtctcggtttagagaagcttgattttggtttgggtaaaccggttcatgttggatcggtctgttgcgaccgttactgtttgttgcttccgattcctgaacaaaatgacgccgttaaagtaatggtcgccgttccgtcaagctctgttgacacgtacgagaatcttgtgacgagtcctaacgcttagattagagaaaggataaattctaattttttactctttacgttttttacttttttacctttttctaaaataaattatgaactctcctccgttgacttgtaaaatatgagttttgacttattttattttaaatccatttttggttttctt

SEQ ID NO: 103784 - protein, 452 aa, Arabidopsis thaliana
  peptide (1)..(452): Ceres Seq. ID no. 13613544
LFISEEEEKQSIIRRKKKAMGSLVHVKEATVITPSDQTPSSVLSLSALDSQLFLRFTIEYLLVYPPVSDPEYSLSGRLKSALSRALVPYFPFSGRVREKPDGGGGLEVNCRGQGALFLEAVSDILTCLDFQKPPRHVTSWRKLLSLHVIDVLAGAPPLVVQLTWLRDGGAALAVGVNHCVSDGIGSAEFLTLFAELSKDSLSQTELKRKHLWDRQLLMPSPIRDSLSHPEFNRVPDLCGFVNRFNAERLVPTSVVFERQKLNELKKLASRLGEFNSKHTSFEVLSAHVWRSWARSLNLPSNQVLKLLFSVNIRDRVKPSLPSGFYGNAFVVGCAQTTVKDLTEKGLSYATMLVKQAKERVGDEYVRSVVEAVSKERASPDSVGVLILSQWSRLGLEKLDFGLGKPVHVGSVCCDRYCLLLPIPEQNDAVKVMVAVPSSSVDTYENLVTSPNA

SEQ ID NO: 103785 - protein, 433 aa, Arabidopsis thaliana; identical to SEQ ID NO: 39300
  peptide (1)..(433): Ceres Seq. ID no. 13613545

SEQ ID NO: 103786 - protein, 235 aa, Arabidopsis thaliana; identical to SEQ ID NO: 39301
  peptide (1)..(235): Ceres Seq. ID no. 13613546

SEQ ID NO: 103787 - DNA, 1602 bp, Arabidopsis thaliana
  misc_feature (1)..(1602): Ceres Seq. ID no. 13613549
  misc_feature (1)..(1602): Ortholog of  Ceres SEQ ID NO 13659033 as cited in SEQ ID NO 66372
  misc_feature (1)..(1602): Ortholog of  Ceres SEQ ID NO 13655724 as cited in SEQ ID NO 68973
  misc_feature (1)..(1602): Ortholog of  Ceres SEQ ID NO 12625899 as cited in SEQ ID NO 69079
agtatttcttgaagcaattccaaaataaagttcttttggcttcctcctcccacattcttatttggttgaggagaatgagatcatcaagaacacaaagtgttcatttcttaattttatctcctcttttcctaataatataaaatttgaaatcacatttgtaacactaattctcaaatcctaaacatgaaaccttcatcaccaatttcactcactagttcttcaattgctagaaaagctcgtttttctccttacctcttcacactcttagccttcattcttttcgtctctgtcctctatggtgaagattttatgtgcatctttggacagctcgagcctaacttcgtcctcccgccttctcgaacacccgaaaagaataagaaatcggagaagcttgcgtttgctattggtaaaacagaggaaagctgtgacgttttcagcgggaaatgggtgagagatgaagtctcccgaccactgtatgaggaatgggagtgtccgtacattcaacctcagcttacatgtcaagaacacggccgtcccgacaaagactaccagttttggcggtggcagcctaatcactgcgatcttccctcgttcaacgcgtcactgatgctggagacattaagagggaagaggatgatgtatgtaggagactcgttaaaccgtggaatgtttgtatcaatgatttgtcttcttcatcgtcttattcctgaagatcagaaatcaattaaaaccaatggttccctcactgtcttcactgccaaggagtataacgcgacgatagagttctattgggcaccgtttcttctagaatcgaattcagacgatgcaattgtccatagaatatcggatagggttgtgagaaaaggatcaattaacaaacatggtcgtcactggaaaggagtcgatataatcatcttcaacacttatctgtggtggatgactggattgaagatgaacatcttgcaaggatcgtttgatgataaagagaagaatatcgtagaggtttcgactgaagatgcgtaccggatgggtatgaagagtatgttgagatgggtgaagaacaacatggatcgtaagaaaactagggtcttcttcactagcatgtctccaacgcatgccaaggggatagattggggaggtgaaccgggtcagaattgctataatcagacaacacttatagaagatccaagctactggggatcagattgtaggaaaagcataatgaaagtgattggagaagtgtttggaagatcgaaaacaccgataacgttactgaacataacgcaaatgtcgaattacaggaaagatgcacatacgtcgatatacaagaagcagtggagtccacttacagcggagcagctggagaatccaacgagctatgcggattgtgtacattggtgcttgcctggccttcaagatacttggaatgagcttctctttgctaaacttttctatacttgagataagagaaaacatttttttcctttgaagacgacagcgctttttgagtttggaaagagatcttgtggagaaattgtaaaatttagtcattgaattgatattgtcttttttggttgtgagataaaaaggtttgacaaatcg

SEQ ID NO: 103788 - protein, 425 aa, Arabidopsis thaliana
  peptide (1)..(425): Ceres Seq. ID no. 13613550
MKPSSPISLTSSSIARKARFSPYLFTLLAFILFVSVLYGEDFMCIFGQLEPNFVLPPSRTPEKNKKSEKLAFAIGKTEESCDVFSGKWVRDEVSRPLYEEWECPYIQPQLTCQEHGRPDKDYQFWRWQPNHCDLPSFNASLMLETLRGKRMMYVGDSLNRGMFVSMICLLHRLIPEDQKSIKTNGSLTVFTAKEYNATIEFYWAPFLLESNSDDAIVHRISDRVVRKGSINKHGRHWKGVDIIIFNTYLWWMTGLKMNILQGSFDDKEKNIVEVSTEDAYRMGMKSMLRWVKNNMDRKKTRVFFTSMSPTHAKGIDWGGEPGQNCYNQTTLIEDPSYWGSDCRKSIMKVIGEVFGRSKTPITLLNITQMSNYRKDAHTSIYKKQWSPLTAEQLENPTSYADCVHWCLPGLQDTWNELLFAKLFYT

SEQ ID NO: 103789 - protein, 383 aa, Arabidopsis thaliana
  peptide (1)..(383): Ceres Seq. ID no. 13613551
MCIFGQLEPNFVLPPSRTPEKNKKSEKLAFAIGKTEESCDVFSGKWVRDEVSRPLYEEWECPYIQPQLTCQEHGRPDKDYQFWRWQPNHCDLPSFNASLMLETLRGKRMMYVGDSLNRGMFVSMICLLHRLIPEDQKSIKTNGSLTVFTAKEYNATIEFYWAPFLLESNSDDAIVHRISDRVVRKGSINKHGRHWKGVDIIIFNTYLWWMTGLKMNILQGSFDDKEKNIVEVSTEDAYRMGMKSMLRWVKNNMDRKKTRVFFTSMSPTHAKGIDWGGEPGQNCYNQTTLIEDPSYWGSDCRKSIMKVIGEVFGRSKTPITLLNITQMSNYRKDAHTSIYKKQWSPLTAEQLENPTSYADCVHWCLPGLQDTWNELLFAKLFYT

SEQ ID NO: 103790 - protein, 284 aa, Arabidopsis thaliana
  peptide (1)..(284): Ceres Seq. ID no. 13613552
MLETLRGKRMMYVGDSLNRGMFVSMICLLHRLIPEDQKSIKTNGSLTVFTAKEYNATIEFYWAPFLLESNSDDAIVHRISDRVVRKGSINKHGRHWKGVDIIIFNTYLWWMTGLKMNILQGSFDDKEKNIVEVSTEDAYRMGMKSMLRWVKNNMDRKKTRVFFTSMSPTHAKGIDWGGEPGQNCYNQTTLIEDPSYWGSDCRKSIMKVIGEVFGRSKTPITLLNITQMSNYRKDAHTSIYKKQWSPLTAEQLENPTSYADCVHWCLPGLQDTWNELLFAKLFYT

SEQ ID NO: 103791 - DNA, 1383 bp, Arabidopsis thaliana
  misc_feature (1)..(1383): Ceres Seq. ID no. 13613553
  misc_feature (1)..(1383): Ortholog of  Ceres SEQ ID NO 15175597 as cited in SEQ ID NO 58317
aaacctttctcttctctgctaacgagaaaacaaaagctatcgtctttgctactactactactactattattacattgaatcctttgtgttcttcttcttcagctgctactttgttcgagtgctttcttacatgccgtcggagattgttgacaggaaaaggaagtctcgtggaacacgagatgtagctgagattctaaggcaatggagagagtacaatgagcagattgaggcagaatcttgtatcgatggtggtggtccaaaatcaatccgaaagcctcctccaaaaggttcgaggaagggttgtatgaaaggtaaaggtggacctgaaaacgggatttgtgactatagaggagttagacagaggagatggggtaaatgggttgctgagatccgtgagccagacggaggtgctaggttgtggctcggtactttctccagttcatatgaagctgcattggcttatgacgaggcggccaaagctatatatggtcagtctgccagactcaatcttcccgagatcacaaatcgctcttcttcgactgctgccactgccactgtgtcaggctcggttactgcattttctgatgaatctgaagtttgtgcacgtgaggatacaaatgcaagttcaggttttggtcaggtgaaactagaggattgtagcgatgaatatgttctcttagatagttctcagtgtattaaagaggagctgaaaggaaaagaggaagtgagggaagaacataacttggctgttggttttggaattggacaggactcgaaaagggagactttggatgcttggttgatgggaaatggcaatgaacaagaaccattggagtttggtgtggatgaaacgtttgatattaatgagctattgggtatattaaacgacaacaatgtgtctggtcaagagacaatgcagtatcaagtggatagacacccaaatttcagttaccaaacgcagtttccaaattctaacttgctcgggagcctcaaccctatggagattgctcaaccaggagttgattatggatgtccttatgtgcagcccagtgatatggagaactatggtattgatttagaccatcgcaggttcaatgatcttgacatacaggacttggattttggaggagacaaagatgttcatggatctacataagatttcaaatttcgtttgactggcctaagtttgtgattctgctccgagacggtgtagctgttactagctagaagctgcccttctttgaagctactgatactttctgatattaatggttgtgagacgtagtacatgtagttaggtaatgtaggacaagttcaaatatgattccttctttctttttcttgtgaatacatatgacatatgaagaagttcaaacgttgggt

SEQ ID NO: 103792 - protein, 341 aa, Arabidopsis thaliana
  peptide (1)..(341): Ceres Seq. ID no. 13613554
MPSEIVDRKRKSRGTRDVAEILRQWREYNEQIEAESCIDGGGPKSIRKPPPKGSRKGCMKGKGGPENGICDYRGVRQRRWGKWVAEIREPDGGARLWLGTFSSSYEAALAYDEAAKAIYGQSARLNLPEITNRSSSTAATATVSGSVTAFSDESEVCAREDTNASSGFGQVKLEDCSDEYVLLDSSQCIKEELKGKEEVREEHNLAVGFGIGQDSKRETLDAWLMGNGNEQEPLEFGVDETFDINELLGILNDNNVSGQETMQYQVDRHPNFSYQTQFPNSNLLGSLNPMEIAQPGVDYGCPYVQPSDMENYGIDLDHRRFNDLDIQDLDFGGDKDVHGST

SEQ ID NO: 103793 - protein, 283 aa, Arabidopsis thaliana
  peptide (1)..(283): Ceres Seq. ID no. 13613555
MKGKGGPENGICDYRGVRQRRWGKWVAEIREPDGGARLWLGTFSSSYEAALAYDEAAKAIYGQSARLNLPEITNRSSSTAATATVSGSVTAFSDESEVCAREDTNASSGFGQVKLEDCSDEYVLLDSSQCIKEELKGKEEVREEHNLAVGFGIGQDSKRETLDAWLMGNGNEQEPLEFGVDETFDINELLGILNDNNVSGQETMQYQVDRHPNFSYQTQFPNSNLLGSLNPMEIAQPGVDYGCPYVQPSDMENYGIDLDHRRFNDLDIQDLDFGGDKDVHGST

SEQ ID NO: 103794 - DNA, 907 bp, Arabidopsis thaliana
  misc_feature (1)..(907): Ceres Seq. ID no. 13613560
  misc_feature (1)..(907): Ortholog of  Ceres SEQ ID NO 15178260 as cited in SEQ ID NO 59907
cctctttaagagtcacttgactttaatatttctctttttgtttctttctccttttctctgttttttcttttcttttctctttgcgattcgctgagagcatgcctgaatgtcaagagaaagggagagatttgaagagatagggaagaagatcaaaagagaagcagatgcttggcctcatcaaatggctggaattagaagaccaatgtcgggtcctcccggaaccctcaataccattacgccttgtgctgcctgcaagcttttgcgccgtagatgtgctcaagaatgtcccttttcgccatatttctccccacacgagcctcataagttcgcttccgtccacaaagtctttggagctagtaacgtctccaagatgctaatggaagtacctgagagccagagagcagatgccgcgaatagccttgtgtatgaagcaaacgtgaggctaagagatccggtgtacggatgcatgggagccatctcagctctacaacaacaagtccaagctttacaagccgagctcacggccgtaagatccgagattcttaagtacaagcaacgagaagctgtcgccactttgatcgtaccttccaactcccaagttgccggatttcacaactccggcggtgtttccgtcattgcaccaccaccacaaagaccaacaactccaccacaacctacaacggctcatcctccttctccatcttcttgtgttttctctcaaccaaccacaagagacttagaatacggcaacattgaaagtgagaacaactacttcggttaaatttttattgtatcattctacaaacacatacaaatacatataattaatttatttcgataatttgtgatccggtgactaataaattaaattaaattaaattaatataagtgaacaaggttggtcttg

SEQ ID NO: 103795 - protein, 224 aa, Arabidopsis thaliana; identical to SEQ ID NO: 38408
  peptide (1)..(224): Ceres Seq. ID no. 13613561

SEQ ID NO: 103796 - protein, 199 aa, Arabidopsis thaliana; identical to SEQ ID NO: 38409
  peptide (1)..(199): Ceres Seq. ID no. 13613562

SEQ ID NO: 103797 - protein, 192 aa, Arabidopsis thaliana; identical to SEQ ID NO: 38410
  peptide (1)..(192): Ceres Seq. ID no. 13613563

SEQ ID NO: 103798 - DNA, 1252 bp, Arabidopsis thaliana
  misc_feature (1)..(1252): Ceres Seq. ID no. 13613591
  misc_feature (1)..(1252): Ortholog of  Ceres SEQ ID NO 15180036 as cited in SEQ ID NO 0
caatcatcctcttcctctaaattctcttcttctctttgctgctacagaaaaagaatcaagctttagaggcaagcaaggactcactcacccacaagtatcctcaccccatctactcatggacacagcattgacctcagaatcaggctgtgccgttatagccgataagggattcaatgtggatccttttttggtcgaggctcttcaaaaccctcgacatcgtctaacgattttgcggatggaacttgatgttcagaggttcttgcagagccctgatcagcagcaattcgagttccagcatttccctacatcatacctccgttttgcggctcatcgtgttgctaatcactatggactaattacatcagttcgagatggtggtgcagatggtaatgagagcagaattgtcgtgactaaatctagtgatagcagatttcctgctgctcgactatctgaaatccctgtgaaacagtcagaaactggcaagtttgagcatatgaaagttgttataaagccaagacctactaaaggatctggaatggaaggtgatgaactgaaaggtggtcttctgaaaagtgttgaagagaggaaagaagattacgacagggctcgagcacgcatatttaacggtcttgtgaacattgattgtaacgattcttcatctgaaactaatccttggagggtgaattgtagttctagcagagatgaaaatcaagtgttgaagaatggtaatatcgaagcagacaagaacaatatctctaggaagagcaatcctgcatctcgtattgcaattctcagagacagagagaaagatcgatatgaccctgactatgaccgcagcaattacaggtacattagtaacctcccagtcgatcaaaatttatgcgtggcacacttcaacattcagacaatggggacaccaatctatgatatgggatttagagggtatagtccaactgctcctccatctcttaacttgggtcaacattctgtcatgagcccctgcgtcaccacaggtttaaaccagccttcaagagatgctgctatgtacatgcaatggccaaatgcagcagctgtgatgtatactcattcatatgaccacttcagaaactccccttttcaggcgcagttctatccgcagccccttagtttcgattacatgcagaaccggtaattacttttctcatcatggctaaggatttgtgtaatccagattttgagacagtttgatgtcaaaaatagacaaacttaacct

SEQ ID NO: 103799 - protein, 389 aa, Arabidopsis thaliana
  peptide (1)..(389): Ceres Seq. ID no. 13613592
NHPLPLNSLLLFAATEKESSFRGKQGLTHPQVSSPHLLMDTALTSESGCAVIADKGFNVDPFLVEALQNPRHRLTILRMELDVQRFLQSPDQQQFEFQHFPTSYLRFAAHRVANHYGLITSVRDGGADGNESRIVVTKSSDSRFPAARLSEIPVKQSETGKFEHMKVVIKPRPTKGSGMEGDELKGGLLKSVEERKEDYDRARARIFNGLVNIDCNDSSSETNPWRVNCSSSRDENQVLKNGNIEADKNNISRKSNPASRIAILRDREKDRYDPDYDRSNYRYISNLPVDQNLCVAHFNIQTMGTPIYDMGFRGYSPTAPPSLNLGQHSVMSPCVTTGLNQPSRDAAMYMQWPNAAAVMYTHSYDHFRNSPFQAQFYPQPLSFDYMQNR

SEQ ID NO: 103800 - protein, 351 aa, Arabidopsis thaliana
  peptide (1)..(351): Ceres Seq. ID no. 13613593
MDTALTSESGCAVIADKGFNVDPFLVEALQNPRHRLTILRMELDVQRFLQSPDQQQFEFQHFPTSYLRFAAHRVANHYGLITSVRDGGADGNESRIVVTKSSDSRFPAARLSEIPVKQSETGKFEHMKVVIKPRPTKGSGMEGDELKGGLLKSVEERKEDYDRARARIFNGLVNIDCNDSSSETNPWRVNCSSSRDENQVLKNGNIEADKNNISRKSNPASRIAILRDREKDRYDPDYDRSNYRYISNLPVDQNLCVAHFNIQTMGTPIYDMGFRGYSPTAPPSLNLGQHSVMSPCVTTGLNQPSRDAAMYMQWPNAAAVMYTHSYDHFRNSPFQAQFYPQPLSFDYMQNR

SEQ ID NO: 103801 - protein, 311 aa, Arabidopsis thaliana
  peptide (1)..(311): Ceres Seq. ID no. 13613594
MELDVQRFLQSPDQQQFEFQHFPTSYLRFAAHRVANHYGLITSVRDGGADGNESRIVVTKSSDSRFPAARLSEIPVKQSETGKFEHMKVVIKPRPTKGSGMEGDELKGGLLKSVEERKEDYDRARARIFNGLVNIDCNDSSSETNPWRVNCSSSRDENQVLKNGNIEADKNNISRKSNPASRIAILRDREKDRYDPDYDRSNYRYISNLPVDQNLCVAHFNIQTMGTPIYDMGFRGYSPTAPPSLNLGQHSVMSPCVTTGLNQPSRDAAMYMQWPNAAAVMYTHSYDHFRNSPFQAQFYPQPLSFDYMQNR

SEQ ID NO: 103802 - DNA, 605 bp, Arabidopsis thaliana
  misc_feature (1)..(605): Ceres Seq. ID no. 13613603
  misc_feature (1)..(605): Ortholog of  Ceres SEQ ID NO 13594809 as cited in SEQ ID NO 51847
  misc_feature (1)..(605): Ortholog of  Ceres SEQ ID NO 12563124 as cited in SEQ ID NO 57104
acataagtctctctcttacattttgaaaccctaatttctcttcttttccccaaaaaaaaatgtctgaagttgagtaccggtgctttgtcggcggccttgcctgggccaccaatgatgaagatcttcaaaggacgttctcacagttcggcgacgttatcgattctaagatcattaacgaccgcgagagtggaagatcaaggggattcggattcgtcaccttcaaggacgagaaagccatgagggatgcgattgaagagatgaacggtaaagagctcgatggacgtgtcatcaccgtgaacgaggctcagtcgagaggtagcggcggtggcggaggaggccgtggtggaagcggtggtggttaccgcagcggaggcggtgatggtggaagttacggaggcggtggtggcggctggtaatcaaagatagagttgtttgcgtgctgctgctctgtttttggtttagatttggttttgtgtcaccacttctggtttggttatcgttcgtttggtttacttttttgatgaaacagtttcgtttaagtcttctttgtctggaacgaaatgttaattcgcgtgttgtttactaaatttataacgtttcctttt

SEQ ID NO: 103803 - protein, 118 aa, Arabidopsis thaliana; identical to SEQ ID NO: 40864
  peptide (1)..(118): Ceres Seq. ID no. 13613604

SEQ ID NO: 103804 - protein, 59 aa, Arabidopsis thaliana; identical to SEQ ID NO: 40865
  peptide (1)..(59): Ceres Seq. ID no. 13613605

SEQ ID NO: 103805 - DNA, 592 bp, Arabidopsis thaliana
  misc_feature (1)..(592): Ceres Seq. ID no. 13613606
  misc_feature (1)..(592): Ortholog of  Ceres SEQ ID NO 12563124 as cited in SEQ ID NO 57104
  misc_feature (1)..(592): Ortholog of  Ceres SEQ ID NO 12617639 as cited in SEQ ID NO 65219
acataagtctctctcttacattttgaaaccctaatttctcttcttttccccaaaaaaaaatgtctgaagttgagtaccggtgctttgtcggcggccttgcctgggccaccaatgatgaagatcttcaaaggacgttctcacagttcggcgacgttatcgattctaagatcattaacgaccgcgagagtggaagatcaaggggattcggattcgtcaccttcaaggacgagaaagccatgagggatgcgattgaagagatgaacggtaaagagctcgatggacgtgtcatcaccgtgaacgaggctcagtcgagaggtagcggcggtggcggaggaggttacggatctggtggaggcggtggtggccgaggatacggtggtggtggacgccgtgagggaggtggctacggaggcggtgatggtggaagttacggaggcggtggtggcggctggtaatcaaagatagagttgtttgcgtgctgctgctctgtttttggtttagatttggttttgtgtcaccacttctggtttggttatcgttcgtttggtttacttttttgatgaaacagtttcgtttaagtcttctttgtctg

SEQ ID NO: 103806 - protein, 131 aa, Arabidopsis thaliana; identical to SEQ ID NO: 20905
  peptide (1)..(131): Ceres Seq. ID no. 13613607

SEQ ID NO: 103807 - protein, 72 aa, Arabidopsis thaliana; identical to SEQ ID NO: 20906
  peptide (1)..(72): Ceres Seq. ID no. 13613608

SEQ ID NO: 103808 - protein, 65 aa, Arabidopsis thaliana; identical to SEQ ID NO: 20907
  peptide (1)..(65): Ceres Seq. ID no. 13613609

SEQ ID NO: 103809 - DNA, 591 bp, Arabidopsis thaliana
  misc_feature (1)..(591): Ceres Seq. ID no. 13613610
  misc_feature (1)..(591): Ortholog of  Ceres SEQ ID NO 12563124 as cited in SEQ ID NO 57104
cacataagtctctctcttacattttgaaaccctaatttctcttcttttccccaaaaaaaaatgtctgaagttgagtaccggtgctttgtcggcggccttgcctgggccaccaatgatgaagatcttcaaaggacgttctcacagttcggcgacgttatcgattctaagatcattaacgaccgcgagagtggaagatcaaggggattcggattcgtcaccttcaaggacgagaaagccatgagggatgcgattgaagagatgaacggtaaagagctcgatggacgtgtcatcaccgtgaacgaggctcagtcgagaggtagcggcggtggcggaggaggccgtggtggacgccgtgagggaggtggctacggaggcggtgatggtggaagttacggaggcggtggtggcggctggtaatcaaagatagagttgtttgcgtgctgctgctctgtttttggtttagatttggttttgtgtcaccacttctggtttggttatcgttcgtttggtttacttttttgatgaaacagtttcgtttaagtcttctttgtctggaacgaaatgttaattcgcgtgttgtttactaaattt

SEQ ID NO: 103810 - protein, 118 aa, Arabidopsis thaliana
  peptide (1)..(118): Ceres Seq. ID no. 13613611
MSEVEYRCFVGGLAWATNDEDLQRTFSQFGDVIDSKIINDRESGRSRGFGFVTFKDEKAMRDAIEEMNGKELDGRVITVNEAQSRGSGGGGGGRGGRREGGGYGGGDGGSYGGGGGGW

SEQ ID NO: 103811 - protein, 59 aa, Arabidopsis thaliana; identical to SEQ ID NO: 39123
  peptide (1)..(59): Ceres Seq. ID no. 13613612

SEQ ID NO: 103812 - DNA, 554 bp, Arabidopsis thaliana
  misc_feature (1)..(554): Ceres Seq. ID no. 13613613
  misc_feature (1)..(554): Ortholog of  Ceres SEQ ID NO 12563124 as cited in SEQ ID NO 57104
acataagtctctctcttacattttgaaaccctaatttctcttcttttccccaaaaaaaaatgtctgaagttgagtaccggtgctttgtcggcggccttgcctgggccaccaatgatgaagatcttcaaaggacgttctcacagttcggcgacgttatcgattctaagatcattaacgaccgcgagagtggaagatcaaggggattcggattcgtcaccttcaaggacgagaaagccatgagggatgcgattgaagagatgaacggtaaagagctcgatggacgtgtcatcaccgtgaacgaggctcagtcgagaggtagcggcggtgatggtggaagttacggaggcggtggtggcggctggtaatcaaagatagagttgtttgcgtgctgctgctctgtttttggtttagatttggttttgtgtcaccacttctggtttggttatcgttcgtttggtttacttttttgatgaaacagtttcgtttaagtcttctttgtctggaacgaaatgttaattcgcgtgttgtttactaaatttataacgtttcctttt

SEQ ID NO: 103813 - protein, 101 aa, Arabidopsis thaliana
  peptide (1)..(101): Ceres Seq. ID no. 13613614
MSEVEYRCFVGGLAWATNDEDLQRTFSQFGDVIDSKIINDRESGRSRGFGFVTFKDEKAMRDAIEEMNGKELDGRVITVNEAQSRGSGGDGGSYGGGGGGW

SEQ ID NO: 103814 - DNA, 1251 bp, Arabidopsis thaliana
  misc_feature (1)..(1251): Ceres Seq. ID no. 13613615
  misc_feature (1)..(1251): Ortholog of  Ceres SEQ ID NO 13596108 as cited in SEQ ID NO 68591
aatcaatcctcttgcggagaaactttgggaagagccgaagagaagtcgaggtctctctatctctctctttcgtacacttcgcgcttctcttcctgtcagaggcgtttctcatggctcctcttactctctccgttgatgtgaagagctcttcagcgacctctcatgatgtttcgaagagggtaatgcagagttcacagctcaaaataaacaaaggcttttttgcatctgttaatacacaagaagataaaccctttgatttcttccgcactctctttgaggggtttatagcaggaggtacagctggagttgtagttgaaacagctttatacccaattgatactattaagactagacttcaggcagctcgtggaggtggaaaaattgttttgaagggtctttattcaggattagctggaaatatcgctggtgtcttaccggcttcggctttatttgttggagtttacgaacccacaaagcagaaactgctgaagacctttcctgatcatttaagcgcagttgctcacctgactgcaggggccatcggtggacttgctgcatctctgattcgagtgcctacagaggttgtgaagcaaagaatgcagaccggacagtttacatcagctcccagtgctgttcgaatgattgcatcaaaagagggatttaggggtctctatgcaggataccggtccttccttttgcgagatttgccatttgatgctatacagttctgcatatatgagcagctttgcttggggtataaaaaagccgcgcgtagagagcttagtgatcctgagaacgctctaatcggtgcatttgctggtgctctgaccggagcagtcaccactccgcttgatgttattaagacaagattaatggttcagggatcagccaaacaatatcaaggaatcgttgactgtgttcaaacaattgtaagagaggaaggagctcctgctctcttaaagggtattgggccaagagtgttgtggataggtattggaggatcaatcttctttggtgtcctcgagagcactaagagaacacttgcacagagacgtcccaatacggttaaagaaaccaaagaagaataagtttctggccgcacaagaaaatgagtgtaaggtgacaatgtaacccctttgtgagttctatgtggtgtgagtttgtttaagtaccaattcaactttcattaaaaaaaaataaaaaaattagtgttcattttagattatataatttcttgattatttatatctg

SEQ ID NO: 103815 - protein, 361 aa, Arabidopsis thaliana; identical to SEQ ID NO: 22114
  peptide (1)..(361): Ceres Seq. ID no. 13613616

SEQ ID NO: 103816 - protein, 325 aa, Arabidopsis thaliana; identical to SEQ ID NO: 22115
  peptide (1)..(325): Ceres Seq. ID no. 13613617

SEQ ID NO: 103817 - protein, 301 aa, Arabidopsis thaliana; identical to SEQ ID NO: 22116
  peptide (1)..(301): Ceres Seq. ID no. 13613618

SEQ ID NO: 103818 - DNA, 1366 bp, Arabidopsis thaliana
  misc_feature (1)..(1366): Ceres Seq. ID no. 13613635
  misc_feature (1)..(1366): Ortholog of  Ceres SEQ ID NO 14305026 as cited in SEQ ID NO 52980
  misc_feature (1)..(1366): Ortholog of  Ceres SEQ ID NO 15175670 as cited in SEQ ID NO 55204
  misc_feature (1)..(1366): Ortholog of  Ceres SEQ ID NO 13595598 as cited in SEQ ID NO 56822
atattgaaaagaaccattgctctctagattaaaagcttctctctctctctctctctctcttttggactttctcaatccatatccctctctctgttttttctaatttgagcctctaaagtctcctcgttttgttcatgttgttgttcaagtgaagaagctcaattatgtttacaacattgttgtaatttcaaaacttcataagaatttctctgataataaagaaaaagctggagtagaactattttaaagtgtcatcatgaagagactaagcagctcagattcaatgtgtggtctaatctccacttctacagatgaacagagtccaagagggtacggaagtaattaccaatctatgcttgaaggttacgatgaagatgctacactaatcgaggaatattccggcaaccaccaccacatgggtctatcggagaagaagagaagattaaaagttgaccaagtcaaagctcttgagaagaatttcgaacttgagaataaactcgaacctgagaggaaaactaaattagcacaagagcttggacttcaacctcgtcaagtagctgtttggtttcagaaccgtcgtgcacggtggaaaacaaaacagcttgaaaaagattacggtgttcttaagggtcaatacgattctctccgccacaatttcgattctctccgccgtgacaatgattcccttctccaagagattagtaaaatcaaagctaaggtaaacggtgaagaagataacaacaacaacaaagctattacggagggtgttaaggaagaggaagttcacaagacggattcgattccttcgtctcctctgcagtttctagaacattcctctggttttaactaccggcgaagcttcactgacctccgtgaccttctaccgaattccaccgttgtcgaggctggatcttccgatagttgcgattcaagcgccgttcttaacgacgaaacaagttctgataacggaagattgacgccgcctgtgacggttactggcgggagtttcttacagtttgtgaaaacagagcaaacagaggatcacgaggattttctaagcggtgaagaagcttgtggtttcttctccgatgaacagccgccgtcacttcattggtactctgcttcagatcattggacttgagaattgtttatcaaattggtgctctgtttagtctcaatgggaaaacagagaagagggcaaaggtggaataattgataaataaggattaaggatgaaggggattattaaattaaatccgcgggagaagttaattttgggtttaagattgtaatggctcttcatgtaattaacgatgtcgagaggggctttcacagaaataggaatcaatggggacactctgatatg

SEQ ID NO: 103819 - protein, 294 aa, Arabidopsis thaliana; identical to SEQ ID NO: 38954
  peptide (1)..(294): Ceres Seq. ID no. 13613636

SEQ ID NO: 103820 - protein, 285 aa, Arabidopsis thaliana; identical to SEQ ID NO: 38955
  peptide (1)..(285): Ceres Seq. ID no. 13613637

SEQ ID NO: 103821 - protein, 262 aa, Arabidopsis thaliana; identical to SEQ ID NO: 38956
  peptide (1)..(262): Ceres Seq. ID no. 13613638

SEQ ID NO: 103822 - DNA, 1289 bp, Arabidopsis thaliana
  misc_feature (1)..(1289): Ceres Seq. ID no. 13613656
  misc_feature (1)..(1289): Ortholog of  Ceres SEQ ID NO 12615296 as cited in SEQ ID NO 62724
  misc_feature (1)..(1289): Ortholog of  Ceres SEQ ID NO 15225093 as cited in SEQ ID NO 65177
  misc_feature (1)..(1289): Ortholog of  Ceres SEQ ID NO 15179532 as cited in SEQ ID NO 0
acagagatttgtgtagaactctctctctctctataacaaaattggacagaattgggcaatcgagagagaaagatgcaagccatctccaaagtttcttctgcagcatcattctttagatgttctaggaagctagttagtcagccatgtgtgaggccttgcgtgagacagcttcacgtcagaaagggtcttgtctctggtgtcatgaagctgttctcttcacctcttaggactttgcgtgatgctggtaaatccgttcgcatttcaagattctgcagtgtctccaatgtctcttcctcattgcaaattgaactggtgccatgtcttacggacaactatgcttatatcttacatgatgaggataccggtacagttggtgtggttgacccttctgaagctgtacctgttatggatgccctccagaagaatagtcgaaatctaacttatatattaaatacacatcaccattatgatcacactggtggcaatttggaattaaaagacaggtatggtgcaaaggtgatcggctcagctgcagatagggaccggattcctggaattgatgtagccttgaaagatgctgacaaatggatgtttgctggccatgaagtccatattatggaaactcctggccacaccagaggccatattagtttctactttccaggggcacgagcaattttcaccggggacaccttgtttagcttatcatgtggtaaactcttcgaaggtactccagagcagatgctagcttctctacagaggataattgcgttgccagatgacacaagcgtatactgtggccatgaatatacactgagtaattccaagtttgcattgtctatagaaccaacaaacgaagtgctccagtcttatgcagcctacgttgcagaactccgtgacaagaaattaccaacgattccaacgacgatgaagatggagaaagcttgtaacccgtttctccgcactgagaacacagatatccgtcgagctttaggtattccagagacagcagatgaagcagaagctctgggtattataagaagagcaaaggacaatttcaaagcttagctaaaatataataagaatggttcctctgtacagtgatgatgcgatcctggtttaatctgtaataaggtgttttgagttttgaccgtgacgttacgtctcctagtagttttcatggtcatactcgaaatgattttttttttccttttgatcaaacggtcctaagtacccaagtttctactttgatgaaccctcgaattttgttattatttgtttttggatct

SEQ ID NO: 103823 - protein, 331 aa, Arabidopsis thaliana
  peptide (1)..(331): Ceres Seq. ID no. 13613657
MQAISKVSSAASFFRCSRKLVSQPCVRPCVRQLHVRKGLVSGVMKLFSSPLRTLRDAGKSVRISRFCSVSNVSSSLQIELVPCLTDNYAYILHDEDTGTVGVVDPSEAVPVMDALQKNSRNLTYILNTHHHYDHTGGNLELKDRYGAKVIGSAADRDRIPGIDVALKDADKWMFAGHEVHIMETPGHTRGHISFYFPGARAIFTGDTLFSLSCGKLFEGTPEQMLASLQRIIALPDDTSVYCGHEYTLSNSKFALSIEPTNEVLQSYAAYVAELRDKKLPTIPTTMKMEKACNPFLRTENTDIRRALGIPETADEAEALGIIRRAKDNFKA

SEQ ID NO: 103824 - protein, 288 aa, Arabidopsis thaliana; identical to SEQ ID NO: 30417
  peptide (1)..(288): Ceres Seq. ID no. 13613658

SEQ ID NO: 103825 - protein, 220 aa, Arabidopsis thaliana; identical to SEQ ID NO: 30418
  peptide (1)..(220): Ceres Seq. ID no. 13613659

SEQ ID NO: 103826 - DNA, 1596 bp, Arabidopsis thaliana
  misc_feature (1)..(1596): Ceres Seq. ID no. 13613670
  misc_feature (1)..(1596): Ortholog of  Ceres SEQ ID NO 13663060 as cited in SEQ ID NO 60964
  misc_feature (1)..(1596): Ortholog of  Ceres SEQ ID NO 13655298 as cited in SEQ ID NO 68914
aagcaaagagagaggaaaaattagactttactcattgttcagtggttgagagagaaaagagtaaaaaagcacatggcctcattaccattggggcctcagcctcatgctcttgctccgccgctgcagcttcacgacggcgacgctttgaaacgccgtcctgaattggattctgataaggaaatgtctgcagctgttattgagggaaatgacgctgttactggtcatatcatttccactactattggaggcaaaaacggcgaaccaaagcagaccattagttacatggctgagcgggttgttggaacaggttcattcgggattgtttttcaggcgaaatgcttggaaactggagaatcagtagccattaaaaaggtcttgcaagatcgacgctataaaaaccgtgagttgcaactaatgcgaccaatggatcacccaaatgtcatctccttgaagcactgtttcttctctacaacgagtagagatgagctcttcctcaaccttgttatggagtatgtacctgagactttataccgggttttgaggcactatactagttctaatcagaggatgccaattttctatgtcaagctttacacatatcaaatctttagaggtttggcttacatccatactgttcccggtgtttgccacagagatgtgaaaccacaaaatctcttggttgatcccttgacccatcaggttaagctgtgtgattttggaagtgcaaaagtattggtcaaaggtgaaccaaacatatcatatatctgctcccgttattatcgtgctccagaactgatctttggcgccacagagtatacagcatccatagatatatggtctgctggttgtgtactggcagagcttcttctgggccagccgttatttccaggagaaaattcagttgatcagcttgtggagatcataaaggttcttggtactccaactcgtgaagaaattcgatgtatgaacccgaactacacagattttaggttcccacaaatcaaagctcacccttggcacaaggtttttcataaacggatgcctccagaagcaatagaccttgcatctcggcttcttcaatattcaccaagtctacgctgcactgcgctcgaagcatgtgctcatccgtttttcaatgaactccgagagccaaacgcccgtcttccaaatggtcgtccattaccgccattgttcaatttcaaacaagagttaggtggagcttcaatggagctaatcaacaggctaatacctgagcatgtgagacgacaaatgagcacaggattacaaaacagttaaaaactgtgcatgtctgaagagaaagaggagaaaagcaggtttactacttttatttgatagttgacaggttcaacagtatattaaccacgactattatcagcttctatacccgtagtaaagtcatattcagctttttgagaaatcagatgctgataattgcgttttttttttttttattccgtagcctggagagtggagagagacactgttcctcgtgtatttttgtatatgtttttgtctgtaaaacaattctgacagatacgtagagacaaaagaaaaacgaggtgataatattaaacc

SEQ ID NO: 103827 - protein, 407 aa, Arabidopsis thaliana; identical to SEQ ID NO: 30700
  peptide (1)..(407): Ceres Seq. ID no. 13613671

SEQ ID NO: 103828 - protein, 371 aa, Arabidopsis thaliana; identical to SEQ ID NO: 30701
  peptide (1)..(371): Ceres Seq. ID no. 13613672

SEQ ID NO: 103829 - protein, 337 aa, Arabidopsis thaliana; identical to SEQ ID NO: 30702
  peptide (1)..(337): Ceres Seq. ID no. 13613673

SEQ ID NO: 103830 - DNA, 785 bp, Arabidopsis thaliana
  misc_feature (1)..(785): Ceres Seq. ID no. 13613674
  misc_feature (1)..(785): Ortholog of  Ceres SEQ ID NO 13596131 as cited in SEQ ID NO 67838
acatttttcaaaaatctcttttgcccagagagagaagaagagacagatcggaaggagttgagtaagaatggcgaagctggtgctcttcaccgccgtaattatcgctattttctcccatggatcctccgtcgatgacaaatgcgccgcttgtaacgccgtcgctgaggaattagagttacagcttttaaaggaaaagccacgaaaccatcttgatatgagaaaccggctcaattctaaaggccagcgtgaaggaaaggtcattgattacagaataagcgacctgagggtggttgatttgttggacggtctgtgtgatagaatgcaggactatactctacaaaaggtggaacctaagaatagacaatgggtgaaagtaggaaattttgacaatctaacaaataaacaggaagcgaaagcgcatgcaaatgacatttcaacttattgtggaagattgctggaggaaactgaagatgagctaggtgaggtgataaagaatggctccctaaaagcaggagaagtccgaaaggttctgtgtcaaactttgagtaaccactgccgacaatcaagtgaaacagactcagaggatgaggaggacgacgatgcagatgaattataactcaatccagtgaaaagttcacgtcaaattaagatcccatcttggtagctatgttatagatacatccatccacaactcatatgtaacttaagacacctttcactttttaagttatgtcgaaactcgggtctagattcttatttatattgtggcaattgttcgttttccc

SEQ ID NO: 103831 - protein, 182 aa, Arabidopsis thaliana; identical to SEQ ID NO: 37793
  peptide (1)..(182): Ceres Seq. ID no. 13613675

SEQ ID NO: 103832 - protein, 133 aa, Arabidopsis thaliana; identical to SEQ ID NO: 37794
  peptide (1)..(133): Ceres Seq. ID no. 13613676

SEQ ID NO: 103833 - protein, 98 aa, Arabidopsis thaliana; identical to SEQ ID NO: 37795
  peptide (1)..(98): Ceres Seq. ID no. 13613677

SEQ ID NO: 103834 - DNA, 1090 bp, Arabidopsis thaliana
  misc_feature (1)..(1090): Ceres Seq. ID no. 13613678
  misc_feature (1)..(1090): Ortholog of  Ceres SEQ ID NO 13595414 as cited in SEQ ID NO 56539
aaaagatactataatagtagagatcaaagacctgagcaaaaactgaaagaaaaaaaaaaaaaaaaaaaaagacttctcctcaaaaatggcgtttacactaggtggaagagctcgtcgtctagtctctgcaacatcagttcatcaaaatggttgcttacacaaactgcaacaaattggatcggatcggtttcagcttggtgaagcaaaagcaataagattactacccaggagaacaaacatggttcaagaattaggaatcagggaagaatttatggatctaaacagagaaacagagacaagttatgattttctggatgaaatgagacacagatttctgaaattcaagagacaaaagtatctaccggagatagaaaagtttaaagctttggccatagctcaatcaccaaaggtaatggtgataggatgtgcagattcaagggtatgtccatcttatgtactaggatttcaacctggtgaagcttttactatccgaaatgtcgccaatctcgttaccccggttcagaatggaccaacagaaaccaactcggctcttgagtttgcggtcaccactcttcaggttgagaacattatagttatgggtcatagcaattgtggaggaattgcagcacttatgagtcatcaaaaccaccaagggcaacactctagtttagtagaaaggtgggttatgaatgggaaagccgctaagttaagaacacaattagcttcatcacatttatcctttgatgaacaatgcagaaactgtgagaaggaatctataaaggattctgtgatgaatttgataacttattcatggataagagatagagtaaagagaggtgaagtcaagattcatggatgttattacaatttgtcagattgtagtcttgagaagtggagattaagttcagacaagactaactatggattctatatttcagacagagagatatggagttgagtaaatattgaacaatcctcagttctaatattcagatgtatctttgtacatacgaaatgatatttacacaattggaaaaaaagaaaaaaaaaaaagtaatattgtaataacggaataaaaggtgaattggtc

SEQ ID NO: 103835 - protein, 290 aa, Arabidopsis thaliana
  peptide (1)..(290): Ceres Seq. ID no. 13613679
MAFTLGGRARRLVSATSVHQNGCLHKLQQIGSDRFQLGEAKAIRLLPRRTNMVQELGIREEFMDLNRETETSYDFLDEMRHRFLKFKRQKYLPEIEKFKALAIAQSPKVMVIGCADSRVCPSYVLGFQPGEAFTIRNVANLVTPVQNGPTETNSALEFAVTTLQVENIIVMGHSNCGGIAALMSHQNHQGQHSSLVERWVMNGKAAKLRTQLASSHLSFDEQCRNCEKESIKDSVMNLITYSWIRDRVKRGEVKIHGCYYNLSDCSLEKWRLSSDKTNYGFYISDREIWS

SEQ ID NO: 103836 - protein, 239 aa, Arabidopsis thaliana
  peptide (1)..(239): Ceres Seq. ID no. 13613680
MVQELGIREEFMDLNRETETSYDFLDEMRHRFLKFKRQKYLPEIEKFKALAIAQSPKVMVIGCADSRVCPSYVLGFQPGEAFTIRNVANLVTPVQNGPTETNSALEFAVTTLQVENIIVMGHSNCGGIAALMSHQNHQGQHSSLVERWVMNGKAAKLRTQLASSHLSFDEQCRNCEKESIKDSVMNLITYSWIRDRVKRGEVKIHGCYYNLSDCSLEKWRLSSDKTNYGFYISDREIWS

SEQ ID NO: 103837 - protein, 228 aa, Arabidopsis thaliana
  peptide (1)..(228): Ceres Seq. ID no. 13613681
MDLNRETETSYDFLDEMRHRFLKFKRQKYLPEIEKFKALAIAQSPKVMVIGCADSRVCPSYVLGFQPGEAFTIRNVANLVTPVQNGPTETNSALEFAVTTLQVENIIVMGHSNCGGIAALMSHQNHQGQHSSLVERWVMNGKAAKLRTQLASSHLSFDEQCRNCEKESIKDSVMNLITYSWIRDRVKRGEVKIHGCYYNLSDCSLEKWRLSSDKTNYGFYISDREIWS

SEQ ID NO: 103838 - DNA, 1709 bp, Arabidopsis thaliana
  misc_feature (1)..(1709): Ceres Seq. ID no. 13613693
  misc_feature (1)..(1709): Ortholog of  Ceres SEQ ID NO 14307257 as cited in SEQ ID NO 54628
gttgactataattagacttcttcatttactctctctctgacttaaaacatttattttatcttcttcttgttctctctttctctttctctcatcactatgaagagtttcaacacagaaggacacaaccactccacggcggaatccggcgatgcctacaccgtgtcggacccgacaaagaacgtcgatgaagatggtcgagagaagcgtaccgggacgtggcttacggcgagtgcgcatattatcacggcggtgataggctccggagtgttgtctttagcatgggctatagctcagcttggttggatcgcagggacatcgatcttactcattttctcgttcattacttacttcacctccaccatgcttgccgattgctaccgtgcgccggatcccgtcaccggaaaacggaattacacttacatggacgttgttcgatcttacctcggtggtaggaaagtgcagctctgtggagtggcacaatatgggaatctgattggggtcactgttggttacaccatcactgcttctattagtttggtagcggtagggaaatcgaactgcttccacgataaagggcacactgcggattgtactatatcgaattatccgtatatggcggtttttggcattattcaggttattcttagccagatcccaaatttccacaagctctcttttctttccattatggccgcggtcatgtcctttacttatgcaactattggaatcggtctagccatcgcaaccgtcgcaggtgggaaagtgggtaagacgagtatgacgggcacagcggttggagtagatgtaaccgcagctcaaaagatatggagatcgtttcaagcggttggggacatagcgttcgcctatgcttatgccacggttctcatcgagattcaggatacactaagatctagcccagctgagaacaaagccatgaaaagagcaagtcttgtgggagtatcaaccaccacttttttctacatcttatgtggatgcatcggctatgctgcatttggaaacaatgcccctggagatttcctcacagatttcgggtttttcgagcccttttggctcattgactttgcaaacgcttgcatcgctgtccaccttattggtgcctatcaggtgttcgcgcagccgatattccagtttgttgagaaaaaatgcaacagaaactatccagacaacaagttcatcacttctgaatattcagtaaacgtacctttccttggaaaattcaacattagcctcttcagattggtgtggaggacagcttatgtggttataaccactgttgtagctatgatattccctttcttcaacgcgatcttaggtcttatcggagcagcttccttctggcctttaacggtttatttccctgtggagatgcacattgcacaaaccaagattaagaagtactctgctagatggattgcgctgaaaacgatgtgctatgtttgcttgatcgtctcgctcttagctgcagccggatccatcgcaggacttataagtagtgtcaaaacctacaagcccttccggactatgcatgagtgagtttgagatcctcaagagagtcaaaaatatatgtagtagtttggtctttctgttaaactatctggtgtctaaatccaatgagaatgctttattgctaaaacttcatgaatctctctgtatctacatctttcaatctaatacatatgagctcttcc

SEQ ID NO: 103839 - protein, 485 aa, Arabidopsis thaliana; identical to SEQ ID NO: 24657
  peptide (1)..(485): Ceres Seq. ID no. 13613694

SEQ ID NO: 103840 - protein, 397 aa, Arabidopsis thaliana; identical to SEQ ID NO: 24658
  peptide (1)..(397): Ceres Seq. ID no. 13613695

SEQ ID NO: 103841 - protein, 377 aa, Arabidopsis thaliana; identical to SEQ ID NO: 24659
  peptide (1)..(377): Ceres Seq. ID no. 13613696

SEQ ID NO: 103842 - DNA, 1290 bp, Arabidopsis thaliana
  misc_feature (1)..(1290): Ceres Seq. ID no. 13613697
  misc_feature (1)..(1290): Ortholog of  Ceres SEQ ID NO 13593955 as cited in SEQ ID NO 54278
  misc_feature (1)..(1290): Ortholog of  Ceres SEQ ID NO 13597380 as cited in SEQ ID NO 64054
  misc_feature (1)..(1290): Ortholog of  Ceres SEQ ID NO 12625474 as cited in SEQ ID NO 64169
  misc_feature (1)..(1290): Ortholog of  Ceres SEQ ID NO 13597502 as cited in SEQ ID NO 64681
tggttatataacactaatcaggagtgaaatttcatccacaaaaattccttataaattcacgaccaaacacacacatttctttaattccataaaaacaaaaacaaaaatataatgtggacttctaaaaccataagcttcactctcttcatcacaacaacacttctcgggtcctgcaacgcatctgcaaaggccaaaacgcaaccgctattcccagcgattctaatctttggtgattcaacagtcgacacaggcaacaataattacccttcacaaacaatcttcagagctaaacatgttccttacggaattgatctcccaaaccactcacctaacggaagattctcaaacgggaaaattttctccgacataatcgcaaccaaactcaacatcaaacagtttgttcctcctttcttacaaccaaatctcaccgaccaagaaattgtaaccggagtctgtttcgcatcagcaggtgccggttacgatgaccaaaccagtctcacgacacaagcgattcgtgtctcggaacaaccaaatatgttcaagagttacattgctcgtcttaagagtatcgtaggagacaagaaagccatgaagatcataaacaatgctttggtggttgtgagtgcagggcctaatgatttcatcttgaattattacgaggttccctcatggcgtcgcatgtatcctagcatttctgattaccaagattttgttcttagtaggcttaacaatttcgtgaaggagctttacagcctaggttgccggaaaattttggtcggaggtttaccgccaatgggatgtttaccgattcaaatgactgctcaattccgcaacgtcctaaggttttgcttggaacaagagaacagagactctgttttatacaatcagaaacttcagaagctcttacctcagacacaagcatctcttacaggaagcaagatcctttactctgatgtctatgaccctatgatggagatgctccaaaaccctagcaaatacggatttaaagagacgacgagaggatgttgtggaacagggttcttggagacgagcttcatgtgtaatgcttattcttccatgtgtcagaatcgctcggagtttctgttctttgactcgattcatccatctgaagctacctacaattacattggtaatgttctggatactaagattcgtgggtggcttaaggcttaagttatcaagatttgcaaagattgaacaaaattatctgtttcataatgtgactatttgtggacttcgtttgtttatcaactattaactttggctctt

SEQ ID NO: 103843 - protein, 360 aa, Arabidopsis thaliana
  peptide (1)..(360): Ceres Seq. ID no. 13613698
MWTSKTISFTLFITTTLLGSCNASAKAKTQPLFPAILIFGDSTVDTGNNNYPSQTIFRAKHVPYGIDLPNHSPNGRFSNGKIFSDIIATKLNIKQFVPPFLQPNLTDQEIVTGVCFASAGAGYDDQTSLTTQAIRVSEQPNMFKSYIARLKSIVGDKKAMKIINNALVVVSAGPNDFILNYYEVPSWRRMYPSISDYQDFVLSRLNNFVKELYSLGCRKILVGGLPPMGCLPIQMTAQFRNVLRFCLEQENRDSVLYNQKLQKLLPQTQASLTGSKILYSDVYDPMMEMLQNPSKYGFKETTRGCCGTGFLETSFMCNAYSSMCQNRSEFLFFDSIHPSEATYNYIGNVLDTKIRGWLKA

SEQ ID NO: 103844 - protein, 219 aa, Arabidopsis thaliana
  peptide (1)..(219): Ceres Seq. ID no. 13613699
MFKSYIARLKSIVGDKKAMKIINNALVVVSAGPNDFILNYYEVPSWRRMYPSISDYQDFVLSRLNNFVKELYSLGCRKILVGGLPPMGCLPIQMTAQFRNVLRFCLEQENRDSVLYNQKLQKLLPQTQASLTGSKILYSDVYDPMMEMLQNPSKYGFKETTRGCCGTGFLETSFMCNAYSSMCQNRSEFLFFDSIHPSEATYNYIGNVLDTKIRGWLKA

SEQ ID NO: 103845 - protein, 201 aa, Arabidopsis thaliana
  peptide (1)..(201): Ceres Seq. ID no. 13613700
MKIINNALVVVSAGPNDFILNYYEVPSWRRMYPSISDYQDFVLSRLNNFVKELYSLGCRKILVGGLPPMGCLPIQMTAQFRNVLRFCLEQENRDSVLYNQKLQKLLPQTQASLTGSKILYSDVYDPMMEMLQNPSKYGFKETTRGCCGTGFLETSFMCNAYSSMCQNRSEFLFFDSIHPSEATYNYIGNVLDTKIRGWLKA

SEQ ID NO: 103846 - DNA, 1747 bp, Arabidopsis thaliana
  misc_feature (1)..(1747): Ceres Seq. ID no. 13613701
  misc_feature (1)..(1747): Ortholog of  Ceres SEQ ID NO 15179918 as cited in SEQ ID NO 57077
gcacaaagcaaaaaaatctctgtaaaagcagaacgataatggagtcacaattatggaattggatcttacctcttttgatctcttctctcctcatctccttcgtcgctttctatggattcttcgtcaaaccgaagcggaacggtctccgtcacgatcggaaaactgtttctaccgtcacctccgacgtcggatctgttaatattaccggagatactgtcgctgatgtcattgttgttggagctggtgttgctggttctgctcttgcttatactcttggaaaggataaacgccgagttcatgtgattgaaagagatttatcggagcctgatcgtattgttggggagttgttacagcctgggggttacctcaagttactggagttgggaattgaagattgtgtggaagaaatagatgctcagcgtgtgtatggttatgcactttttaaaaatgggaaacgcattcgcttagcttatcctttggagaagtttcacgaagatgtatctggaaggagctttcacaatggacgttttattcaaagaatgcgggagaaagctgcttcacttcccaatgttcagctagagcaaggaacagttctttctcttctagaagagaatgggactatcaaaggtgtgagatataagaataaagcaggagaggaacaaaccgcatttgcagctttgactatagtttgtgatggttgtttctcaaacctgcgtcgctctttgtgcaatcctcaggtcgaggtgccttcttgttttgtcgggttggtcctagagaactgcaatctcccatatgcaaaccatggacatgtcgtcttagcagatccatcaccaattttgatgtatccaattagtagcacagaggtgcggtgcctagttgatgttcccggccagaaagtgccgtccattgcaaatggtgaaatgaaaaactatttgaagactgttgtggctcctcagatgcctcatgaggtctatgactctttcattgctgcggttgataaaggaaatattaagtccatgccaaacagaagcatgccagcttctccttatcctactccaggggctctgttaatgggagatgcatttaacatgcgtcatcctttgacgggtggaggaatgacggttgcattagctgacattgttgtcctgcgtaatctccttagaccgctgcgtgatcttagtgacggcgctagtctctgcaaatatcttgaatcattttacactctgcgaaagccagttgcagcaacaatcaacacccttgcgaatgctctttaccaagtgttctgttcatcagaaaatgaagcaagaaacgagatgagggaagcttgcttcgattatctgggcctcgggggtatgtgcacaagtggaccagtatctttgctttcgggtttgaaccctcgaccattaacacttgtctgccatttctttgcggttgcggtttatggagtcatacggttgttaatcccattcccttccccaaaacgaatctggcttggagccaaattaatctcgggagcatcggggataatatttccgataataaaagcggaaggagttaggcagatgtttttcccagcaactgtacctgcatactactacaaagctcctacagttggagaaaccaaatgttcatagttccaaataattctgtcacgagaaatgccatacaaaagaaaatgaaagttgtggattgcatttggtgtgtttgttgtgtaagtgttctttaaacgtataaaagtgatgatact

SEQ ID NO: 103847 - protein, 543 aa, Arabidopsis thaliana; identical to SEQ ID NO: 27102
  peptide (1)..(543): Ceres Seq. ID no. 13613702

SEQ ID NO: 103848 - protein, 531 aa, Arabidopsis thaliana; identical to SEQ ID NO: 27103
  peptide (1)..(531): Ceres Seq. ID no. 13613703

SEQ ID NO: 103849 - protein, 364 aa, Arabidopsis thaliana; identical to SEQ ID NO: 27104
  peptide (1)..(364): Ceres Seq. ID no. 13613704

SEQ ID NO: 103850 - DNA, 1437 bp, Arabidopsis thaliana
  misc_feature (1)..(1437): Ceres Seq. ID no. 13613709
  misc_feature (1)..(1437): Ortholog of  Ceres SEQ ID NO 12625831 as cited in SEQ ID NO 65139
ttcattcatgtctctatccaaatctatctggtaactcaaaatcatcacttcttctactcaacaatttcacaatcccatccccaattttacaatccctagatctccctccctcttcaattcgctgtagttttcatggaccttgttcgattgagagacataggttcaatttcacctcagagaagaaggaaatggctgattctattagcggttttcggtgtttcgggttacggagtttacagggtttacaattctcaatacatcgctaagaagacgaagcgtcttatgaaactcttctcaggcattgtttcattcgccgaaatggtcatcgattccgcggagacgataagtatcgtttctcgagatttgaaagagtttctcgaatcaaattcccacgaaatccctaatagcttgaaacagctatcgaaaatcaccaaatcaaaagagttcactgattctctagctagggtttctgaagctgtagcgattggtgttttccgtgggtataattccgatccaaacgtcgaaaaagaatcgaatttgagtgtagttgatagagttttctcagaggaaggagctggttttgtttctgttgttgttggtagttttgctaagaatcttgttcttggattttactctggtgagattgagattggtagtgatgattctttaaaacctagatggatgaatttgcttagtgatgataagtgtagagagcttttagcagattgtattgagagattcactagctcagctgtatcggtgtatatcgataaaacggttggtgttaatacttatgatcagatattcgctggtttgacgaatccgaaacatcgagatagtgctcgagatgttcttgtttcggtttgtaatggagctcttgagacgttcatgagaacttctcatgatgtcttcacatcttcaggagagaaaaccgattcctccttgaggaagtcggagaatcgagaaaacggatgggcagaggcgctttcgactactttagcagtgccgagtaataggaagttcatgtttgatgttacgggaagagtgacgctagagacgatgagatcaattcttgagtttgtaatcttgaaaacgtcacaaagttttaagaggagtttggatgtgattcatgaagaagttacagagagaggacgtcaagtagttggatacgttggtgccaaatcttcagtgataatcactgtttgtcttgcggtttactttcacatctttaaccgctttgttcgaggccctccggtttgtttaagccagcaattctagttaatcggatcgatctattagcttgttagagttgttagggacattagatcttcagccttccatattcttattggtaagttggagctgaatagcgtagtagagtcttagcagtgttatgtacccacatattcattattgtttatttatagaggattcttg

SEQ ID NO: 103851 - protein, 381 aa, Arabidopsis thaliana; identical to SEQ ID NO: 42684
  peptide (1)..(381): Ceres Seq. ID no. 13613710

SEQ ID NO: 103852 - protein, 331 aa, Arabidopsis thaliana; identical to SEQ ID NO: 42685
  peptide (1)..(331): Ceres Seq. ID no. 13613711

SEQ ID NO: 103853 - protein, 319 aa, Arabidopsis thaliana; identical to SEQ ID NO: 42686
  peptide (1)..(319): Ceres Seq. ID no. 13613712

SEQ ID NO: 103854 - DNA, 1564 bp, Arabidopsis thaliana
  misc_feature (1)..(1564): Ceres Seq. ID no. 13613723
  misc_feature (1)..(1564): Ortholog of  Ceres SEQ ID NO 13597574 as cited in SEQ ID NO 64677
  misc_feature (1)..(1564): Ortholog of  Ceres SEQ ID NO 13662880 as cited in SEQ ID NO 65422
  misc_feature (1)..(1564): Ortholog of  Ceres SEQ ID NO 14302071 as cited in SEQ ID NO 66585
  misc_feature (1)..(1564): Ortholog of  Ceres SEQ ID NO 14316013 as cited in SEQ ID NO 67181
  misc_feature (1)..(1564): Ortholog of  Ceres SEQ ID NO 12779098 as cited in SEQ ID NO 67698
  misc_feature (1)..(1564): Ortholog of  Ceres SEQ ID NO 13596180 as cited in SEQ ID NO 67941
  misc_feature (1)..(1564): Ortholog of  Ceres SEQ ID NO 13591190 as cited in SEQ ID NO 68044
  misc_feature (1)..(1564): Ortholog of  Ceres SEQ ID NO 13596089 as cited in SEQ ID NO 68373
aacgacaaattaattaaacttctccaaaactcttttcctctaaaaaatctcccaaatacagaaaaaaaaacaaagtcagtaagaaaaatggaagagagaaaagggaggagaataatcatgttccctcttccatttccagggcacttcaaccccatgatcgagctcgctggaatattccaccaccgtggcttctccgtgacgatcctccacacttcctacaacttccccgatccttctcgccacccacacttcacttttcgaaccatctctcacaacaaagaaggagaagaagatcctctgtctcagtcagaaacttcgagtatggacctaatcgttctcgttcgtcggctgaaacaacgctacgccgaaccgtttcgtaagtctgtggcggcggaagtaggtggaggagagacggtgtgttgtttggtctccgacgctatatgggggaagaacacggaggttgtagcggaagagattggagttcgtagggtggtgttgaggacaggtggtgcgtcgtcgttttgtgcttttgccgctttccctctccttagggataagggttacctccctatacaagattctagattagatgagccagtgacagagcttccacctttgaaagtgaaggatcttccggtaatggaaacgaatgagccggaggaactttaccgggtagttaacgacatggtggaaggagccaagtcttcttcaggagtcatatggaacacatttgaagatcttgaaagactatcacttatgaattgtagcagcaaattacaagttccatttttcccgatcggaccgtttcacaaatatagcgaagatcctacaccgaagacagagaacaaggaagataccgattggctcgacaagcaagacccacagtcggtggtctatgcgagtttcggaagccttgcagctatagaagagaaggagtttctcgagattgcttggggtctaagaaacagtgaacgaccgtttttgtgggtggttaggccggggtctgtcagggggaccgagtggctcgagtcattgcctttagggtttatggaaaacattggagataagggaaaaatcgtgaaatgggcgaatcagttagaggtattggcgcatcctgccattggagcgttttggacacattgtggatggaactcgacactagagagcatatgtgaaggtgttcctatgatatgtacgtcatgtttcacggaccagcatgtgaacgcgagatacatcgttgatgtatggcgagtcgggatgttgttagagagaagtaagatggaaaagaaggagattgaaaaggtgctaagaagtgtaatgatggagaagggagatggattgagggaaaggagtttgaagttgaaagagagagctgatttttgcttaagtaaagatgggtcttcttccaagtatttagacaaacttgtgagtcatgtcctgtcttttgattcttatgcttttgcaagttaagaaaacttatgaatgagtaacgtattctaagcactctccaaaagttccaaaaccattggatgttttgtttcttcaaataataatgttcttgagt

SEQ ID NO: 103855 - protein, 489 aa, Arabidopsis thaliana
  peptide (1)..(489): Ceres Seq. ID no. 13613724
NDKLIKLLQNSFPLKNLPNTEKKTKSVRKMEERKGRRIIMFPLPFPGHFNPMIELAGIFHHRGFSVTILHTSYNFPDPSRHPHFTFRTISHNKEGEEDPLSQSETSSMDLIVLVRRLKQRYAEPFRKSVAAEVGGGETVCCLVSDAIWGKNTEVVAEEIGVRRVVLRTGGASSFCAFAAFPLLRDKGYLPIQDSRLDEPVTELPPLKVKDLPVMETNEPEELYRVVNDMVEGAKSSSGVIWNTFEDLERLSLMNCSSKLQVPFFPIGPFHKYSEDPTPKTENKEDTDWLDKQDPQSVVYASFGSLAAIEEKEFLEIAWGLRNSERPFLWVVRPGSVRGTEWLESLPLGFMENIGDKGKIVKWANQLEVLAHPAIGAFWTHCGWNSTLESICEGVPMICTSCFTDQHVNARYIVDVWRVGMLLERSKMEKKEIEKVLRSVMMEKGDGLRERSLKLKERADFCLSKDGSSSKYLDKLVSHVLSFDSYAFAS

SEQ ID NO: 103856 - protein, 460 aa, Arabidopsis thaliana
  peptide (1)..(460): Ceres Seq. ID no. 13613725
MEERKGRRIIMFPLPFPGHFNPMIELAGIFHHRGFSVTILHTSYNFPDPSRHPHFTFRTISHNKEGEEDPLSQSETSSMDLIVLVRRLKQRYAEPFRKSVAAEVGGGETVCCLVSDAIWGKNTEVVAEEIGVRRVVLRTGGASSFCAFAAFPLLRDKGYLPIQDSRLDEPVTELPPLKVKDLPVMETNEPEELYRVVNDMVEGAKSSSGVIWNTFEDLERLSLMNCSSKLQVPFFPIGPFHKYSEDPTPKTENKEDTDWLDKQDPQSVVYASFGSLAAIEEKEFLEIAWGLRNSERPFLWVVRPGSVRGTEWLESLPLGFMENIGDKGKIVKWANQLEVLAHPAIGAFWTHCGWNSTLESICEGVPMICTSCFTDQHVNARYIVDVWRVGMLLERSKMEKKEIEKVLRSVMMEKGDGLRERSLKLKERADFCLSKDGSSSKYLDKLVSHVLSFDSYAFAS

SEQ ID NO: 103857 - protein, 450 aa, Arabidopsis thaliana
  peptide (1)..(450): Ceres Seq. ID no. 13613726
MFPLPFPGHFNPMIELAGIFHHRGFSVTILHTSYNFPDPSRHPHFTFRTISHNKEGEEDPLSQSETSSMDLIVLVRRLKQRYAEPFRKSVAAEVGGGETVCCLVSDAIWGKNTEVVAEEIGVRRVVLRTGGASSFCAFAAFPLLRDKGYLPIQDSRLDEPVTELPPLKVKDLPVMETNEPEELYRVVNDMVEGAKSSSGVIWNTFEDLERLSLMNCSSKLQVPFFPIGPFHKYSEDPTPKTENKEDTDWLDKQDPQSVVYASFGSLAAIEEKEFLEIAWGLRNSERPFLWVVRPGSVRGTEWLESLPLGFMENIGDKGKIVKWANQLEVLAHPAIGAFWTHCGWNSTLESICEGVPMICTSCFTDQHVNARYIVDVWRVGMLLERSKMEKKEIEKVLRSVMMEKGDGLRERSLKLKERADFCLSKDGSSSKYLDKLVSHVLSFDSYAFAS

SEQ ID NO: 103858 - DNA, 1467 bp, Arabidopsis thaliana
  misc_feature (1)..(1467): Ceres Seq. ID no. 13613727
  misc_feature (1)..(1467): Ortholog of  Ceres SEQ ID NO 15172093 as cited in SEQ ID NO 54938
attcatcaaataaacaaaaatctctgtatttttttttaaaaaagatggctgatttggatttacagaggaagatggtatctccgaagctccacgtcaccattcctgagccgtgtaagctctcctccgtctcttctccaatctcctcctcttcttccgccgcttgctctgcttacgagctttacctccgtttgcctgaacttagaaacctctggtcctctctctatttccctcactggatctccgagcccgttctcaaaccagctcttcaagctcttgagatcactttccggttaatcctcaccgttgcttctgacacacgtccttacatcaaccgccgcgaatggatccgacggttggattccctcactaccagccagataaaaatcgtggcggctatctgcggagatgaagacaactacgaagagaacgtatcggcggctccggtcagcaatggctggagctcgttgagtttgctttcggagatcgccacgtgtcgtacatcggagagtgttggacagaagatcttgtctacgatcgagaatgagatgcgttggtgtaagtatacgctcggtttaggagaaccaaacctcgccggaaaaccgtatcttcaatacgacgccgtttgtctcccggaggagctacatagcctcaagaacaatccttacgcagatcacatcgagaaccaagagaatcaaatgctctacactagtcatcagattcttgaatcgtggatttacgtttctgtgaatcttttatatagaatcgaatcgagaatcgaagagggaaaattcgaaaaagcttcttcagacgtctacttgttggagagaatctggaagcttctatcagagattgaagatttacacattcttatggatcctgaagatttcttgaaggtgaagaaacagttacaaatcaaatcgacgtttccaaacgacgcattttgttttaggtcaaagggcttagtagagatggcgaagatgtccaaagagctgagacagaaagtgccagctgttcttgaggtggaggtggatcccaccggaggtccgaggttgcaagaggcggcgatgaagctttactcgaggaaaacagagtacgagaagatacatttgcttcagggaatgcaggccgtggagtctgcagccaagagattcttcttcggataccagaagttggttgcagcgatgattgggaatgcagaggcgaatgcaaatagaacggtggcgaatcacgagtcctatgattcactgactcaggtgtttatggagccaccgtattacccgagcctagacgccgcaaagacatttctgggagagttctggagccaattgtgatgcaatggaagatattgacacaactacttaacaaacactatcaacagatgtaacactactgaaatttttggaagcatctaacgatcagtgtatgaatatatgtaactcattttttttagcacaaaacaatattttc

SEQ ID NO: 103859 - protein, 442 aa, Arabidopsis thaliana
  peptide (1)..(442): Ceres Seq. ID no. 13613728
SSNKQKSLYFFLKKMADLDLQRKMVSPKLHVTIPEPCKLSSVSSPISSSSSAACSAYELYLRLPELRNLWSSLYFPHWISEPVLKPALQALEITFRLILTVASDTRPYINRREWIRRLDSLTTSQIKIVAAICGDEDNYEENVSAAPVSNGWSSLSLLSEIATCRTSESVGQKILSTIENEMRWCKYTLGLGEPNLAGKPYLQYDAVCLPEELHSLKNNPYADHIENQENQMLYTSHQILESWIYVSVNLLYRIESRIEEGKFEKASSDVYLLERIWKLLSEIEDLHILMDPEDFLKVKKQLQIKSTFPNDAFCFRSKGLVEMAKMSKELRQKVPAVLEVEVDPTGGPRLQEAAMKLYSRKTEYEKIHLLQGMQAVESAAKRFFFGYQKLVAAMIGNAEANANRTVANHESYDSLTQVFMEPPYYPSLDAAKTFLGEFWSQL

SEQ ID NO: 103860 - protein, 428 aa, Arabidopsis thaliana; identical to SEQ ID NO: 42619
  peptide (1)..(428): Ceres Seq. ID no. 13613729

SEQ ID NO: 103861 - protein, 419 aa, Arabidopsis thaliana; identical to SEQ ID NO: 42620
  peptide (1)..(419): Ceres Seq. ID no. 13613730

SEQ ID NO: 103862 - DNA, 938 bp, Arabidopsis thaliana
  misc_feature (1)..(938): Ceres Seq. ID no. 13613731
  misc_feature (1)..(938): Ortholog of  Ceres SEQ ID NO 14306682 as cited in SEQ ID NO 53140
acacagaaacagagtttccgtctttcatcttcctccatatgcgtcgctcttaaaaacctaattcacaatgtccgtcgttctcaacgccggcttcagttctccgcttcaaaacagatcacatcatgttatacagttaaagccttcgccttttgcgtcatacatatctctaaacagttcaagaaggtcactgttatgcaaaagaagattggttgtatcttgtttggatacaaatgacaattctgtcacaactacatccgtagattcttcttcttcttcagattctaataaaccagtaagtgaatcagttgaatcaagcaatggcactgccaaaaaagcaccattgacagcacgagagagactaagagcggctcgtgttcttagccgatacactgaagcaacaccgaaaccgtcaaaacctaaaatggggagccaacttcttgatgtgctcaaggaaagtgataagaaatcaaagaggaaaccgggtctacccgaagcaccaactaacatgcttgatgatagcaggagagggatgccaaagagcggtcttacgtttgatttaccgggaggctcggatattctcatcattgctttctcctttgtgttcataagcacagtcatgtttgctactacttttcttgtttggaaactcggtgcgatacacttcaacgaatagtaaagttgagatttggagaagtttaatggagtttggaaaccatcaagcagggaacgagagagagagagtgttttgttacaatgttagttaacaatgcatacttggggatgtgatggggatcttcatcacttggcaaatccggcctgagtgtatatacatatactctgtagtacacataattttgctatgaactctcttcatgcttgatttgtaattttaatctttacattgtaatttcttttcatatggaaatggatgcttaaag

SEQ ID NO: 103863 - protein, 201 aa, Arabidopsis thaliana; identical to SEQ ID NO: 49510
  peptide (1)..(201): Ceres Seq. ID no. 13613732

SEQ ID NO: 103864 - DNA, 843 bp, Arabidopsis thaliana
  misc_feature (1)..(843): Ceres Seq. ID no. 13613733
  misc_feature (1)..(843): Ortholog of  Ceres SEQ ID NO 15171235 as cited in SEQ ID NO 52469
  misc_feature (1)..(843): Ortholog of  Ceres SEQ ID NO 15178542 as cited in SEQ ID NO 65410
  misc_feature (1)..(843): Ortholog of  Ceres SEQ ID NO 15174852 as cited in SEQ ID NO 67166
  misc_feature (1)..(843): Ortholog of  Ceres SEQ ID NO 12635657 as cited in SEQ ID NO 0
  misc_feature (1)..(843): Ortholog of  Ceres SEQ ID NO 12635879 as cited in SEQ ID NO 0
  misc_feature (1)..(843): Ortholog of  Ceres SEQ ID NO 13599649 as cited in SEQ ID NO 0
cattgagccgttatataaatccttcactcgctccttgagaagacgaatttgagattgcctctgcaaagagtaaaatggcgaatcctaaagtcttcttcgacatcttgattggtaagatgaaggcagggcgtgttgtaatggagttatttgcagatgtgactccgagaacagctaataatttccgtgctttgtgcactggggagaatggtattgggaaagcagggaaggctttacactacaaaggctcagcctttcaccgtataatcccagggttcatgtgtcaaggtggagatttcactcgtgggaatggaactggaggagaatctatttacgggtctaaatttgaagatgagaacttcaagttgaagcacactggtccagggattttgtctatggctaactctggtcccaacactaatggttctcagttcttcatctgcacagagaagacttcgtggcttgatgggaaacatgttgttttcgggaaagttgttgatggatacaatgtggtcaaggcaatggaggatgttggctctgacatgggaaatccttctgaacgagttgtgattgaagattgtggtgagctcaagaacccaagttcataagttcttaaaacattgggtgggttgatcttgacaggttattctatcatatgctgtgaagcagagacagcatcttagcgttaaggtcaatctagtctgtgatgcactactttggttttgactatatcatatgaaccttaggaagtggtccatccttgtaagttgttttcttaaaactcttgtgtgagaataggatggatgataataatggttagtttctttatgaagacatttggttttg

SEQ ID NO: 103865 - protein, 176 aa, Arabidopsis thaliana; identical to SEQ ID NO: 29035
  peptide (1)..(176): Ceres Seq. ID no. 13613734

SEQ ID NO: 103866 - protein, 162 aa, Arabidopsis thaliana; identical to SEQ ID NO: 29036
  peptide (1)..(162): Ceres Seq. ID no. 13613735

SEQ ID NO: 103867 - protein, 155 aa, Arabidopsis thaliana; identical to SEQ ID NO: 29037
  peptide (1)..(155): Ceres Seq. ID no. 13613736

SEQ ID NO: 103868 - DNA, 1905 bp, Arabidopsis thaliana
  misc_feature (1)..(1905): Ceres Seq. ID no. 13613759
  misc_feature (1)..(1905): Ortholog of  Ceres SEQ ID NO 15169264 as cited in SEQ ID NO 55026
  misc_feature (1)..(1905): Ortholog of  Ceres SEQ ID NO 15224709 as cited in SEQ ID NO 68627
ccaacacatttacttttcttcttcttctctctctacgccatagctatggttttaccagagcttctcgtgattctagcagaatgggttctttaccgtcttcttgctaaatcatgttacagagctgctagaaagctcagaggctatggtttccagttaaaaaatctcctaagcctctccaaaacacaatctctacacaacaattctcagcatcatcttcataaccatcatcaacaaaatcaccctaaccaaacccttcaagattctctagaccctctgttcccaagccttacaaaataccaagaacttcttctagacaaaaacagagcatgctctgtttcgtctgatcattatcgtgatacctttttctgcgatatcgatggtgttttattaagacaacattcgagcaaacacttccacacgttcttcccttacttcatgctcgtggcttttgaaggaggatcgatcatcagagcgatccttctcttgctctcctgttctttcctttggactctgcaacaagaaaccaaactcagagttctctctttcataaccttctctggtcttagagtcaaagacatggacaatgtttctagatcggttctaccaaaattcttcctcgagaacttgaatatccaagtttacgacatctgggctcgaactgagtactccaaagttgtgttcacgagcttgccgcaagtgctggtggagaggttcctcagagaacatctcaacgctgatgatgtgattgggactaaactgcaagaaataaaagtcatgggaaggaaattctacacaggcctagcttctggttctggtttcgtcctgaaacataaatcagctgaagactacttttttgatagcaagaagaagcctgcacttggaattggaagctcttcaagcccacaagatcacatcttcatctccatttgcaaagaagcttatttttggaatgaagaagagtccatgagcaagaacaacgcattgcctagagaaagatacccaaagccactgatattccacgacgggagattggctttcttgccaacaccattagctacattagccatgttcatatggctccctatcggatttttactcgctgtcttcaggatctcggtaggagtctttcttccttaccatgtagccaatttcttggcttctatgtccggtgttaggatcactttcaagacccataatttgaataacggtcgtccagagaaaggtaatagtggagtcttgtatgtatgcaaccataggaccctcctcgacccagttttcctcaccacttcgctgggcaagcccttgaccgcggttacttacagcctaagcaagttctccgagttcatagcacctctcaagacggttagccttaaaagagataggaagaaagacggtgaggcaatgcagagactattaagcaaaggagatctagtggtttgtccggagggaaccacatgtagagagccttatctactaaggttcagtcctttgttcgctgagttaactgaagacattgttcccgtggctgtagatgctcgagtgagcatgttctatgggacaactgcgagcgggctcaagtgtttagaccctatcttcttcctcatgaaccctaggccggtttattgtcttgagattttaaagaagttgccaaaagagatgacttgtgcaggaggcaagtcaagctttgaagttgcgaatttcatacagggagaacttgctagggttttgggatttgaatgcactaatctcacaaggagggataagtacttggttcttgctggaaatgaaggcattgtcagataaactattccgaattttcattagtttttttgtttgtttgaaaagctaaatattattgttatttcaggacttagatgtttaattctatatggttgattcattggc

SEQ ID NO: 103869 - protein, 600 aa, Arabidopsis thaliana
  peptide (1)..(600): Ceres Seq. ID no. 13613760
PTHLLFFFFSLYAIAMVLPELLVILAEWVLYRLLAKSCYRAARKLRGYGFQLKNLLSLSKTQSLHNNSQHHLHNHHQQNHPNQTLQDSLDPLFPSLTKYQELLLDKNRACSVSSDHYRDTFFCDIDGVLLRQHSSKHFHTFFPYFMLVAFEGGSIIRAILLLLSCSFLWTLQQETKLRVLSFITFSGLRVKDMDNVSRSVLPKFFLENLNIQVYDIWARTEYSKVVFTSLPQVLVERFLREHLNADDVIGTKLQEIKVMGRKFYTGLASGSGFVLKHKSAEDYFFDSKKKPALGIGSSSSPQDHIFISICKEAYFWNEEESMSKNNALPRERYPKPLIFHDGRLAFLPTPLATLAMFIWLPIGFLLAVFRISVGVFLPYHVANFLASMSGVRITFKTHNLNNGRPEKGNSGVLYVCNHRTLLDPVFLTTSLGKPLTAVTYSLSKFSEFIAPLKTVSLKRDRKKDGEAMQRLLSKGDLVVCPEGTTCREPYLLRFSPLFAELTEDIVPVAVDARVSMFYGTTASGLKCLDPIFFLMNPRPVYCLEILKKLPKEMTCAGGKSSFEVANFIQGELARVLGFECTNLTRRDKYLVLAGNEGIVR

SEQ ID NO: 103870 - protein, 585 aa, Arabidopsis thaliana
  peptide (1)..(585): Ceres Seq. ID no. 13613761
MVLPELLVILAEWVLYRLLAKSCYRAARKLRGYGFQLKNLLSLSKTQSLHNNSQHHLHNHHQQNHPNQTLQDSLDPLFPSLTKYQELLLDKNRACSVSSDHYRDTFFCDIDGVLLRQHSSKHFHTFFPYFMLVAFEGGSIIRAILLLLSCSFLWTLQQETKLRVLSFITFSGLRVKDMDNVSRSVLPKFFLENLNIQVYDIWARTEYSKVVFTSLPQVLVERFLREHLNADDVIGTKLQEIKVMGRKFYTGLASGSGFVLKHKSAEDYFFDSKKKPALGIGSSSSPQDHIFISICKEAYFWNEEESMSKNNALPRERYPKPLIFHDGRLAFLPTPLATLAMFIWLPIGFLLAVFRISVGVFLPYHVANFLASMSGVRITFKTHNLNNGRPEKGNSGVLYVCNHRTLLDPVFLTTSLGKPLTAVTYSLSKFSEFIAPLKTVSLKRDRKKDGEAMQRLLSKGDLVVCPEGTTCREPYLLRFSPLFAELTEDIVPVAVDARVSMFYGTTASGLKCLDPIFFLMNPRPVYCLEILKKLPKEMTCAGGKSSFEVANFIQGELARVLGFECTNLTRRDKYLVLAGNEGIVR

SEQ ID NO: 103871 - protein, 455 aa, Arabidopsis thaliana
  peptide (1)..(455): Ceres Seq. ID no. 13613762
MLVAFEGGSIIRAILLLLSCSFLWTLQQETKLRVLSFITFSGLRVKDMDNVSRSVLPKFFLENLNIQVYDIWARTEYSKVVFTSLPQVLVERFLREHLNADDVIGTKLQEIKVMGRKFYTGLASGSGFVLKHKSAEDYFFDSKKKPALGIGSSSSPQDHIFISICKEAYFWNEEESMSKNNALPRERYPKPLIFHDGRLAFLPTPLATLAMFIWLPIGFLLAVFRISVGVFLPYHVANFLASMSGVRITFKTHNLNNGRPEKGNSGVLYVCNHRTLLDPVFLTTSLGKPLTAVTYSLSKFSEFIAPLKTVSLKRDRKKDGEAMQRLLSKGDLVVCPEGTTCREPYLLRFSPLFAELTEDIVPVAVDARVSMFYGTTASGLKCLDPIFFLMNPRPVYCLEILKKLPKEMTCAGGKSSFEVANFIQGELARVLGFECTNLTRRDKYLVLAGNEGIVR

SEQ ID NO: 103872 - DNA, 1230 bp, Arabidopsis thaliana
  misc_feature (1)..(1230): Ceres Seq. ID no. 13613771
  misc_feature (1)..(1230): Ortholog of  Ceres SEQ ID NO 13593955 as cited in SEQ ID NO 54278
  misc_feature (1)..(1230): Ortholog of  Ceres SEQ ID NO 13655302 as cited in SEQ ID NO 63307
  misc_feature (1)..(1230): Ortholog of  Ceres SEQ ID NO 13597380 as cited in SEQ ID NO 64054
  misc_feature (1)..(1230): Ortholog of  Ceres SEQ ID NO 12625474 as cited in SEQ ID NO 64169
  misc_feature (1)..(1230): Ortholog of  Ceres SEQ ID NO 13597502 as cited in SEQ ID NO 64681
gacaaaatgttgatccatgtaattatattcatgatcataacgacaatgcaattctcgacgacatgccatgcatatgtgattaacgtgaccaacgttaacgtatcaatgttcccggctattcttgtattcggggattcaacaatcgataccggcaacaacaactacatcaaaacctacatccgggctaatttccctccttacggctgcaatttccccggccacaacgctaccggaagattctctaacggtaaacttattccggacttcatagcatctcttatgggaatcaaagacaccgttcctcctttcctagaccctcacttgtctgattccgatatcatcaccggagtgtgctttgcttcggctggttccggttacgacaacctcacagatcgagcaacttcaactctatccgttgataaacaggcggatatgctcagaagttacgtggagaggttgagccagatcgtcggggacgagaaagcggcctcgatagtcagcgaggctctggtgattgtaagctccggaactaacgatttcaatctaaatctctacgatactccttctcgtcgtcagaagcttggcgttgatggctatcaaagcttcattctctcgaatgtacacaacttcgttcaagaactatatgacattggatgccgtaaaataatggtgttgggtctaccgccggtcgggtgtttaccaattcagatgacaatggctatgcaaaagcagaacgagagacgatgcatcgacaaacaaaactcagattcacaagagtttaaccagaagctaaaaaactccttgacggagatgcaatccaacctcactggaagtgtcatcttctacggcgatatctacggagcattgttcgacatggccactaatcctcaaagatacgggttaaaggagacgacgagaggatgttgcgggactggagaaatagagttagcgtacttgtgcaatgctttaactcggatttgtcctaaccctaaccagtaccttttctgggacgatattcatccttcccaaattgcttacatagtcatcagtctcagtcttgttgaacaaattttccacgtactctcttgattttcattttgctttcatatatattaattaatctgtagtcaatctataattatttccctgtgggttcacataatctttcgtatttgcttaagctaggttttacatgtatactattatgatattatactactctatcctggt

SEQ ID NO: 103873 - protein, 362 aa, Arabidopsis thaliana
  peptide (1)..(362): Ceres Seq. ID no. 13613772
DKMLIHVIIFMIITTMQFSTTCHAYVINVTNVNVSMFPAILVFGDSTIDTGNNNYIKTYIRANFPPYGCNFPGHNATGRFSNGKLIPDFIASLMGIKDTVPPFLDPHLSDSDIITGVCFASAGSGYDNLTDRATSTLSVDKQADMLRSYVERLSQIVGDEKAASIVSEALVIVSSGTNDFNLNLYDTPSRRQKLGVDGYQSFILSNVHNFVQELYDIGCRKIMVLGLPPVGCLPIQMTMAMQKQNERRCIDKQNSDSQEFNQKLKNSLTEMQSNLTGSVIFYGDIYGALFDMATNPQRYGLKETTRGCCGTGEIELAYLCNALTRICPNPNQYLFWDDIHPSQIAYIVISLSLVEQIFHVLS

SEQ ID NO: 103874 - protein, 360 aa, Arabidopsis thaliana
  peptide (1)..(360): Ceres Seq. ID no. 13613773
MLIHVIIFMIITTMQFSTTCHAYVINVTNVNVSMFPAILVFGDSTIDTGNNNYIKTYIRANFPPYGCNFPGHNATGRFSNGKLIPDFIASLMGIKDTVPPFLDPHLSDSDIITGVCFASAGSGYDNLTDRATSTLSVDKQADMLRSYVERLSQIVGDEKAASIVSEALVIVSSGTNDFNLNLYDTPSRRQKLGVDGYQSFILSNVHNFVQELYDIGCRKIMVLGLPPVGCLPIQMTMAMQKQNERRCIDKQNSDSQEFNQKLKNSLTEMQSNLTGSVIFYGDIYGALFDMATNPQRYGLKETTRGCCGTGEIELAYLCNALTRICPNPNQYLFWDDIHPSQIAYIVISLSLVEQIFHVLS

SEQ ID NO: 103875 - protein, 352 aa, Arabidopsis thaliana
  peptide (1)..(352): Ceres Seq. ID no. 13613774
MIITTMQFSTTCHAYVINVTNVNVSMFPAILVFGDSTIDTGNNNYIKTYIRANFPPYGCNFPGHNATGRFSNGKLIPDFIASLMGIKDTVPPFLDPHLSDSDIITGVCFASAGSGYDNLTDRATSTLSVDKQADMLRSYVERLSQIVGDEKAASIVSEALVIVSSGTNDFNLNLYDTPSRRQKLGVDGYQSFILSNVHNFVQELYDIGCRKIMVLGLPPVGCLPIQMTMAMQKQNERRCIDKQNSDSQEFNQKLKNSLTEMQSNLTGSVIFYGDIYGALFDMATNPQRYGLKETTRGCCGTGEIELAYLCNALTRICPNPNQYLFWDDIHPSQIAYIVISLSLVEQIFHVLS

SEQ ID NO: 103876 - DNA, 1817 bp, Arabidopsis thaliana
  misc_feature (1)..(1817): Ceres Seq. ID no. 13613793
  misc_feature (1)..(1817): Ortholog of  Ceres SEQ ID NO 12609146 as cited in SEQ ID NO 52118
  misc_feature (1)..(1817): Ortholog of  Ceres SEQ ID NO 13638136 as cited in SEQ ID NO 58644
  misc_feature (1)..(1817): Ortholog of  Ceres SEQ ID NO 14302836 as cited in SEQ ID NO 65013
gatatttattcaactgcgtggtataaccaaaaaaaaaagaaacactattcgactctttttttgtttttgtaataaacataaaataaattttggagagagatatttcgtcggaaattaattgacgttcaaaagattcgttaccggaatatttagtagaggcggcgatcgagttatggcggatatttgttatgaagacgagacgtcggcttgtgaatcaagaccgttgtggtctagccggaagtggaggatcggtgtccagcgattcaggatgtctccgtcggagatgaatcccacggcgtcgacgacggaggaggaggataaatctgaagggatttataataagcgaaataaacaagaagagtacgattttatgaactgtgcatcgtcgtcaccttctcaaagctctcctgaagaagagagtgtatcacttgaagacagtgacgtctctatctccgatggaaattcatcggttaatgatgttgcagttattccgtcgaagaagacggttaaagagacggatctgaggccgagatacggcgtcgcatcggtgtgcgggagaagaagagatatggaagatgcggttgcgttacatccgtcttttgtacggaaacaaacggagttttctcgaacaagatggcactattttggtgtttacgacggccatggctgttctcacgttgcggctaggtgtaaagagagacttcacgagttagtgcaagaagaagcgttgtcggataagaaagaagaatggaagaagatgatggagcgtagcttcacacgtatggacaaagaggttgttcgttggggtgaaactgtgatgagtgctaattgtaggtgtgagcttcaaacgccggactgtgacgctgttggatccaccgccgttgtctccgtcattacgccggagaagatcattgttgcgaattgcggtgactcaagagcagttctttgtaggaatggtaaagcagtacctctttctacagatcataagcctgatcgtccggatgagctggatcgaatccaagaagcaggaggacgagtgatatactgggacggtgcaagagtcttaggcgttttagccatgtcacgagccataggagacaattatttaaaaccgtacgtcacttcggagccggaagtgacggttacggatcggactgaggaagatgagtttctgattctagcgacggacgggctatgggacgtagtgacgaacgaggcagcgtgtacgatggtgcgcatgtgtctcaacagaaaaagtggtcgtggaagacggcgaggagaaacacagactccggggaggaggagtgaagaagaagggaaagaagaagaggagaaggtggtggggtcaagaaagaacgggaagagaggagagatcacggacaaagcatgtacggaggcgtcagtattgctgacgaagctggcgttggcaaaacacagtagtgacaacgtaagcgtcgtcgttattgatctcagaagaagaagaaagagacacgttgcttgacactaatctcctcatcactcttactccaccgttttttgtgttgtttaaaatgattcttttaccttgggacgaaggtagctcaaatctttgaacccaaaagagagaaaaaaaaagcattaggtctaaaaaaaaaaccccggtttactgaaagcggttaaaccgggtatggttgggtcttttttgttctgaacctttttttcttgccttttttcggtgtgtaatgaacaaacagaaaaggaagccggaatgtgtcactgtctaggtggaatcagttcagaattcaattaataaaaaagtatgtatatgttttcttggc

SEQ ID NO: 103877 - protein, 442 aa, Arabidopsis thaliana; identical to SEQ ID NO: 41036
  peptide (1)..(442): Ceres Seq. ID no. 13613794

SEQ ID NO: 103878 - protein, 410 aa, Arabidopsis thaliana; identical to SEQ ID NO: 41037
  peptide (1)..(410): Ceres Seq. ID no. 13613795

SEQ ID NO: 103879 - protein, 405 aa, Arabidopsis thaliana; identical to SEQ ID NO: 41038
  peptide (1)..(405): Ceres Seq. ID no. 13613796

SEQ ID NO: 103880 - DNA, 1538 bp, Arabidopsis thaliana
  misc_feature (1)..(1538): Ceres Seq. ID no. 13613797
  misc_feature (1)..(1538): Ortholog of  Ceres SEQ ID NO 15168521 as cited in SEQ ID NO 58180
aggttcacttctttgatcttccattactaaatgttctctcctctttctctctttttgtaatttctctcttaaattcttcattgatgttttgattcgttttagtaataattttgattcatttccaaaagatattcctattcccatcttcttttctaatccgctttctttaatattccaacatctatatatatgcctacgaattcgaatcatcagcatcatcttcaacaccagcttaacgaaaatggaagtataataagtggccacggactagtactctctcaccaacttccacctctccaagcaaaccctaaccctaaccaccaccatgtcgctacctctgctggtcttccgtcaaggatgggtggatcgatggcggagagagcaaggcaggccaacattcctccactagcgggacccctaaagtgtcctcgatgcgactccagcaacactaagttctgttactacaacaactataacctcactcagcctcgtcacttctgcaaaggttgccgtcgctactggacacaagggggcgccctgagaaacgtccctgtaggtggaggctgccggaggaataacaagaagggcaaaaatggaaatttaaaatcttcttcttcttcgtccaaacagtcttcctcggtcaacgctcaaagtcctagctcaggacagctaaggacaaatcatcagttccctttttcaccaactctttacaatctcactcaactcggaggtattggtttgaacttagccgctactaatggcaacaaccaagctcaccagatcggttccagtttgatgatgagcgatctagggtttctccatggacgaaatacttcaactccgatgacgggaaacattcatgaaaacaacaacaataataacaatgaaaacaacctaatggcatccgttggatctttgagcccctttgctctcttcgatccaacgacggggctatacgctttccagaacgacggtaatatcgggaacaacgttgggatatctggttcttctacttccatggttgattctagggtttatcagacgcctccggtgaagatggaagaacaacctaatttggctaacttgtctagaccggtctccggtttgacgtctcctgggaatcaaacaaatcagtacttttggcctggttcggatttctcgggtccttctaatgatctcttgtgagatttttgtgtgttttgtcggatcattaacgtatgttacgacttacgacgtggagattgattaaaaggactaccaacggtcaggattaactgcatgcatagtctgtgctcaagacgatgatcgtggagaagtacaaggacaaactaaaaggtatcttaattagagattgtggttttacaacttaaattcgatacttatttatataatcaggtgtgtcatataatttgtttgtattgcgtgatttcatggttgatctgatttctcaagttgctatatatgcctcaatacatgtgtgtaacagtccaatttgtatactctttagactgaattttatcgaatatataatatttttc

SEQ ID NO: 103881 - protein, 331 aa, Arabidopsis thaliana
  peptide (1)..(331): Ceres Seq. ID no. 13613798
MPTNSNHQHHLQHQLNENGSIISGHGLVLSHQLPPLQANPNPNHHHVATSAGLPSRMGGSMAERARQANIPPLAGPLKCPRCDSSNTKFCYYNNYNLTQPRHFCKGCRRYWTQGGALRNVPVGGGCRRNNKKGKNGNLKSSSSSSKQSSSVNAQSPSSGQLRTNHQFPFSPTLYNLTQLGGIGLNLAATNGNNQAHQIGSSLMMSDLGFLHGRNTSTPMTGNIHENNNNNNNENNLMASVGSLSPFALFDPTTGLYAFQNDGNIGNNVGISGSSTSMVDSRVYQTPPVKMEEQPNLANLSRPVSGLTSPGNQTNQYFWPGSDFSGPSNDLL

SEQ ID NO: 103882 - protein, 275 aa, Arabidopsis thaliana; identical to SEQ ID NO: 20921
  peptide (1)..(275): Ceres Seq. ID no. 13613799

SEQ ID NO: 103883 - protein, 271 aa, Arabidopsis thaliana; identical to SEQ ID NO: 20922
  peptide (1)..(271): Ceres Seq. ID no. 13613800

SEQ ID NO: 103884 - DNA, 729 bp, Arabidopsis thaliana
  misc_feature (1)..(729): Ceres Seq. ID no. 13613801
  misc_feature (1)..(729): Ortholog of  Ceres SEQ ID NO 15174264 as cited in SEQ ID NO 61877
atcaccattcaccactaaactacttcaatcaacttccttttcccgagaaaatcagaaagaaaattcacgatggcaccaagagccgagaagaagcccgccgagaaaaaaaccgccgctgagagaccggtggaagagaacaaggctgctgaaaaggctccggcggagaagaaacccaaggcggggaagaaattgccaccaaaggaagccggtgacaagaagaagaagcgatctaagaaaaacgtcgaaacctacaagatctacatcttcaaggtgctgaagcaggttcatccagatatcggaatttcaagcaaagccatggggattatgaacagtttcatcaacgacatattcgagaagctagctcaggaatcttcgaaactcgctaggtacaacaagaagccgaccattacatctcgcgagatccagacggctgtgagactcgtcctccccggtgaactcgctaaacacgccgtctctgaaggtaccaaggcggttaccaagtttactagctcttgaagagacccggttagggtttttagggatttcaatttcggtttggtttttagtacttgtaggaaattagatgcattattcgcttaacttcgtattttgtggctttgtaactctaggaagtagagaagattgttccttccttttatgaatttcaatgttggattatatatttttaacgatttttttttccatttcaatttcatttacctaatcact

SEQ ID NO: 103885 - protein, 148 aa, Arabidopsis thaliana; identical to SEQ ID NO: 28124
  peptide (1)..(148): Ceres Seq. ID no. 13613802

SEQ ID NO: 103886 - protein, 91 aa, Arabidopsis thaliana; identical to SEQ ID NO: 28125
  peptide (1)..(91): Ceres Seq. ID no. 13613803

SEQ ID NO: 103887 - DNA, 829 bp, Arabidopsis thaliana
  misc_feature (1)..(829): Ceres Seq. ID no. 13613804
  misc_feature (1)..(829): Ortholog of  Ceres SEQ ID NO 13594220 as cited in SEQ ID NO 57121
  misc_feature (1)..(829): Ortholog of  Ceres SEQ ID NO 12638425 as cited in SEQ ID NO 0
ctccgtaaacctgttattctcggagaaacgttgagagagggttttccattctctgtggccgtcaccgtcgccgtgaaatagctctcctctctctatctccgattatataactgcaagctcaaaggaattgtttgttgttaaaatgtttcttacgcgatttgtcgggaggagattcttggcggctgcatcggcgcgatcggagtccactacagcagcagcagctgcctcgacgattcggacgccaacaaatccactcgaagagttctttgagttcgacagaagccaagacgaagataaacctgttgtctatggtcgaggttggaaagcttcagagctgcgtctcaagtcatgggatgatcttcagaagctgtggtacgttcttctcaaagagaaaaacatgttgatgactcagcgtcagatgcttcaggctcagaacatgcagtttcctaaccctgaacgcattccaaaggtgaggagatcaatgtgccgcattaagcatgtgctgaccgagagagcgattgaagaaccagattctagaagatcagccgagatgaagagaatggtaaatggtatgtgatcccattggctcttgttttggcaacctagcagtaagcacgagtcaatccgcagaggtgttgagtttttcggagtaagaaataacgcatagctttcaagactttggaactggtccaatgattgtgactgtagtagtgtcggcagtagaaaaacgtttggttggtatctgtacgcacatttctgtaacttatggttgatgtttctttttgagacacatgttggtcagtgttgattcagagctttgtctttctct

SEQ ID NO: 103888 - protein, 144 aa, Arabidopsis thaliana; identical to SEQ ID NO: 35600
  peptide (1)..(144): Ceres Seq. ID no. 13613805

SEQ ID NO: 103889 - DNA, 851 bp, Arabidopsis thaliana
  misc_feature (1)..(851): Ceres Seq. ID no. 13613810
  misc_feature (1)..(851): Ortholog of  Ceres SEQ ID NO 14309686 as cited in SEQ ID NO 58523
gacattcctctctttcttctgctctcggaattggtgttgcagaagttgcaaatttggaagaaaagttaacaggactggtgaagtatcaaaatttggggttttgctacgatgacgctaggtgctcggcttgttgctcccatgattatacttctcctttttataccgattgaattagttaaagcggaagtcattacactgacaccagaaaccttttctgacaagataaaggagaaggatactgcgtggttcgtaaagttttgtgttccttggtgtaaacactgcaagaaactggggaatttgtgggaagacttgggaaaagcaatggagggagacgatgaaattgaggttggtgaagtagactgtggtactagcagagctgtttgcaccaaagttgaaattcactcgtatccaacatttatgctattttacaatggagaagaagtttcgaaatataaaggaaaaagagacgttgaatcgctcaaggcttttgttgtagaggaaactgaaaaggcagcagaaaaagcacagcttgaagacaaggaactgtgatacaactagtcggtgattattagaacctgatacattgttccctttggttttcattttgcctatgcagttgtgtgactcttaccgttagttagataggcatggttttcagcacgatggaggagcatctttgggtttaaaggtttttcacaccactgttttgctaaaatattcagtttccattttattcagagtcagataagcaaagacgtaagtgtagttagtcgagatttcttacaagtttgtgttgtatgttcgttttaagagcagctgcagaccaaagttcttgctttaaaatttcatat

SEQ ID NO: 103890 - protein, 146 aa, Arabidopsis thaliana; identical to SEQ ID NO: 29677
  peptide (1)..(146): Ceres Seq. ID no. 13613811

SEQ ID NO: 103891 - protein, 136 aa, Arabidopsis thaliana; identical to SEQ ID NO: 29678
  peptide (1)..(136): Ceres Seq. ID no. 13613812

SEQ ID NO: 103892 - protein, 75 aa, Arabidopsis thaliana; identical to SEQ ID NO: 29679
  peptide (1)..(75): Ceres Seq. ID no. 13613813

SEQ ID NO: 103893 - DNA, 1085 bp, Arabidopsis thaliana
  misc_feature (1)..(1085): Ceres Seq. ID no. 13613814
  misc_feature (1)..(1085): Ortholog of  Ceres SEQ ID NO 12617391 as cited in SEQ ID NO 64114
  misc_feature (1)..(1085): Ortholog of  Ceres SEQ ID NO 13595922 as cited in SEQ ID NO 69293
  misc_feature (1)..(1085): Ortholog of  Ceres SEQ ID NO 12635496 as cited in SEQ ID NO 0
gatcaacatctccttgaagttgtttcataagaataagagctataaaagaggataaaaccaaaatttgaatttttttcttctatctctctccccaagatatatagcacaagaaaatgaagataccatcaattggctatgtctttttccttatcttcatctctattacaattgtttcgagttcaccagatcatggagaagttgaggacgaaacgcagtttaactacgagaagaaaggagagaaggggccagagaactggggaagactaaagccagagtgggcaatgtgtggaaaaggcaacatgcagtctccgattgatcttacggacaaaagagtcttgattgatcataatcttggataccttcgtagccagtatttaccttcaaatgccaccattaagaacagaggccatgatatcatgatgaaatttgaaggaggaaatgcaggtttaggtatcactattaatggtactgaatataaacttcaacagattcattggcactctccttccgaacacacactcaatggcaaaaggtttgttcttgaggaacacatggttcatcagagcaaagatggacgcaacgctgttgtcgctttcttttacaaattgggaaaacctgactattttctcctcacgttggaaagatacttgaagaggataactgatacacacgaatcccaggaatttgtcgagatggttcatcctagaacattcggttttgaatcaaaacactattatagatttatcggatcacttacaactccaccgtgttctgaaaatgtgatttggacgatttccaaagagatgaggactgtgacattaaaacaattgatcatgcttcgagtgactgtacacgatcaatctaactcaaatgctagaccgcttcagcgtaaaaatgagcgtccggtggcactttacataccaacatggcatagtaaactatattaaatatttaagtttggtttatattctttctagtaatctttgaaatattgtaagagataatgcttctaataaataacattggatttattggaattaatgtattgaaaaaactatgcaaatactacagtgtattttggaacg

SEQ ID NO: 103894 - protein, 277 aa, Arabidopsis thaliana
  peptide (1)..(277): Ceres Seq. ID no. 13613815
MKIPSIGYVFFLIFISITIVSSSPDHGEVEDETQFNYEKKGEKGPENWGRLKPEWAMCGKGNMQSPIDLTDKRVLIDHNLGYLRSQYLPSNATIKNRGHDIMMKFEGGNAGLGITINGTEYKLQQIHWHSPSEHTLNGKRFVLEEHMVHQSKDGRNAVVAFFYKLGKPDYFLLTLERYLKRITDTHESQEFVEMVHPRTFGFESKHYYRFIGSLTTPPCSENVIWTISKEMRTVTLKQLIMLRVTVHDQSNSNARPLQRKNERPVALYIPTWHSKLY

SEQ ID NO: 103895 - protein, 221 aa, Arabidopsis thaliana; identical to SEQ ID NO: 75103
  peptide (1)..(221): Ceres Seq. ID no. 13613816

SEQ ID NO: 103896 - protein, 215 aa, Arabidopsis thaliana; identical to SEQ ID NO: 75104
  peptide (1)..(215): Ceres Seq. ID no. 13613817

SEQ ID NO: 103897 - DNA, 719 bp, Arabidopsis thaliana
  misc_feature (1)..(719): Ceres Seq. ID no. 13613829
  misc_feature (1)..(719): Ortholog of  Ceres SEQ ID NO 12612272 as cited in SEQ ID NO 55946
atcataaattcgaaattcaattcgtcggaaaattgttcagatttcgaaatcaaccgagaaaatgtcgctgattccaagcttcttcggcaacaacaggcgaatcaacaacaacatattcgatccattctcactcgacgtatgggatccattcaaggaacttcaattcccgtcatcgtcttcgtcggcgatagcaaacgcacgtgtggattggaaagagacggcggaggcgcacgtgttcaaggcggatttaccggggatgaagaaagaagaggttaaagtagagattgaggatgatagtgtgcttaagatcagcggagagagacacgttgagaaagaggagaagcaggacacgtggcatcgtgtagagagatcgagtgggggattctcgaggaagtttaggttaccggagaatgtgaagatggatcaagttaaagcttcaatggagaatggtgttttgactgtgactgtgcctaaagtggagactaataagaagaaggctcaagttaagtctattgatatctctggctaagccaatttagcttgatttgagttctctctgggtcttgactttgtgtgtgtgtgtctctgatgattatggttcttcgtttgattgtagttttaaactaataatcaatggaagctagtaacttgtgtgacaagtaaatgtatggtggagaaatgtgtgtatttggattataatagaaatacctattttcatc

SEQ ID NO: 103898 - protein, 155 aa, Arabidopsis thaliana
  peptide (1)..(155): Ceres Seq. ID no. 13613830
MSLIPSFFGNNRRINNNIFDPFSLDVWDPFKELQFPSSSSSAIANARVDWKETAEAHVFKADLPGMKKEEVKVEIEDDSVLKISGERHVEKEEKQDTWHRVERSSGGFSRKFRLPENVKMDQVKASMENGVLTVTVPKVETNKKKAQVKSIDISG

SEQ ID NO: 103899 - protein, 91 aa, Arabidopsis thaliana
  peptide (1)..(91): Ceres Seq. ID no. 13613831
IINSKFNSSENCSDFEINRENVADSKLLRQQQANQQQHIRSILTRRMGSIQGTSIPVIVFVGDSKRTCGLERDGGGARVQGGFTGDEERRG

SEQ ID NO: 103900 - protein, 90 aa, Arabidopsis thaliana; identical to SEQ ID NO: 22187
  peptide (1)..(90): Ceres Seq. ID no. 13613832

SEQ ID NO: 103901 - DNA, 1972 bp, Arabidopsis thaliana
  misc_feature (1)..(1972): Ceres Seq. ID no. 13613837
  misc_feature (1)..(1972): Ortholog of  Ceres SEQ ID NO 13590904 as cited in SEQ ID NO 66072
aaaagaatacacagaccagtcttcgtgtgctcgtaattggcgattctcaaattcgatctccgtacaaacaatggccgaaacctcgaagcaagtcaacggcgacgatgcccaggatcttcactcgcttctttcttctccggcgagggatttcctcgttcgtaatgacggcgaacaggtgaaagttgacagcttgttagggaagaagattggattgtatttttcagctgcttggtgtggaccgtgtcagcggtttactccacagctggtggaagtctacaacgagctctcttcgaaagttggttttgagattgtgtttgtgtcaggtgatgaggatgaagagtcatttggagattatttcagaaagatgccctggctcgctgttccgtttactgattcggaaacccgtgaccgtttggatgagttgtttaaggttaggggaatacctaacctagtgatggttgatgatcatggtaaacttgtgaatgagaatggtgttggggtcatacgaagctatggagctgatgcttatcctttcacaccagagaaaatgaaggagatcaaagaggatgaagatagagctcggagaggacagaccttaagatctgtcttggtgactccttcacgagactttgtgatttcgcctgacggaaacaaggtacccgtatcagagcttgagggaaaaaccattggccttctcttctctgtggcctcttacaggaaatgcacagagcttactccaaagcttgttgagttttatacgaagctgaaggagaataaggaggattttgagattgtgttgatatctcttgaagatgatgaggagtcttttaatcaagacttcaagaccaagccatggctagcattgccgttcaacgacaaaagtggatcaaaattggctcggcatttcatgctgtcaacactaccgacactggtcattctcggccctgatggaaaaacccgtcactcgaatgtcgctgaagctattgatgactatggagttcttgcgtatcctttcactccagagaagtttcaagaactcaaggagctagaaaaggcaaaggtagaggctcaaacgctcgagtcacttcttgtctcaggtgatctcaactacgttctcggaaaagatggggcaaaggtgcttgtttcggatctggtggggaagactattcttatgtacttctcagctcactggtgtcctccttgtcgcgcttttacaccaaagcttgttgaagtatacaagcagataaaggagcggaatgaagcgtttgaattgatcttcatctccagtgaccgtgaccaggaatcattcgatgagtactattcgcaaatgccgtggctggctcttccatttggtgatcctaggaaagcatccttggcaaaaacctttaaggttggtgggatcccaatgctagcagctctgggaccaactgggcaaaccgtaacaaaagaagcaagggaccttgtcgtagcccatggagccgatgcttacccttttactgaggaacgtttgaaggagattgaagctaagtacgatgagatagcaaaagattggcctaagaaggtgaaacatgttctccatgaagaacatgagctagaactaactcgtgttcaggtttacacatgcgataagtgtgaggaagaagggacaatatggtcttaccattgcgacgaatgcgactttgatcttcacgccaagtgtgctttaaacgaggacacaaaagaaaacggcgatgaggctgtgaaagttggtggcgacgagtccaaagatggttgggtttgtgaaggaaacgtatgcaccaaggcctgataggtagcttcaggcacagttatgtcactatgtgtatgcaaagctatttcctttctttgtataattgctaagagtgagaatgtgtggttacaatctgatatctgattaagaccttggagataaactctgttaatctaaagtaataataaaagaatcttcttattt

SEQ ID NO: 103902 - protein, 601 aa, Arabidopsis thaliana
  peptide (1)..(601): Ceres Seq. ID no. 13613838
KEYTDQSSCARNWRFSNSISVQTMAETSKQVNGDDAQDLHSLLSSPARDFLVRNDGEQVKVDSLLGKKIGLYFSAAWCGPCQRFTPQLVEVYNELSSKVGFEIVFVSGDEDEESFGDYFRKMPWLAVPFTDSETRDRLDELFKVRGIPNLVMVDDHGKLVNENGVGVIRSYGADAYPFTPEKMKEIKEDEDRARRGQTLRSVLVTPSRDFVISPDGNKVPVSELEGKTIGLLFSVASYRKCTELTPKLVEFYTKLKENKEDFEIVLISLEDDEESFNQDFKTKPWLALPFNDKSGSKLARHFMLSTLPTLVILGPDGKTRHSNVAEAIDDYGVLAYPFTPEKFQELKELEKAKVEAQTLESLLVSGDLNYVLGKDGAKVLVSDLVGKTILMYFSAHWCPPCRAFTPKLVEVYKQIKERNEAFELIFISSDRDQESFDEYYSQMPWLALPFGDPRKASLAKTFKVGGIPMLAALGPTGQTVTKEARDLVVAHGADAYPFTEERLKEIEAKYDEIAKDWPKKVKHVLHEEHELELTRVQVYTCDKCEEEGTIWSYHCDECDFDLHAKCALNEDTKENGDEAVKVGGDESKDGWVCEGNVCTKA

SEQ ID NO: 103903 - protein, 578 aa, Arabidopsis thaliana; identical to SEQ ID NO: 22942
  peptide (1)..(578): Ceres Seq. ID no. 13613839

SEQ ID NO: 103904 - protein, 480 aa, Arabidopsis thaliana; identical to SEQ ID NO: 22943
  peptide (1)..(480): Ceres Seq. ID no. 13613840

SEQ ID NO: 103905 - DNA, 1794 bp, Arabidopsis thaliana
  misc_feature (1)..(1794): Ceres Seq. ID no. 13613851
  misc_feature (1)..(1794): Ortholog of  Ceres SEQ ID NO 14313943 as cited in SEQ ID NO 54725
  misc_feature (1)..(1794): Ortholog of  Ceres SEQ ID NO 14309674 as cited in SEQ ID NO 55707
  misc_feature (1)..(1794): Ortholog of  Ceres SEQ ID NO 13658728 as cited in SEQ ID NO 66270
  misc_feature (1)..(1794): Ortholog of  Ceres SEQ ID NO 12465428 as cited in SEQ ID NO 68898
gaattagggttttactcaaaaaaccttctcgttgtcgttgtttactgctccgacgagaaaatggcgatgcgacatttgagccgatcgagagacgttacaaagagatcgacaaagaagtacatcgaagaacctctgtacaatcgcctcttcaaagatggtggtacagaggtcaaagttcgacagcagcttaatcagttcctcaaaggcactaaacacgtcttcaaatgggaggtcggcgatacgatcaagaaactccgaaatcgcggcctctattacccagctctcaagctatctgaagttatggaagagagaggtatgaacaagacagtgagtgatcaagcaatccatcttgatcttgttgctaaagctcgtgaaattactgctggggagaattattttgttgatcttccggaaacatctaagacggaactcacgtatgggtctcttttgaactgttactgcaaggagttgttgacagagaaagcggaaggtttgctgaataagatgaaagagctcaacattactcctagttccatgtcttataacagcctcatgactctttacaccaagacaggtgagactgagaaagttccggcgatgattcaagaattgaaggcggagaatgtgatgccggattcgtacacttataatgtctggatgagggctttggctgctactaatgatatttctggtgttgagagagtcattgaagagatgaatagagatggtagagttgctccggattggactacgtatagcaatatggcatcgatatatgttgatgctggactgtctcagaaagctgagaaggctcttcaggaactggagatgaaaaacacgcaacgggattttacggcatatcagtttcttattactttgtatggacgtctggggaagctgactgaagtttacagaatttggcgttcgttgaggctggctattccgaaaacctcaaatgtagcttatctaaacatgatacaagtgctggtcaagttgaatgatttacctggtgcagagacattgttcaaggaatggcaagctaactgttctacttatgacatcaggattgtgaatgtgttgattggagcttatgctcaagagggtctaatccagaaagcaaatgagctcaaggagaaagctcccagaagaggtggaaagctcaatgctaaaacatgggagatcttcatggattactatgtaaagagcggtgatatggctcgagcactcgaatgcatgtcaaaggcagtctccatcggcaaaggagatggtggcaagtggctaccgtcacctgaaacagtcagagctttgatgagctatttcgagcaaaagaaagatgttaatggagctgagaatttgttggagattttaaagaatggaacagacaacataggcgcagaaatatttgaaccattgataagaacatatgcagcagcgggaaagagtcaccctgctatgcgacggcgcctgaagatggaaaacgtggaggttaatgaagcgacaaagaagctactcgatgaagtatctcaggatgtgtgaggtctgttccatctctttctccttcattattcacttcagacaaagacatcattagtcgtgatagggtcacttgcattctcacagctctgtctcttattggtaataaaaaaataggctctgaatcggcaaaatcaattgtatgggtctgttttactttcaccgtagactgtttgttcatgtttttgtgaattgtttttggtttagcttggatttacagttgagacagctctcacaatgtaatccctttttttggagatc

SEQ ID NO: 103906 - protein, 511 aa, Arabidopsis thaliana
  peptide (1)..(511): Ceres Seq. ID no. 13613852
ELGFYSKNLLVVVVYCSDEKMAMRHLSRSRDVTKRSTKKYIEEPLYNRLFKDGGTEVKVRQQLNQFLKGTKHVFKWEVGDTIKKLRNRGLYYPALKLSEVMEERGMNKTVSDQAIHLDLVAKAREITAGENYFVDLPETSKTELTYGSLLNCYCKELLTEKAEGLLNKMKELNITPSSMSYNSLMTLYTKTGETEKVPAMIQELKAENVMPDSYTYNVWMRALAATNDISGVERVIEEMNRDGRVAPDWTTYSNMASIYVDAGLSQKAEKALQELEMKNTQRDFTAYQFLITLYGRLGKLTEVYRIWRSLRLAIPKTSNVAYLNMIQVLVKLNDLPGAETLFKEWQANCSTYDIRIVNVLIGAYAQEGLIQKANELKEKAPRRGGKLNAKTWEIFMDYYVKSGDMARALECMSKAVSIGKGDGGKWLPSPETVRALMSYFEQKKDVNGAENLLEILKNGTDNIGAEIFEPLIRTYAAAGKSHPAMRRRLKMENVEVNEATKKLLDEVSQDV

SEQ ID NO: 103907 - protein, 491 aa, Arabidopsis thaliana; identical to SEQ ID NO: 35372
  peptide (1)..(491): Ceres Seq. ID no. 13613853

SEQ ID NO: 103908 - protein, 489 aa, Arabidopsis thaliana; identical to SEQ ID NO: 35373
  peptide (1)..(489): Ceres Seq. ID no. 13613854

SEQ ID NO: 103909 - DNA, 1460 bp, Arabidopsis thaliana
  misc_feature (1)..(1460): Ceres Seq. ID no. 13613867
  misc_feature (1)..(1460): Ortholog of  Ceres SEQ ID NO 15168537 as cited in SEQ ID NO 57100
  misc_feature (1)..(1460): Ortholog of  Ceres SEQ ID NO 15178681 as cited in SEQ ID NO 63192
  misc_feature (1)..(1460): Ortholog of  Ceres SEQ ID NO 13579918 as cited in SEQ ID NO 64644
  misc_feature (1)..(1460): Ortholog of  Ceres SEQ ID NO 13654122 as cited in SEQ ID NO 68192
aattcccattcgtgttttttcggattgcgagaatcctacgttatttcttcacttttcatgatcccgaggacatcttagaccccaaatgttcttcgtcgatgttctttggaaactggttcctctatacttgttcggatcagaaacaaagtctctctcagcaacagagtccattttgcagatagttcctgaggcaatggctgctacttcatctaacgtcctttgcaatgctagcgagtcagatctttgtcgtgatgattccgctgcatttctacttaaatttgtagccattgcttcgattctcttagctggagctgctggtgtaactataccactcattggcaggaaccgtcgtttccttcaaactgatggtaatctctttgtgactgctaaagcttttgcagctggtgtgattctcgccacgggttttgttcatatgttggcgggtggcacggaagctttgaagaacccgtgcttaccggatttcccttggtctaagtttcctttcccgggattctttgcgatgattgctgctttgatcactctgtttgtggatttcatggggactcagtactatgaacggaagcaagagagggaagctagtgagtctgttgaaccgtttggccgtgaacaatcaccgggtattgttgttcccatgattggagaaggaacgaatgatgggaaagtgtttggtgaagaagacagtggtgggattcacattgttggcattcatgctcatgctgctcatcatagacatagtcatcctcctggtcatgattcatgtgaaggacacagtaaaatcgacattggtcatgctcatgctcatgggcacgggcatggacacggacatggacacgtacacgggggtttggatgctgttaatggagctaggcatatcgttgtttctcaggttctggagcttggaattgtgtcacattccataatcatcggtctatcccttggagtatctcagtctccttgcacaatccggcctctaatcgcagcactatccttccatcaattctttgaaggatttgcgctcggtggatgcatctcccaagcgcaattcaggaacaaatcagcgaccataatggcttgttttttcgccctcacaaccccgatagggatcgggattggaaccgcagtggcgtcgtctttcaattctcacagtgtcggagcattggtcactgaaggtatcttggactcgctctcagccggaattcttgtgtacatggctttagtggatctcatagctgctgatttcttgagtacaaaaatgaggtgtaactttaggcttcaaattgtatcttatgtaatgttgttcctaggagctggactcatgtcttctcttgccatttgggcttaattagagtataagattccatagtttcttctatagctacaaataacatgtatagttctttctagagaatttatcaatctaagatttcacaattgctcgc

SEQ ID NO: 103910 - protein, 425 aa, Arabidopsis thaliana
  peptide (1)..(425): Ceres Seq. ID no. 13613868
MFFVDVLWKLVPLYLFGSETKSLSATESILQIVPEAMAATSSNVLCNASESDLCRDDSAAFLLKFVAIASILLAGAAGVTIPLIGRNRRFLQTDGNLFVTAKAFAAGVILATGFVHMLAGGTEALKNPCLPDFPWSKFPFPGFFAMIAALITLFVDFMGTQYYERKQEREASESVEPFGREQSPGIVVPMIGEGTNDGKVFGEEDSGGIHIVGIHAHAAHHRHSHPPGHDSCEGHSKIDIGHAHAHGHGHGHGHGHVHGGLDAVNGARHIVVSQVLELGIVSHSIIIGLSLGVSQSPCTIRPLIAALSFHQFFEGFALGGCISQAQFRNKSATIMACFFALTTPIGIGIGTAVASSFNSHSVGALVTEGILDSLSAGILVYMALVDLIAADFLSTKMRCNFRLQIVSYVMLFLGAGLMSSLAIWA

SEQ ID NO: 103911 - protein, 389 aa, Arabidopsis thaliana; identical to SEQ ID NO: 29956
  peptide (1)..(389): Ceres Seq. ID no. 13613869

SEQ ID NO: 103912 - protein, 309 aa, Arabidopsis thaliana
  peptide (1)..(309): Ceres Seq. ID no. 13613870
MLAGGTEALKNPCLPDFPWSKFPFPGFFAMIAALITLFVDFMGTQYYERKQEREASESVEPFGREQSPGIVVPMIGEGTNDGKVFGEEDSGGIHIVGIHAHAAHHRHSHPPGHDSCEGHSKIDIGHAHAHGHGHGHGHGHVHGGLDAVNGARHIVVSQVLELGIVSHSIIIGLSLGVSQSPCTIRPLIAALSFHQFFEGFALGGCISQAQFRNKSATIMACFFALTTPIGIGIGTAVASSFNSHSVGALVTEGILDSLSAGILVYMALVDLIAADFLSTKMRCNFRLQIVSYVMLFLGAGLMSSLAIWA

SEQ ID NO: 103913 - DNA, 1329 bp, Arabidopsis thaliana
  misc_feature (1)..(1329): Ceres Seq. ID no. 13613882
  misc_feature (1)..(1329): Ortholog of  Ceres SEQ ID NO 12564952 as cited in SEQ ID NO 63211
atgtccaccatccgttcacttggccgcgttcatataaaccaaaaaccgaacaacaacaaaaattcgaaaattctccggcgacaccaacaatgggaaggtctctaatattctctggaaacatgtcattgagaatctctcacttacccagatcatctcttccgctgcaaaacccaatttcaggccggacagtgaacagaactttccgatatcggtgtacgaggattttgtctaatagcttcaagtccacaacgagacttcaaaccaaagctgttctgtctgaggtttctgatcagacgcgatatcccagaatcggcgctaaaaccaccggaactatatctccggcacacctccttgaagtcgttgaactcgccgctaaaaccggcgctgaggtggttatggaagctgtaaataagccaaggaatattacttataaaggtctcagtgacttagtaactgatactgataaagcaagcgaggctgctattttggaagtagtgaagaagaattttagtgatcatcttattcttggtgaagaaggaggtatcatcggcgattcgtcttctgattacctctggtgcattgatcctctagatggaactacaaattttgctcatggatatcccagttttgctgtttccgtcggtgttctgtatcgtggaaatcccgccgctgcttctgtggtagagtttgtcggtggtccgatgtgctggaacactcgaaccttttctgcaactgcaggtggtggagcattgtgtaacgggcaaaaaattcatgtcagtaagaccgatgctgtggagagagcacttcttatcacagggtttggttatgaacatgatgatgcatggagcactaacatggaactgttcaaagagtttactgatgtgagtcggggagtgcgaagactcggtgctgctgcagttgacatgtgtcatgttgcacttgggattgcggaatcatattgggagtaccgtttaaagccatgggacatggctgctggtgttcttatagttgaggaagctggaggagctgtgactcggatggacggagggaagttttctgtgtttgataggtctgttttggtctccaacggcgttcttcaccccaagcttctggaaagaattgcacccgcaactgagaatttgaagtcgaaaggaatcgatttctcgttatggttcaaaccggaagattatcatacagagctttaagacttgttcaagaaaggtatataagattacattgttatgatctaaagctcttatatttgaactgaaacgaggtataagatttgcgttcggattatgaaaatcaataatgatcatattccccctt

SEQ ID NO: 103914 - protein, 400 aa, Arabidopsis thaliana
  peptide (1)..(400): Ceres Seq. ID no. 13613883
VHHPFTWPRSYKPKTEQQQKFENSPATPTMGRSLIFSGNMSLRISHLPRSSLPLQNPISGRTVNRTFRYRCTRILSNSFKSTTRLQTKAVLSEVSDQTRYPRIGAKTTGTISPAHLLEVVELAAKTGAEVVMEAVNKPRNITYKGLSDLVTDTDKASEAAILEVVKKNFSDHLILGEEGGIIGDSSSDYLWCIDPLDGTTNFAHGYPSFAVSVGVLYRGNPAAASVVEFVGGPMCWNTRTFSATAGGGALCNGQKIHVSKTDAVERALLITGFGYEHDDAWSTNMELFKEFTDVSRGVRRLGAAAVDMCHVALGIAESYWEYRLKPWDMAAGVLIVEEAGGAVTRMDGGKFSVFDRSVLVSNGVLHPKLLERIAPATENLKSKGIDFSLWFKPEDYHTEL

SEQ ID NO: 103915 - protein, 371 aa, Arabidopsis thaliana
  peptide (1)..(371): Ceres Seq. ID no. 13613884
MGRSLIFSGNMSLRISHLPRSSLPLQNPISGRTVNRTFRYRCTRILSNSFKSTTRLQTKAVLSEVSDQTRYPRIGAKTTGTISPAHLLEVVELAAKTGAEVVMEAVNKPRNITYKGLSDLVTDTDKASEAAILEVVKKNFSDHLILGEEGGIIGDSSSDYLWCIDPLDGTTNFAHGYPSFAVSVGVLYRGNPAAASVVEFVGGPMCWNTRTFSATAGGGALCNGQKIHVSKTDAVERALLITGFGYEHDDAWSTNMELFKEFTDVSRGVRRLGAAAVDMCHVALGIAESYWEYRLKPWDMAAGVLIVEEAGGAVTRMDGGKFSVFDRSVLVSNGVLHPKLLERIAPATENLKSKGIDFSLWFKPEDYHTEL

SEQ ID NO: 103916 - protein, 361 aa, Arabidopsis thaliana
  peptide (1)..(361): Ceres Seq. ID no. 13613885
MSLRISHLPRSSLPLQNPISGRTVNRTFRYRCTRILSNSFKSTTRLQTKAVLSEVSDQTRYPRIGAKTTGTISPAHLLEVVELAAKTGAEVVMEAVNKPRNITYKGLSDLVTDTDKASEAAILEVVKKNFSDHLILGEEGGIIGDSSSDYLWCIDPLDGTTNFAHGYPSFAVSVGVLYRGNPAAASVVEFVGGPMCWNTRTFSATAGGGALCNGQKIHVSKTDAVERALLITGFGYEHDDAWSTNMELFKEFTDVSRGVRRLGAAAVDMCHVALGIAESYWEYRLKPWDMAAGVLIVEEAGGAVTRMDGGKFSVFDRSVLVSNGVLHPKLLERIAPATENLKSKGIDFSLWFKPEDYHTEL

SEQ ID NO: 103917 - DNA, 1459 bp, Arabidopsis thaliana
  misc_feature (1)..(1459): Ceres Seq. ID no. 13613886
  misc_feature (1)..(1459): Ortholog of  Ceres SEQ ID NO 13594168 as cited in SEQ ID NO 59043
aagacaatccctttcttctcccctttctccaacacctaccaaaagcctctctctctctctagttcttgatttttcaagatttcaagaaaacatggctgaccaaagtggtgggttggttatgatgagagagtacagaaaaggcaactggacgttgaatgagacgatggttctcattgaggccaagaggatggatgatgagaggaggatgcggcggtccatcggccttccaccgccggagcagcaacaagatatccggagtaataaaccggcggagctacggtggaagtggatagaagattactgttggagaaaaggttgtatgagaagtcagaatcagtgcaatgacaaatgggacaatctcatgagagactacaaaaaagttagagagtacgagagacgaagggtagaatcgtctattaccgccggtgagtcgtcttcatcttcagctccagctggagaaacggcgtcgtactggaagatggagaagagtgagaggaaagagagaagcttaccaagtaatatgttacctcaaacataccaagctttgtttgaagttgttgagagtaaaacgcttccttcttctaccgccgtaaccgctgtaaccgctgcagttgcggctgctgctgctgctattagtagtggaaacggttcaggcggtggacaaatccaaaaagtgatacaacaaggtttaggatttgttgttcctaaagtacatcaaatcattcagcagcaacctgttttgttaccacttcagccaccgccgccaccaccaccgtctcagccgttaccacgaccactactactgccaccgcctccaccgccttcttttcatgctcagccaatactgcccacagtagaaggatagtagcacagattctgatacaagtgagtattcagacacatctccggcgaagagaaggagaacaatgccgacaaccacaaccgccggtcccagcggcggcggtgtagatgtggaggaggttggacgtagtaagagagatgaagagacgacagtagcggctgcgttatcaaggagtgtgtcagtgatcgcaaacgcgattagggagagtgaggagagacaagatcggagacataaagaagtgatgaacgtacaagagaggagactcaagatcgaagaatctaatgttgagatgaatagagaaggcatgaatggattagtggaagccattaataagctagctagctccattttcgctctggcttcttcttctcgccataataattagcatcaaggaggtccagtaccatagtaatttaaatgattattatgtagttaatttgattagggaagtgattaaattgttgagcgtgatgatcggagtacataaattgatattgaagtcttaattaatcttgttttcatcactctcaatgttttcttaagtaaattgttgattccatgcaatataaattgaaatgtgatcatataaagttgatt

SEQ ID NO: 103918 - protein, 287 aa, Arabidopsis thaliana
  peptide (1)..(287): Ceres Seq. ID no. 13613887
RQSLSSPLSPTPTKSLSLSLVLDFSRFQENMADQSGGLVMMREYRKGNWTLNETMVLIEAKRMDDERRMRRSIGLPPPEQQQDIRSNKPAELRWKWIEDYCWRKGCMRSQNQCNDKWDNLMRDYKKVREYERRRVESSITAGESSSSSAPAGETASYWKMEKSERKERSLPSNMLPQTYQALFEVVESKTLPSSTAVTAVTAAVAAAAAAISSGNGSGGGQIQKVIQQGLGFVVPKVHQIIQQQPVLLPLQPPPPPPPSQPLPRPLLLPPPPPPSFHAQPILPTVEG

SEQ ID NO: 103919 - protein, 257 aa, Arabidopsis thaliana
  peptide (1)..(257): Ceres Seq. ID no. 13613888
MADQSGGLVMMREYRKGNWTLNETMVLIEAKRMDDERRMRRSIGLPPPEQQQDIRSNKPAELRWKWIEDYCWRKGCMRSQNQCNDKWDNLMRDYKKVREYERRRVESSITAGESSSSSAPAGETASYWKMEKSERKERSLPSNMLPQTYQALFEVVESKTLPSSTAVTAVTAAVAAAAAAISSGNGSGGGQIQKVIQQGLGFVVPKVHQIIQQQPVLLPLQPPPPPPPSQPLPRPLLLPPPPPPSFHAQPILPTVEG

SEQ ID NO: 103920 - protein, 248 aa, Arabidopsis thaliana
  peptide (1)..(248): Ceres Seq. ID no. 13613889
MMREYRKGNWTLNETMVLIEAKRMDDERRMRRSIGLPPPEQQQDIRSNKPAELRWKWIEDYCWRKGCMRSQNQCNDKWDNLMRDYKKVREYERRRVESSITAGESSSSSAPAGETASYWKMEKSERKERSLPSNMLPQTYQALFEVVESKTLPSSTAVTAVTAAVAAAAAAISSGNGSGGGQIQKVIQQGLGFVVPKVHQIIQQQPVLLPLQPPPPPPPSQPLPRPLLLPPPPPPSFHAQPILPTVEG

SEQ ID NO: 103921 - DNA, 1648 bp, Arabidopsis thaliana
  misc_feature (1)..(1648): Ceres Seq. ID no. 13613901
  misc_feature (1)..(1648): Ortholog of  Ceres SEQ ID NO 14301413 as cited in SEQ ID NO 53524
aaaatcaattagggttttaacaaaaggttttagattcctggattgctactctttctcacctgtgccgtcctgtggaaaacatcgttctttcaccaacaatggcgaagaagcgagatcgaattgtcaacactcaaccttttatctccgatgacgcctccgtcgcttcttccaggaaacgatcaaaggttccaaaaacccatcagaaacaggaaaagttgattgaagctggtatgagcgagaagatcatgaaacaagctcttgcccaacaaaaggaagttgctgatgaagagaacgccgagagaaaccctagtagcgccgcttttgctgttgccggcgctgcgactgctggagaggagcagaaaattctggaggaggaagaagatgatattgatgattttgatggaacctttgaaaaccagagccaattcgataagcaagaggagattaatgaggatgatgagaagttgtttgagtcattcttaaataagaatgctcctcctcaacgtacgcttactgatatcattatcaagaagctcaaagataaggatgctgacttagctgaagaagagcgtcccgatcctaaaatggaccctgcaataactaagttatataaaggtgttggcaagtttatgagtgagtatacagttgggaaattgccaaaagcatttaagcttgttacttcaatggaacactgggaggatgttttatacttgactgagccagagaaatggtcacctaacgcattgtatcaagccacaaggatctttgcttccaacttgaaagacagacaagttcaacggttttataactatgttttgcttccgcgagtgagagaggatattagaaagcacaagaagctgcactttgctctgtaccaggctctgaaaaagtcactgtataagcctagtgctttcaatcaagggatactattcccgctttgtaagtcggggacatgcaatctcagagaagctgtaattatagggagcattcttgaaaagtgttcgatccctatgcttcactcatgtgttgccttgaacagactggctgagatggattattgtggcacaacaagttactttataaaagttcttttggagaagaaatattgtatgccgtatcgggtgcttgatgcattggttgctcacttcatgagatttgttgacgatataagagttatgcctgtgatttggcaccagtctcttcttacctttgtgcaacggtacaagtatgaaatactaaaggaagacaaagaacatctccaaactctcctccagaggcaaaaacaccatcttgttactcctgagattctgagagagcttaaggatagcagaaaccgtggagagaaagaagatcctatggtggataattttgccccagtaccggctaaagaagacaggtttgacattcctgaagtaccaatggaagaagactgatgattcatggtgtttggtattgaaagaggactgatgattcatagcagcagagataaaccctgaaactgggtgggtatgattctggttttccagttttgacatcgttgtattattatttcttatttgagtaagatttgaaatttttattactacatgatagtgtatctttaaacatggtttaatctttttgatataatccaaatttggtcttgtct

SEQ ID NO: 103922 - protein, 444 aa, Arabidopsis thaliana
  peptide (1)..(444): Ceres Seq. ID no. 13613902
MAKKRDRIVNTQPFISDDASVASSRKRSKVPKTHQKQEKLIEAGMSEKIMKQALAQQKEVADEENAERNPSSAAFAVAGAATAGEEQKILEEEEDDIDDFDGTFENQSQFDKQEEINEDDEKLFESFLNKNAPPQRTLTDIIIKKLKDKDADLAEEERPDPKMDPAITKLYKGVGKFMSEYTVGKLPKAFKLVTSMEHWEDVLYLTEPEKWSPNALYQATRIFASNLKDRQVQRFYNYVLLPRVREDIRKHKKLHFALYQALKKSLYKPSAFNQGILFPLCKSGTCNLREAVIIGSILEKCSIPMLHSCVALNRLAEMDYCGTTSYFIKVLLEKKYCMPYRVLDALVAHFMRFVDDIRVMPVIWHQSLLTFVQRYKYEILKEDKEHLQTLLQRQKHHLVTPEILRELKDSRNRGEKEDPMVDNFAPVPAKEDRFDIPEVPMEED

SEQ ID NO: 103923 - protein, 400 aa, Arabidopsis thaliana
  peptide (1)..(400): Ceres Seq. ID no. 13613903
MSEKIMKQALAQQKEVADEENAERNPSSAAFAVAGAATAGEEQKILEEEEDDIDDFDGTFENQSQFDKQEEINEDDEKLFESFLNKNAPPQRTLTDIIIKKLKDKDADLAEEERPDPKMDPAITKLYKGVGKFMSEYTVGKLPKAFKLVTSMEHWEDVLYLTEPEKWSPNALYQATRIFASNLKDRQVQRFYNYVLLPRVREDIRKHKKLHFALYQALKKSLYKPSAFNQGILFPLCKSGTCNLREAVIIGSILEKCSIPMLHSCVALNRLAEMDYCGTTSYFIKVLLEKKYCMPYRVLDALVAHFMRFVDDIRVMPVIWHQSLLTFVQRYKYEILKEDKEHLQTLLQRQKHHLVTPEILRELKDSRNRGEKEDPMVDNFAPVPAKEDRFDIPEVPMEED

SEQ ID NO: 103924 - protein, 395 aa, Arabidopsis thaliana
  peptide (1)..(395): Ceres Seq. ID no. 13613904
MKQALAQQKEVADEENAERNPSSAAFAVAGAATAGEEQKILEEEEDDIDDFDGTFENQSQFDKQEEINEDDEKLFESFLNKNAPPQRTLTDIIIKKLKDKDADLAEEERPDPKMDPAITKLYKGVGKFMSEYTVGKLPKAFKLVTSMEHWEDVLYLTEPEKWSPNALYQATRIFASNLKDRQVQRFYNYVLLPRVREDIRKHKKLHFALYQALKKSLYKPSAFNQGILFPLCKSGTCNLREAVIIGSILEKCSIPMLHSCVALNRLAEMDYCGTTSYFIKVLLEKKYCMPYRVLDALVAHFMRFVDDIRVMPVIWHQSLLTFVQRYKYEILKEDKEHLQTLLQRQKHHLVTPEILRELKDSRNRGEKEDPMVDNFAPVPAKEDRFDIPEVPMEED

SEQ ID NO: 103925 - DNA, 708 bp, Arabidopsis thaliana
  misc_feature (1)..(708): Ceres Seq. ID no. 13613905
  misc_feature (1)..(708): Ortholog of  Ceres SEQ ID NO 13587227 as cited in SEQ ID NO 513
  misc_feature (1)..(708): Ortholog of  Ceres SEQ ID NO 13594494 as cited in SEQ ID NO 51293
  misc_feature (1)..(708): Ortholog of  Ceres SEQ ID NO 13595538 as cited in SEQ ID NO 59858
  misc_feature (1)..(708): Ortholog of  Ceres SEQ ID NO 12598249 as cited in SEQ ID NO 61073
  misc_feature (1)..(708): Ortholog of  Ceres SEQ ID NO 13582815 as cited in SEQ ID NO 68106
atatcatcttattatctctcaagttcttgattttaattaaagatgggtaaagacgaccaccacgaacaagacaaaagattcttctcacatcataatcatcacggccatgggtatccgccaggagcttatcctcctccaccgcagggagcttatcctccaccgggaggttaccctccgcaaggttatcctccaccacctcacggctatccaccggccgcttacccacctccacccggtgcttatcctcccgccgggtatcccggaccatccggtcctcgtccagggtttggaggaggagttgggggattgatagcaggagcggcaacagcggcagcggctgcaatgggaggtcaccatgcgggtcatcacggaggctacgggcaccacggccacggaaaatacaaaagagggtttttcggaggaggaaagtacaagcgaggaaagcatagtatgtttggtggagggaagtacaagcgtggcaagcacggtatgttcggaggcaaaagaagcaagcatggcatgttcggagggaaacgaggcaaaggcatgttcggacgaaagaagtggaaatgatccattagcatcctctctacatatattatcgtaacaatttaacattaagcttaatataaaaatgtggatgtataatttgttttatatgatgtatatatagctatatgtatctatgaagagtatttaatatggttg

SEQ ID NO: 103926 - protein, 176 aa, Arabidopsis thaliana
  peptide (1)..(176): Ceres Seq. ID no. 13613906
MGKDDHHEQDKRFFSHHNHHGHGYPPGAYPPPPQGAYPPPGGYPPQGYPPPPHGYPPAAYPPPPGAYPPAGYPGPSGPRPGFGGGVGGLIAGAATAAAAAMGGHHAGHHGGYGHHGHGKYKRGFFGGGKYKRGKHSMFGGGKYKRGKHGMFGGKRSKHGMFGGKRGKGMFGRKKWK

SEQ ID NO: 103927 - DNA, 1464 bp, Arabidopsis thaliana
  misc_feature (1)..(1464): Ceres Seq. ID no. 13613911
  misc_feature (1)..(1464): Ortholog of  Ceres SEQ ID NO 13542155 as cited in SEQ ID NO 64236
attttcaactactttgaagctgcagatctcttttggagattcacatggcgacggagaaatgggtgttcatggtgacggcgcaaactccgacgaacattgcggtgattaagtattggggaaagagagatgaggttcggattctccccgttaacgatagcattagcgtaactcttgatcctgatcatctctgcacagtcaccactgttgccgttagtcctgcttttgatcgggatcgaatgtggctcaatggcaaggaaatatctctttctggaagtaggtaccaaaattgtttgagggaaatacgaggtcgtgctggtgatgttgaagacatggaaaaggggatcaagataaggaagaaagattgggagaaattgaatctacatattgcttctcataataacttccctactgctgctggcttagcatcttcagctgctggatttgcttgtctagttttttctcttgcaaagttgatgaatgtagatgaagatccaagccatctttctgcaatagccaggcaaggttcaggaagtgcttgccggagtttatttggtggatttgtcaagtggacaatgggaagcaaagaagatggaagtgacagcgttgcagttcaactggcagatgagaagcattgggatgatcttgttatcatcattgctgtggtgagttcacggcagaaggaaacgagcagtacctccggaatgcgtgaaagtgttgagacaagtttgcttttacagcatagagcaaaagaagttgtgccaaaacggattttgcaaatggaggaagctataaaaaatcgagactttgcatcgtttacacaattgacatgtacagatagtaatcagtttcatgctgtttgtctggatacatctccacccatattctacatgaatgacacttcacacagaataattagcttagttgaaaagtggaaccgttctgaagggacaccacaggttgcttacacatttgatgctggtccaaatgctgtactgattgcacgcaacagaaaggtcgcagtccaattgctccaggggcttctgtactattttccccctaagtcagacactgatatgaagagttacgtagtgggcgataattcaattctaaaagaagcaggattagatggagcaagtggtgtagagaatctgcaacctccacctgaaattaaagacaacattggatctcaggatcaaaaaggagaagtcagttattttatctgcactagacctggaaaaggtcccatcgtgcttcacgaccaaactcaagcccttctcgatcctgaaacaggccttcctaagtgagcattctctctgcttcaaactaattattatgattagcatctcctttaactgcaagtttaagatacgatatatgtggcagaataggtgcaggtacgttgtcatctaactattagctttcctatttccaaataaaagaaattcattggttttgttttaccag

SEQ ID NO: 103928 - protein, 419 aa, Arabidopsis thaliana
  peptide (1)..(419): Ceres Seq. ID no. 13613912
MATEKWVFMVTAQTPTNIAVIKYWGKRDEVRILPVNDSISVTLDPDHLCTVTTVAVSPAFDRDRMWLNGKEISLSGSRYQNCLREIRGRAGDVEDMEKGIKIRKKDWEKLNLHIASHNNFPTAAGLASSAAGFACLVFSLAKLMNVDEDPSHLSAIARQGSGSACRSLFGGFVKWTMGSKEDGSDSVAVQLADEKHWDDLVIIIAVVSSRQKETSSTSGMRESVETSLLLQHRAKEVVPKRILQMEEAIKNRDFASFTQLTCTDSNQFHAVCLDTSPPIFYMNDTSHRIISLVEKWNRSEGTPQVAYTFDAGPNAVLIARNRKVAVQLLQGLLYYFPPKSDTDMKSYVVGDNSILKEAGLDGASGVENLQPPPEIKDNIGSQDQKGEVSYFICTRPGKGPIVLHDQTQALLDPETGLPK

SEQ ID NO: 103929 - protein, 411 aa, Arabidopsis thaliana
  peptide (1)..(411): Ceres Seq. ID no. 13613913
MVTAQTPTNIAVIKYWGKRDEVRILPVNDSISVTLDPDHLCTVTTVAVSPAFDRDRMWLNGKEISLSGSRYQNCLREIRGRAGDVEDMEKGIKIRKKDWEKLNLHIASHNNFPTAAGLASSAAGFACLVFSLAKLMNVDEDPSHLSAIARQGSGSACRSLFGGFVKWTMGSKEDGSDSVAVQLADEKHWDDLVIIIAVVSSRQKETSSTSGMRESVETSLLLQHRAKEVVPKRILQMEEAIKNRDFASFTQLTCTDSNQFHAVCLDTSPPIFYMNDTSHRIISLVEKWNRSEGTPQVAYTFDAGPNAVLIARNRKVAVQLLQGLLYYFPPKSDTDMKSYVVGDNSILKEAGLDGASGVENLQPPPEIKDNIGSQDQKGEVSYFICTRPGKGPIVLHDQTQALLDPETGLPK

SEQ ID NO: 103930 - protein, 355 aa, Arabidopsis thaliana
  peptide (1)..(355): Ceres Seq. ID no. 13613914
MWLNGKEISLSGSRYQNCLREIRGRAGDVEDMEKGIKIRKKDWEKLNLHIASHNNFPTAAGLASSAAGFACLVFSLAKLMNVDEDPSHLSAIARQGSGSACRSLFGGFVKWTMGSKEDGSDSVAVQLADEKHWDDLVIIIAVVSSRQKETSSTSGMRESVETSLLLQHRAKEVVPKRILQMEEAIKNRDFASFTQLTCTDSNQFHAVCLDTSPPIFYMNDTSHRIISLVEKWNRSEGTPQVAYTFDAGPNAVLIARNRKVAVQLLQGLLYYFPPKSDTDMKSYVVGDNSILKEAGLDGASGVENLQPPPEIKDNIGSQDQKGEVSYFICTRPGKGPIVLHDQTQALLDPETGLPK

SEQ ID NO: 103931 - DNA, 970 bp, Arabidopsis thaliana
  misc_feature (1)..(970): Ceres Seq. ID no. 13613919
  misc_feature (1)..(970): Ortholog of  Ceres SEQ ID NO 12618205 as cited in SEQ ID NO 65153
aaaactagtcgtgactcgtcgtcgtctgatattaccagattcctgagaatttgagcctaatccttcatcaccaagctaagtctcaaggtttcacgagtacaataatgagtcaaaagggtttgatatatagctttgttgctaaaggaacagttgttctagcagagcatactccttattcaggaaactttagcaccattgctgttcaatgtctgcagaagctacccacaaatagcagcaagtatacttactcttgcgatggtcatactttcaatttccttgttgacaatggctttgtgtttctagtggttgctgatgagtccaccggaagaagtgttcctttcgtgtttctcgaacgggtcaaggaagactttaagaagcggtatgaagcgagtataaagaatgatgagcgacatcctcttgcggatgaggacgaagatgatgatttgtttggagatcggtttagcgttgcatacaatcttgacagggagttcgggcccatactaaaggagcatatgcagtattgtatgagccatccagaagagatgagcaaactttctaagttgaaggcccaaataactgaggtcaaggggatcatgatggacaacattgagaaggttctggacagaggagagaagatcgaacttctggttgacaaaaccgagaacctacagttccaggcagatagcttccagagacaaggaaggcagttaagaaggaagatgtggctacagagtctgcagatgaagctgatggtggctggtgctgttttctcttttattctcatcgtttgggttgttgcttgtggaggtttcaaatgctcatcatgatgtttcgcttcgtttgtatctgttttaacacttaaattgcatgctcatgtttgtacatggaagaacttataataacatatcatcatatcatcatcatctcccacatgctgtgatgctatatatataaaaaaaatgtttttgtt

SEQ ID NO: 103932 - protein, 240 aa, Arabidopsis thaliana; identical to SEQ ID NO: 21608
  peptide (1)..(240): Ceres Seq. ID no. 13613920

SEQ ID NO: 103933 - DNA, 956 bp, Arabidopsis thaliana
  misc_feature (1)..(956): Ceres Seq. ID no. 13613921
  misc_feature (1)..(956): Ortholog of  Ceres SEQ ID NO 13593920 as cited in SEQ ID NO 54151
  misc_feature (1)..(956): Ortholog of  Ceres SEQ ID NO 15225313 as cited in SEQ ID NO 58628
aacaaaaagattaaacaaagagagaagaatatggcgagagggaagatccagatcaagaggatagagaaccagacaaacagacaagtgacgtattcaaagagaagaaatggtttattcaagaaagcacatgagctcacggttttgtgtgatgctagggtttcgattatcatgttctctagctccaacaagcttcatgagtatatcagccctaacaccacaacgaaggagatcgtagatctgtaccaaactatttctgatgtcgatgtttgggccactcaatatgagcgaatgcaagaaaccaagaggaaactgttggagacaaatagaaatctccggactcagatcaagcagaggctaggtgagtgtttggacgagcttgacattcaggagctgcgtcgtcttgaggatgaaatggaaaacactttcaaactcgttcgcgagcgcaagttcaaatctcttgggaatcagatcgagaccaccaagaaaaagaacaaaagtcaacaagacatacaaaagaatctcatacatgagctggaactaagagctgaagatcctcactatggactagtagacaatggaggagattacgactcagttcttggataccaaatcgaagggtcacgtgcttacgctcttcgtttccaccagaaccatcaccactattaccccaaccatggccttcatgcaccctctgcctctgacatcattaccttccatcttcttgaataattaaaggctaaaaggtttgctggtgccatcattgtctatctaattatttagtaactacttaaaacataaggcatggtgttgctaaaaccttaaactgtcatgtttcttagttatgtattttaaagcctaaagaaatatggattgtgtgatcagtagtgcttaggcttattgtgtgtggaatgttttcaagacttttatcatgtatcgtattattatattgaccactc

SEQ ID NO: 103934 - protein, 242 aa, Arabidopsis thaliana
  peptide (1)..(242): Ceres Seq. ID no. 13613922
NKKIKQREKNMARGKIQIKRIENQTNRQVTYSKRRNGLFKKAHELTVLCDARVSIIMFSSSNKLHEYISPNTTTKEIVDLYQTISDVDVWATQYERMQETKRKLLETNRNLRTQIKQRLGECLDELDIQELRRLEDEMENTFKLVRERKFKSLGNQIETTKKKNKSQQDIQKNLIHELELRAEDPHYGLVDNGGDYDSVLGYQIEGSRAYALRFHQNHHHYYPNHGLHAPSASDIITFHLLE

SEQ ID NO: 103935 - protein, 232 aa, Arabidopsis thaliana; identical to SEQ ID NO: 41609
  peptide (1)..(232): Ceres Seq. ID no. 13613923

SEQ ID NO: 103936 - protein, 186 aa, Arabidopsis thaliana; identical to SEQ ID NO: 41610
  peptide (1)..(186): Ceres Seq. ID no. 13613924

SEQ ID NO: 103937 - DNA, 1809 bp, Arabidopsis thaliana
  misc_feature (1)..(1809): Ceres Seq. ID no. 13613929
  misc_feature (1)..(1809): Ortholog of  Ceres SEQ ID NO 14307831 as cited in SEQ ID NO 54732
atacctacaagacgacgagtgttcccatttccttggtctatttcaagacatggactcttctccttctactttcggattagaaggttttaatagcaacgacaataatactaatcaaaagaaacgcccaagaaaagacgacgaaggcggtggtggtggcggcggaggaacagaagttctaggagctgttaatggtaataataaggctgcttttggagatatactcgcgacgcttctgttgttagacgaggaagctaaacagcaacaagaacagtgggattttgaatttattaaagagaagtctttacttgaagctaatcataagaagaaagtgaaaacaatggatggttattacaatcaaatgcaagatcattactctgcagctggtgaaaccgatggttcgcgttcaaaacgcgcacggaaaaccgcggttgcggctgtggtttccgcggtagcttccggggcggacacaaccggtttagctgctccggttccgaccgcggatatcgctagcggttccgggtcaggaccgagtcataggaggttatgggttaaagaacgaaccacggactggtgggacagagtaagccggcctgattttccagaagacgagtttcggcgagagttccgtatgagcaaatcgacgtttaacctaatatgcgaggagctagatacgacggtgacgaagaaaaacacgatgttaagagacgcgattccagctccaaaacgcgtaggcgtttgcgtttggcgtttggcgacaggagctccgcttcgccacgtgtcggagcgtttcggtctgggaatctcaacttgccacaaactagtcatcgaagtctgccgcgcgatctacgacgttctcatgcccaagtatctcctctggccgtcggattcagagataaactcaacgaaagccaaattcgaatcggtccacaaaataccaaacgtcgtcggatcaatctacaccacacatattccgatcatcgctccgaaagtccacgtggcggcgtattttaacaagagacacacggagaggaatcagaagacgtcgtactcgataacagtacaaggagtggtcaacgccgacgggatcttcaccgacgtttgtatcggaaacccaggatctctcaccgacgatcagatcctggagaaatcttcgctttcacggcaaagagcggcgcgtgggatgttacgtgacagctggatagttggaaactctgggtttccgttgactgattatcttcttgtaccgtacacgagacagaatctgacgtggacgcagcacgcgtttaacgagagtatcggagagattcaggggattgcgacggctgcgtttgagaggctcaaaggacggtgggcttgtttgcagaaacggacggaggtgaagcttcaggatctgccgtacgtgcttggagcttgttgtgtgttgcataacatttgtgagatgaggaaggaggagatgttgccggagttgaagtttgaggtttttgatgatgtggcggtgccggagaataatatccgatctgctagtgcggttaatacgagggatcatatctctcacaatctcttgcatcgtggacttgccgggacaagaactctataggctctgtttttcaccttttcttattttgaaactgattttttattgcaaattctttttccaaattaggaataaaaacattttagggattggttggatacagaaagaatagttgaattgagagtagaagtggctgatgatattgtttgtgttacttattagcattgtgtaatctttagttcatgtattttctatacaaattgaatctgaaacct

SEQ ID NO: 103938 - protein, 531 aa, Arabidopsis thaliana
  peptide (1)..(531): Ceres Seq. ID no. 13613930
YLQDDECSHFLGLFQDMDSSPSTFGLEGFNSNDNNTNQKKRPRKDDEGGGGGGGGTEVLGAVNGNNKAAFGDILATLLLLDEEAKQQQEQWDFEFIKEKSLLEANHKKKVKTMDGYYNQMQDHYSAAGETDGSRSKRARKTAVAAVVSAVASGADTTGLAAPVPTADIASGSGSGPSHRRLWVKERTTDWWDRVSRPDFPEDEFRREFRMSKSTFNLICEELDTTVTKKNTMLRDAIPAPKRVGVCVWRLATGAPLRHVSERFGLGISTCHKLVIEVCRAIYDVLMPKYLLWPSDSEINSTKAKFESVHKIPNVVGSIYTTHIPIIAPKVHVAAYFNKRHTERNQKTSYSITVQGVVNADGIFTDVCIGNPGSLTDDQILEKSSLSRQRAARGMLRDSWIVGNSGFPLTDYLLVPYTRQNLTWTQHAFNESIGEIQGIATAAFERLKGRWACLQKRTEVKLQDLPYVLGACCVLHNICEMRKEEMLPELKFEVFDDVAVPENNIRSASAVNTRDHISHNLLHRGLAGTRTL

SEQ ID NO: 103939 - protein, 515 aa, Arabidopsis thaliana; identical to SEQ ID NO: 36464
  peptide (1)..(515): Ceres Seq. ID no. 13613931

SEQ ID NO: 103940 - protein, 419 aa, Arabidopsis thaliana; identical to SEQ ID NO: 36465
  peptide (1)..(419): Ceres Seq. ID no. 13613932

SEQ ID NO: 103941 - DNA, 1102 bp, Arabidopsis thaliana
  misc_feature (1)..(1102): Ceres Seq. ID no. 13613933
  misc_feature (1)..(1102): Ortholog of  Ceres SEQ ID NO 14316043 as cited in SEQ ID NO 68538
  misc_feature (1)..(1102): Ortholog of  Ceres SEQ ID NO 14309361 as cited in SEQ ID NO 0
cacttgaggaaacacagtaaaaacctaaaaagagaatgaaactcgcaggtctgaaatcgatcgagaacgctcacgaagattccgtttgggcagcgacgtgggttccggcgacggaagatcgaccggcgttgcttctgactggatctcttgacgagacggtgaagttatggcgaccggacgagctggatcttgtgcggactaatactggacactctttgggagtagcagctttggctgcgcatccttctgggattattgcagcatcttcttcgattgatagctttgtccgtgtgtttgatgttgatactaatgctacgattgctgttttggaagctcctccttctgaggtttggggaatgcaatttgaacctaagggtacgatccttgctgttgcaggtggaagtagtgcctcagtcaagctttgggacactgcaagctggagattaatctcaactctatcaatcccacgcccagatgcaccaaaaccttccgataaaaccagcagcaagaaattcgttctctcggtggcttggtctcctaatgggaaacgacttgcttgtggttcaatggatggtacgatctgtgtttttgatgttgaccgctcaaagctacttcaccagctagaaggtcacaatatgcctgtaaggtcccttgtgttctcccctgtagacccgagagtcctcttctctggatcagatgatgggcatgtgaacatgcacgatgcagaagggaaaacgctgttggggtccatgtcagggcacacgagttgggtgctgagcgttgatgctagcccagacggtggagccatagcaaccggctcaagcgatagaactgtgaggctatgggatcttaaaatgagagctgcgattcagacaatgagcaaccacaatgaccaggtttggtctgtggcctttagaccaccaggtggaaccggtgtccgggctggtcgacttgctagtgtctctgatgacaagagtgtatcgctctatgattactcatgaacaattcggttttttgacttttttcttttatgcattctccaagacgcatctagttgtaacaatataatctgcaacaggttgattttgaccggagtctttag

SEQ ID NO: 103942 - protein, 321 aa, Arabidopsis thaliana
  peptide (1)..(321): Ceres Seq. ID no. 13613934
MKLAGLKSIENAHEDSVWAATWVPATEDRPALLLTGSLDETVKLWRPDELDLVRTNTGHSLGVAALAAHPSGIIAASSSIDSFVRVFDVDTNATIAVLEAPPSEVWGMQFEPKGTILAVAGGSSASVKLWDTASWRLISTLSIPRPDAPKPSDKTSSKKFVLSVAWSPNGKRLACGSMDGTICVFDVDRSKLLHQLEGHNMPVRSLVFSPVDPRVLFSGSDDGHVNMHDAEGKTLLGSMSGHTSWVLSVDASPDGGAIATGSSDRTVRLWDLKMRAAIQTMSNHNDQVWSVAFRPPGGTGVRAGRLASVSDDKSVSLYDYS

SEQ ID NO: 103943 - protein, 214 aa, Arabidopsis thaliana
  peptide (1)..(214): Ceres Seq. ID no. 13613935
MQFEPKGTILAVAGGSSASVKLWDTASWRLISTLSIPRPDAPKPSDKTSSKKFVLSVAWSPNGKRLACGSMDGTICVFDVDRSKLLHQLEGHNMPVRSLVFSPVDPRVLFSGSDDGHVNMHDAEGKTLLGSMSGHTSWVLSVDASPDGGAIATGSSDRTVRLWDLKMRAAIQTMSNHNDQVWSVAFRPPGGTGVRAGRLASVSDDKSVSLYDYS

SEQ ID NO: 103944 - DNA, 1322 bp, Arabidopsis thaliana
  misc_feature (1)..(1322): Ceres Seq. ID no. 13613943
  misc_feature (1)..(1322): Ortholog of  Ceres SEQ ID NO 12364737 as cited in SEQ ID NO 51089
  misc_feature (1)..(1322): Ortholog of  Ceres SEQ ID NO 13594147 as cited in SEQ ID NO 58975
  misc_feature (1)..(1322): Ortholog of  Ceres SEQ ID NO 13597380 as cited in SEQ ID NO 64054
  misc_feature (1)..(1322): Ortholog of  Ceres SEQ ID NO 12625474 as cited in SEQ ID NO 64169
aagcaaaatcccctctaaccatcagacttacaaatctagtccatataatacaataagcccacttttcttcttctctcatcaagctttttcttctctcctcatttttcgtataattcgatttgcgaaaaatggtcgagggagagtccaaggcattgtggattattttggccaccgtgtttgcagtcgcggcggtggcaccagcggtgcatggacagcaaacgccgtgttacttcgtgtttggagactctgtcttcgacaacggtaacaacaatgccttgaacaccaaggccaaggtcaactatttaccttatggtatagattactttcaaggtccaaccggtcggtttagcaacggtcggaatattccagacgttatcgctgaactagcgggtttcaataacccaattccaccatttgccggagcatcacaggcacaagctaacatcggactcaactatgcttccggtgccggcggtatccgcgaagaaaccagcgaaaatatgggtgagagaatcagtttgagacagcaagtaaacaaccacttttccgctatcataaccgcggcggtgccactgagtcggttaaggcaatgtctatacacaatcaacatcggaagcaacgattacctcaacaactacttcttgtcgcctcctactctagctcgtcgtctatttaatcctgaccagtacgctcgatctctcataagcctctaccgtatctatctgacgcaattgtacgtactaggagcgaggaatgtagcgttgttcggtatcggtaagatcggatgtacaccacggattgttgctaccctcggtggcggcactggctgcgcagaagaagtgaaccaagccgtgatcatcttcaacactaaactcaaagccctagtcacagatttcaacaacaaaccgggagctatgttcacttatgttgatctcttctctggaaatgctgaagatttcgccgctctagggattacggttggtgataggagttgctgtacggttaatccgggtgaagaactttgtgcggcgaacggaccggtttgtccagacagaaacaaattcatattctgggataacgtgcatactacggaagtgataaatactgtggtggctaacgcagcgtttaacggacctatagctagtccgttcaacatatcccagttagtgaattaaaattagggctctattccattgttaaaatggcatagtccctttatttaaaacttggtttcgtctagattgaaaccatatatcagacacatatgtaataatgatggaataatatatcagatagactgaataatgaataaaacggattga

SEQ ID NO: 103945 - protein, 348 aa, Arabidopsis thaliana; identical to SEQ ID NO: 35198
  peptide (1)..(348): Ceres Seq. ID no. 13613944

SEQ ID NO: 103946 - protein, 224 aa, Arabidopsis thaliana; identical to SEQ ID NO: 35199
  peptide (1)..(224): Ceres Seq. ID no. 13613945

SEQ ID NO: 103947 - DNA, 1145 bp, Arabidopsis thaliana
  misc_feature (1)..(1145): Ceres Seq. ID no. 13613946
  misc_feature (1)..(1145): Ortholog of  Ceres SEQ ID NO 14311671 as cited in SEQ ID NO 51251
  misc_feature (1)..(1145): Ortholog of  Ceres SEQ ID NO 14304791 as cited in SEQ ID NO 53562
  misc_feature (1)..(1145): Ortholog of  Ceres SEQ ID NO 14307355 as cited in SEQ ID NO 54610
  misc_feature (1)..(1145): Ortholog of  Ceres SEQ ID NO 13594298 as cited in SEQ ID NO 57803
  misc_feature (1)..(1145): Ortholog of  Ceres SEQ ID NO 13503476 as cited in SEQ ID NO 61978
  misc_feature (1)..(1145): Ortholog of  Ceres SEQ ID NO 12578438 as cited in SEQ ID NO 62201
  misc_feature (1)..(1145): Ortholog of  Ceres SEQ ID NO 12617675 as cited in SEQ ID NO 64656
atatctctcccccttcttctctcttcctcacattcctcaccaaaccctctccaaaacacacccacacgtacgcacacacacaaagacaatgtctcctttcaaaatattcttcttcacgactcttctcgtggcggcgttttcagtgtcggctgctgatttcaacactgacgtcaacgtagcttggggaaatggccgtgggaagatactcaacaacggccagcttcttactctctccttagacaaatcctctggttccggttttcaatccaaaacagagtatttgtttggaaagattgatatgcagattaagcttgttcctggtaactctgcaggaacagtcacaactttttacctaaaatccgaaggatccacttgggatgagattgattttgagttcttgggtaatatgagtggagatccttatactttacacactaatgtttacactcaaggtaaaggtgacaaagagcaacaattccatctctggttcgacccaaccgccaatttccacacttactcaatcctctggaaccctcaaagaatcatattgaccgtcgatgacacacccattagagagtttaaaaactatgagtctctcggtgtcttgtttccaaagaacaagccgatgaggatgtacgcgagtttatggaacgcagacgattgggcaacaagaggcggtcttgttaaaactgattggtctaaagctccattcatggcttcttacagaaacattaagattgactcgaaaccaaactccaattggtacactcaagaaatggattcaacaagccaagctagactcaaatgggttcagaagaattacatgatctacaattattgtactgaccataggaggtttccacagggagctcctaaggaatgcacaacaagctcatagaatctcaaattatattctatttatttatctacacttcctctctttcttttatgtgaaaattgtgaatgctctgtttatagcttgtctattatgtccgagaatttctttttctgtttttgattcttttcgttgtatatctttgtccaataaaggaaatgatgtgtctttactcttatagatatgtataaaaagatgtccctgttttatttgttaaaaaaaattgtttatgataatgatagttctttct

SEQ ID NO: 103948 - protein, 298 aa, Arabidopsis thaliana
  peptide (1)..(298): Ceres Seq. ID no. 13613947
YLSPFFSLPHIPHQTLSKTHPHVRTHTKTMSPFKIFFFTTLLVAAFSVSAADFNTDVNVAWGNGRGKILNNGQLLTLSLDKSSGSGFQSKTEYLFGKIDMQIKLVPGNSAGTVTTFYLKSEGSTWDEIDFEFLGNMSGDPYTLHTNVYTQGKGDKEQQFHLWFDPTANFHTYSILWNPQRIILTVDDTPIREFKNYESLGVLFPKNKPMRMYASLWNADDWATRGGLVKTDWSKAPFMASYRNIKIDSKPNSNWYTQEMDSTSQARLKWVQKNYMIYNYCTDHRRFPQGAPKECTTSS

SEQ ID NO: 103949 - protein, 269 aa, Arabidopsis thaliana; identical to SEQ ID NO: 21034
  peptide (1)..(269): Ceres Seq. ID no. 13613948

SEQ ID NO: 103950 - protein, 199 aa, Arabidopsis thaliana; identical to SEQ ID NO: 21035
  peptide (1)..(199): Ceres Seq. ID no. 13613949

SEQ ID NO: 103951 - DNA, 1124 bp, Arabidopsis thaliana
  misc_feature (1)..(1124): Ceres Seq. ID no. 13613954
  misc_feature (1)..(1124): Ortholog of  Ceres SEQ ID NO 15177991 as cited in SEQ ID NO 53915
  misc_feature (1)..(1124): Ortholog of  Ceres SEQ ID NO 15174347 as cited in SEQ ID NO 58577
  misc_feature (1)..(1124): Ortholog of  Ceres SEQ ID NO 13596609 as cited in SEQ ID NO 63070
  misc_feature (1)..(1124): Ortholog of  Ceres SEQ ID NO 12616895 as cited in SEQ ID NO 63909
  misc_feature (1)..(1124): Ortholog of  Ceres SEQ ID NO 13598574 as cited in SEQ ID NO 69083
aatcacacaaatcccttttttggtttctccaaatcttcaaatcttcttcaatcatcaccatggtacgttttagtaacagtcttgtaggaatactcaacttcttcgtcttccttctctcggttcccatactctcaaccggaatctggctcagccttaaagccacgacgcaatgcgagagattcctcgacaaacccatgatcgctctcggtgttttcctcatgataatcgcaatcgctggagtcgttggatcttgttgcagagtgacgtggcttctctggtcctatctctttgtgatgttcttcttaatcctcatcgtcctctgtttcaccatctttgccttcgttgtcactagtaaaggctccggcgaaactatccaaggaaaagcttataaggagtataggctcgaggcttactctgattggttgcagaggcgtgtgaacaacgctaagcattggaacagcattagaagctgtctttatgagagcaagttctgttataacttggagttagtcactgctaatcacactgtttctgatttctacaaagaagatctcactgcttttgagtctggttgctgcaagccctctaatgactgtgacttcacctacataacttcaacaacttggaataaaacatcaggaacacataaaaactcagattgccaactttgggacaacgaaaagcataagctttgctacaattgcaaagcctgcaaggccggttttctcgacaacctcaaggccgcatggaaaagagttgctattgtcaacatcattttccttgtactcctcgttgtcgtctacgctatgggatgttgcgctttccgaaacaacaaagaagatagatatggccgttccaatggtttcaacaattcttgatttgcgccggttcaagctagactttgatttttcattaatacatcatattacatttatgattagaacaaaacagctttcaaaatttaagaaacagtagaatggaagaatattgaattagtatagttgttgatgtgtttggatttcttctgttgatttgtgtttggacaacagaggattcttcagatctttattacagattgttgtgtttgaagaatcttctatatgaatcttcacttctgacttctg

SEQ ID NO: 103952 - protein, 291 aa, Arabidopsis thaliana
  peptide (1)..(291): Ceres Seq. ID no. 13613955
SHKSLFWFLQIFKSSSIITMVRFSNSLVGILNFFVFLLSVPILSTGIWLSLKATTQCERFLDKPMIALGVFLMIIAIAGVVGSCCRVTWLLWSYLFVMFFLILIVLCFTIFAFVVTSKGSGETIQGKAYKEYRLEAYSDWLQRRVNNAKHWNSIRSCLYESKFCYNLELVTANHTVSDFYKEDLTAFESGCCKPSNDCDFTYITSTTWNKTSGTHKNSDCQLWDNEKHKLCYNCKACKAGFLDNLKAAWKRVAIVNIIFLVLLVVVYAMGCCAFRNNKEDRYGRSNGFNNS

SEQ ID NO: 103953 - protein, 272 aa, Arabidopsis thaliana
  peptide (1)..(272): Ceres Seq. ID no. 13613956
MVRFSNSLVGILNFFVFLLSVPILSTGIWLSLKATTQCERFLDKPMIALGVFLMIIAIAGVVGSCCRVTWLLWSYLFVMFFLILIVLCFTIFAFVVTSKGSGETIQGKAYKEYRLEAYSDWLQRRVNNAKHWNSIRSCLYESKFCYNLELVTANHTVSDFYKEDLTAFESGCCKPSNDCDFTYITSTTWNKTSGTHKNSDCQLWDNEKHKLCYNCKACKAGFLDNLKAAWKRVAIVNIIFLVLLVVVYAMGCCAFRNNKEDRYGRSNGFNNS

SEQ ID NO: 103954 - protein, 227 aa, Arabidopsis thaliana
  peptide (1)..(227): Ceres Seq. ID no. 13613957
MIALGVFLMIIAIAGVVGSCCRVTWLLWSYLFVMFFLILIVLCFTIFAFVVTSKGSGETIQGKAYKEYRLEAYSDWLQRRVNNAKHWNSIRSCLYESKFCYNLELVTANHTVSDFYKEDLTAFESGCCKPSNDCDFTYITSTTWNKTSGTHKNSDCQLWDNEKHKLCYNCKACKAGFLDNLKAAWKRVAIVNIIFLVLLVVVYAMGCCAFRNNKEDRYGRSNGFNNS

SEQ ID NO: 103955 - DNA, 1497 bp, Arabidopsis thaliana
  misc_feature (1)..(1497): Ceres Seq. ID no. 13613958
  misc_feature (1)..(1497): Ortholog of  Ceres SEQ ID NO 13656435 as cited in SEQ ID NO 65853
cttagcagatgcttttgggaaaaaaaatatataccaaaataaaagatctgcatctgtcttcttcttcttcttcatttcctctaaatttaattacccattttttccgataaatttttgttgaggaagaatttttgttgtaaagagagtttaattaaattatgccttcaatagaagatgagctgtttccgtcaacgccgggtaaattcaaaattgaccggtcaaaccgtcagctccaccgttgtttcgcttctacgagcaccatgtttctttgggctctcttcctcatcgctctcaccgcttcttacttgagtttccaaagcttcgtcgattccggtagccgttatctaaccgcttcttggggcggcatccagtgggagaaacaggttcgtacctccgctcagatccatcgctccggcggtatctccgtccttgttaccggcgctaccggattcgtcggtagccacgtgtcacttgccttgaggaaacgcggcgatggtgttgttggacttgataatttcaacaattactacgatccgtcgttgaaacgtgctcgtagatctctgttgtcgtcgagagggatcttcgtcgttgaaggagatctaaacgacgcgaagctgttagcaaagcttttcgatgtggttgctttcactcacgtgatgcatctcgctgctcaagctggtgttagatacgctttggagaatcctcaatcgtatgttcatagcaacatcgccggacttgtgaatcttctcgagatttgcaaagcggcgaatcctcagccggcgatagtttgggcttcatcgagctccgtttatggactcaacgagaaagttccattctctgaatctgaccggacggatcaaccggcgagtctctacgccgcaacgaaaaaagccggcgaagaaatcacccacacttataaccatatttacggtcttgccattaccggtttaagattcttcacggtttacggaccatggggtagaccggatatggcttacttctccttcaccagaaacatcctacaaggtaaaccgatcacaatctaccggggcaaaaaccgggtcgatttagcccgggatttcacatacatcgacgatatagtgaaaggatgtttaggatctctggattcatcgggtaaaagtaccgggtcgggtggtaaaaaacgtggagcagcaccgtaccggatatttaacctgggaaacacatctccggttacagtaccgattctggtggatatattggagaagcatttaaaggtgaaagcgaagaggaacttcgtggagatgccaggaaacggcgacgtaccgttcacacatgccaatattagctcagcccgaaatgaattcgggtataaaccgacaaccgatttggaaaccgggttgaagaagttcgttagatggtatctttcttattacggatacaatactaaagccaagcttgtacattaaccgtgactattattattatttttaatgaaattatttttttctttctccc

SEQ ID NO: 103956 - protein, 429 aa, Arabidopsis thaliana; identical to SEQ ID NO: 43032
  peptide (1)..(429): Ceres Seq. ID no. 13613959

SEQ ID NO: 103957 - protein, 395 aa, Arabidopsis thaliana; identical to SEQ ID NO: 43033
  peptide (1)..(395): Ceres Seq. ID no. 13613960

SEQ ID NO: 103958 - protein, 263 aa, Arabidopsis thaliana; identical to SEQ ID NO: 43034
  peptide (1)..(263): Ceres Seq. ID no. 13613961

SEQ ID NO: 103959 - DNA, 1303 bp, Arabidopsis thaliana
  misc_feature (1)..(1303): Ceres Seq. ID no. 13613962
  misc_feature (1)..(1303): Ortholog of  Ceres SEQ ID NO 13661504 as cited in SEQ ID NO 61294
  misc_feature (1)..(1303): Ortholog of  Ceres SEQ ID NO 12615311 as cited in SEQ ID NO 62517
  misc_feature (1)..(1303): Ortholog of  Ceres SEQ ID NO 12617197 as cited in SEQ ID NO 63406
  misc_feature (1)..(1303): Ortholog of  Ceres SEQ ID NO 13598565 as cited in SEQ ID NO 65250
  misc_feature (1)..(1303): Ortholog of  Ceres SEQ ID NO 13598597 as cited in SEQ ID NO 65496
  misc_feature (1)..(1303): Ortholog of  Ceres SEQ ID NO 13596227 as cited in SEQ ID NO 68750
  misc_feature (1)..(1303): Ortholog of  Ceres SEQ ID NO 15179068 as cited in SEQ ID NO 0
aacagaaaaatagttcacccaactttctcctattaatacttgcctcttctctcttcctacttctaaccttctttttctccttcatcacacacatatacacacgctttcgtttaaactctctctgtttcaatcattaatcagaaagaagcaacacaaatatggatcacgacaagtctacttcttgttgctgcgttcttgatgcttccacttatgttggtttctggattctcaagaaattgcttagcagaggatactctgttcacgcagcgattcgtagaaacggggagagtgaaattgaggagatgatcagagagatggaaacaacagaagagagattagtggtgtacgatgtagatgtgttggattatcaaagcatacttgtctctctcaagacatgtaacgttgtcttctgttgcttagacagccctgaagggtacgatgagaaggaggtggatttggaagtgagaggagcgatcaatgtggtggaagcgtgtggaagaacagagagtatagagaagattgtgttttcttcttcattaacagcttcaatttggagagacaacattggaactcaaaaggatgttgatgagaagtgttggagtgaccaagacttctgtcgcagcaagaagttgtggcatgcactggcaaagatgttgtcggagaaagcagcttgggcattagccatggaccgtaggctcaacatggtctctatcaaccctggtcttgtcgtcggaccatctgtcgcacaacacaacgctaggcccaccatgtcataccttaaaggagctgcacaaatgtatgagaatggtgtgttagcttatgtagacgttaagtttctagcggacgttcatattagagcattcgaggatgtttcagcttgcggtcgatacttctgcttcaaccaaatcgtcaacacagaagaagaagctctcaagctagtggagagtttgtctcctttgattcctatgccaccgaggtatgagaatgagatgcacggaagtgaagtttacgaagaaagattaaggaacaacaaattaagcaagctggtagaagctggctctgcttgttaaagaaagatttcacaatttaaattgaaagagacgagattatacaaaaaaaagttgtaatttgtatattgatcttctcatagatgcatgtgttgcttgtgaactattaaaaagaaagaaaaaaaacacatttcatctcattttataactaatagtatatgagtagttttttttttttggctgggggcacaatatgaatgttttctaatttttgttaaacatattaaatcttggtg

SEQ ID NO: 103960 - protein, 303 aa, Arabidopsis thaliana; identical to SEQ ID NO: 42688
  peptide (1)..(303): Ceres Seq. ID no. 13613963

SEQ ID NO: 103961 - protein, 255 aa, Arabidopsis thaliana; identical to SEQ ID NO: 42689
  peptide (1)..(255): Ceres Seq. ID no. 13613964

SEQ ID NO: 103962 - protein, 251 aa, Arabidopsis thaliana; identical to SEQ ID NO: 42690
  peptide (1)..(251): Ceres Seq. ID no. 13613965

SEQ ID NO: 103963 - DNA, 1103 bp, Arabidopsis thaliana
  misc_feature (1)..(1103): Ceres Seq. ID no. 13613966
  misc_feature (1)..(1103): Ortholog of  Ceres SEQ ID NO 14313959 as cited in SEQ ID NO 57842
atagacagctaatctcgatgtgtgattctttttttttcaactaatttttgactattttttttctgttttctttatttaacaaaaatctcacttggcgtgtctgatcttgttccccgtcgtcgtctctaacttacacatttccattctccgaatctctatctctccttttgcttcatcggtgtgatctctgagacgaaagaagaagaagatggtggttattgagcagaagaagaggtttgctttgtttttagcgacgtgtgattcagagttcgtgaagaagacttacggtggttacttcaatgtcttcgtttcaactttcggcgaagaaggtgagcaatgggatctattccgagtcatcgacggacaatttcccgacgagaatgatttagacaagtacgacggtttcgttatcagtggtagtccacatgatgctttcggagacgccgattggattgttaagctttgcgaagtttgtcagaaacttgatcacatgaagaagaaagttctcggcatctgcttcggccaccagataattactagagttaaaggtgggaagataggaagagcactcaaaggtgcagatatgggacttagaagcataaccatagcgaaagacaatgaaaaactacgaggttactttggagacgttgaggtcccagcatctttagctattataaaatgtcatcaggatgaagtgttggaacttcctgagtctgctacactacttgcttcttctgaggtatgtaacgtcgagatgttctctattggagatcattttttctgtattcaagggcatccagagtataacaaagagattctgtttgagattgtggaccgagtccttaatatgaagctgatggagcaagagtttgcggataaggcaaagagtacgatggagactgcgcaaccagacaggattctatggcagaagctctgcaaaaacttcctgaaaggttgatgatccgagactatgttatctctgtatgaacttatcaaaaactatgtcatctctcaataaacctgcagtatctttcatattttatcttcaggaaacagaaagaaacacatataaaacaaatcacaatcacaaataatcttttatg

SEQ ID NO: 103964 - protein, 249 aa, Arabidopsis thaliana
  peptide (1)..(249): Ceres Seq. ID no. 13613967
MVVIEQKKRFALFLATCDSEFVKKTYGGYFNVFVSTFGEEGEQWDLFRVIDGQFPDENDLDKYDGFVISGSPHDAFGDADWIVKLCEVCQKLDHMKKKVLGICFGHQIITRVKGGKIGRALKGADMGLRSITIAKDNEKLRGYFGDVEVPASLAIIKCHQDEVLELPESATLLASSEVCNVEMFSIGDHFFCIQGHPEYNKEILFEIVDRVLNMKLMEQEFADKAKSTMETAQPDRILWQKLCKNFLKG

SEQ ID NO: 103965 - protein, 155 aa, Arabidopsis thaliana
  peptide (1)..(155): Ceres Seq. ID no. 13613968
MKKKVLGICFGHQIITRVKGGKIGRALKGADMGLRSITIAKDNEKLRGYFGDVEVPASLAIIKCHQDEVLELPESATLLASSEVCNVEMFSIGDHFFCIQGHPEYNKEILFEIVDRVLNMKLMEQEFADKAKSTMETAQPDRILWQKLCKNFLKG

SEQ ID NO: 103966 - protein, 124 aa, Arabidopsis thaliana
  peptide (1)..(124): Ceres Seq. ID no. 13613969
MGLRSITIAKDNEKLRGYFGDVEVPASLAIIKCHQDEVLELPESATLLASSEVCNVEMFSIGDHFFCIQGHPEYNKEILFEIVDRVLNMKLMEQEFADKAKSTMETAQPDRILWQKLCKNFLKG

SEQ ID NO: 103967 - DNA, 2371 bp, Arabidopsis thaliana
  misc_feature (1)..(2371): Ceres Seq. ID no. 13613970
  misc_feature (1)..(2371): Ortholog of  Ceres SEQ ID NO 14313674 as cited in SEQ ID NO 59602
ggtttgggattcatgagttgagtcacaaggaaaaagcatgttagactgtggcaaaaaagcagtcaaatcacaagtaatcagtggccgtctcgagaagtttgtaaggttggatagtatggattctaggtactcgcagacttctgatactggtctaaacagatgcactctcaatttacaaggaccaacacgtggtggtggtgctcagggaaacaatgtatcttctggttcctttaagaaagggtttagaaaaggttctaaaggtctttggtctataggaagatcaattggtttaggggtttcacgagcagtttttcctgaagatcttaaagtatcagagaagaagatttttgatccacaggacaagtttcttttgctctgtaacaaactgtttgttacttcttgcattctcgctgtgtctgtggatccgctcttcttgtatcttccgtttgttaaggataatgagaaatgtatcggtatagaccggaagttggctattatagcaacaacgctgcggacagtaattgatgcgttttatctttttcacatggctcttcggtttagaacagcttttgtcgccccttcttctcgggtttttggtcgaggcgaacttgtgattgaccctgcacagatagcaaaacgttatttgcagcagtatttcatcattgactttctctctgtgcttccacttccacagattgtagtttggagatttctttacatctctaaaggtgcaagtgtgctagcaacaaagcgggcattgcgatctatcattttagttcaatatattccaagattcattcggttgtatcctttgagctcagagttaaagagaacagctggtgtttttgctgaaactgcttgggctggtgcagcttattacttgctactctacatgctcgcaagccatattgttggggctatatggtacttattggccttggaacgttataatggatgctggaccaaggtttgcagtaatagcagcttggactgtcacagaaacttcctgttttgtggtaatgaaaaaatggatggttatgcagcttggactaccatcaaagattctgttctgcaattaaattgcccagttaatacaaccgataatcctccttttgattttgggatctacttaagagccttgtcctctggcattgtctcatctaagagctttgtctctaagtacttcttctgtttatggtggggacttcagaatctcagcactcttggtcaagggcttgaaaccagcacataccctggagaagttatattctccatagcacttgccattgctggacttcttctctttgctcttcttattggaaacatgcagacttatcttcaatcccttacaatccggcttgaagaaatgagagtgaaaagacgtgattcagaacagtggatgcatcatcgaatgcttccaccggaactgcgagaacgagtcagacgatatgaccagtacaaatggttggagacacgcggagttgatgaagagaatttggttcagaacctcccaaaggatctgagaagagatatcaaacgccatctctgtctggctttggttcggagggttccattgtttgagaatatggatgagaggctgctcgatgcaatctgtgagcggttgaagccgtgtctgtacacagagagctcttatttggttcgggaaggcgacccggttaacgagatgctcttcattatccgtggtcggcttgagagtgtgaccaccgatggcggaagaagcggtttcttcaaccgcagtttgcttaaagaaggagatttctgtggggaagagcttttgacatgggcacttgatcccaaatctggttccaacctaccatcctctaccagaaccgcaaaggctctaactgaagtagaggcttttgctttgatagcagatgagctcaaatttgtggctagccagttcagaagactacacagcaggcaagttcaacacacattcagattctactcgcaacaatggagaacttgggctgctatcttcatacaagccgcgtggcgacgatacgtgaagaagaagaaacttgagcaactcaggaaagaagaagaagaaggagaaggatcagttactagcatcagagcgacgttcctggcttcaaagtttgctgcaaatgcacttcgtaaagttcacaagaaccgtattgaagcaaagtctactatagaacttgtgaaatatcagaagccttcagaacctgatttctctgctgatgatactagttgaccaaattttaccagaaaagtgctaatgtctatgaacgcttataacttgtataactcggattgaattttattgtttgatttgtgttgctacattaagataaagaaaaaggtggtaacataaaagattatttgt

SEQ ID NO: 103968 - protein, 733 aa, Arabidopsis thaliana
  peptide (1)..(733): Ceres Seq. ID no. 13613971
MLDCGKKAVKSQVISGRLEKFVRLDSMDSRYSQTSDTGLNRCTLNLQGPTRGGGAQGNNVSSGSFKKGFRKGSKGLWSIGRSIGLGVSRAVFPEDLKVSEKKIFDPQDKFLLLCNKLFVTSCILAVSVDPLFLYLPFVKDNEKCIGIDRKLAIIATTLRTVIDAFYLFHMALRFRTAFVAPSSRVFGRGELVIDPAQIAKRYLQQYFIIDFLSVLPLPQIVVWRFLYISKGASVLATKRALRSIILVQYIPRFIRLYPLSSELKRTAGVFAETAWAGAAYYLLLYMLASHIVGAIWYLLALERYNGCWTKVCSNSSLDCHRNFLFCGNEKMDGYAAWTTIKDSVLQLNCPVNTTDNPPFDFGIYLRALSSGIVSSKSFVSKYFFCLWWGLQNLSTLGQGLETSTYPGEVIFSIALAIAGLLLFALLIGNMQTYLQSLTIRLEEMRVKRRDSEQWMHHRMLPPELRERVRRYDQYKWLETRGVDEENLVQNLPKDLRRDIKRHLCLALVRRVPLFENMDERLLDAICERLKPCLYTESSYLVREGDPVNEMLFIIRGRLESVTTDGGRSGFFNRSLLKEGDFCGEELLTWALDPKSGSNLPSSTRTAKALTEVEAFALIADELKFVASQFRRLHSRQVQHTFRFYSQQWRTWAAIFIQAAWRRYVKKKKLEQLRKEEEEGEGSVTSIRATFLASKFAANALRKVHKNRIEAKSTIELVKYQKPSEPDFSADDTS

SEQ ID NO: 103969 - protein, 707 aa, Arabidopsis thaliana
  peptide (1)..(707): Ceres Seq. ID no. 13613972
MDSRYSQTSDTGLNRCTLNLQGPTRGGGAQGNNVSSGSFKKGFRKGSKGLWSIGRSIGLGVSRAVFPEDLKVSEKKIFDPQDKFLLLCNKLFVTSCILAVSVDPLFLYLPFVKDNEKCIGIDRKLAIIATTLRTVIDAFYLFHMALRFRTAFVAPSSRVFGRGELVIDPAQIAKRYLQQYFIIDFLSVLPLPQIVVWRFLYISKGASVLATKRALRSIILVQYIPRFIRLYPLSSELKRTAGVFAETAWAGAAYYLLLYMLASHIVGAIWYLLALERYNGCWTKVCSNSSLDCHRNFLFCGNEKMDGYAAWTTIKDSVLQLNCPVNTTDNPPFDFGIYLRALSSGIVSSKSFVSKYFFCLWWGLQNLSTLGQGLETSTYPGEVIFSIALAIAGLLLFALLIGNMQTYLQSLTIRLEEMRVKRRDSEQWMHHRMLPPELRERVRRYDQYKWLETRGVDEENLVQNLPKDLRRDIKRHLCLALVRRVPLFENMDERLLDAICERLKPCLYTESSYLVREGDPVNEMLFIIRGRLESVTTDGGRSGFFNRSLLKEGDFCGEELLTWALDPKSGSNLPSSTRTAKALTEVEAFALIADELKFVASQFRRLHSRQVQHTFRFYSQQWRTWAAIFIQAAWRRYVKKKKLEQLRKEEEEGEGSVTSIRATFLASKFAANALRKVHKNRIEAKSTIELVKYQKPSEPDFSADDTS

SEQ ID NO: 103970 - protein, 564 aa, Arabidopsis thaliana
  peptide (1)..(564): Ceres Seq. ID no. 13613973
MALRFRTAFVAPSSRVFGRGELVIDPAQIAKRYLQQYFIIDFLSVLPLPQIVVWRFLYISKGASVLATKRALRSIILVQYIPRFIRLYPLSSELKRTAGVFAETAWAGAAYYLLLYMLASHIVGAIWYLLALERYNGCWTKVCSNSSLDCHRNFLFCGNEKMDGYAAWTTIKDSVLQLNCPVNTTDNPPFDFGIYLRALSSGIVSSKSFVSKYFFCLWWGLQNLSTLGQGLETSTYPGEVIFSIALAIAGLLLFALLIGNMQTYLQSLTIRLEEMRVKRRDSEQWMHHRMLPPELRERVRRYDQYKWLETRGVDEENLVQNLPKDLRRDIKRHLCLALVRRVPLFENMDERLLDAICERLKPCLYTESSYLVREGDPVNEMLFIIRGRLESVTTDGGRSGFFNRSLLKEGDFCGEELLTWALDPKSGSNLPSSTRTAKALTEVEAFALIADELKFVASQFRRLHSRQVQHTFRFYSQQWRTWAAIFIQAAWRRYVKKKKLEQLRKEEEEGEGSVTSIRATFLASKFAANALRKVHKNRIEAKSTIELVKYQKPSEPDFSADDTS

SEQ ID NO: 103971 - DNA, 1323 bp, Arabidopsis thaliana
  misc_feature (1)..(1323): Ceres Seq. ID no. 13613999
  misc_feature (1)..(1323): Ortholog of  Ceres SEQ ID NO 14310904 as cited in SEQ ID NO 53831
  misc_feature (1)..(1323): Ortholog of  Ceres SEQ ID NO 12616772 as cited in SEQ ID NO 64057
aaaaccctagaaaacctctggagctatggagatgatgcaggattcgttccaagtccataggattccacaatcgaagtatgtcgatggagttagatggcttccacaagcttctgctttgaatcgtttcttcgcaacagcgtcctatgacgcggattgtgattcttcatcaatcgagatccaatcgctcgacccaaaccctagagggaatcacaacacgaacccgttaatcgagtcgttatcttcatggacttcaccttctcgcgtttcgtctctagaagtcgcgggaaacggcggtggtggcggttcattcaaaccaatggtttcagcagctacgtcttctggttctcttcacgttctgatgattgatttggtggaaggagctgcgattgaagagttttacgcggcggaaggggagaggtttcatgtgggacgcgtggaaggtgtggattggagagagggaggagaatgtgttactgttggtgaagatgggagagtgaatgtagtgaagattgtgaatggtgaaggtttaaggtatagaaaggtctttgatgggaatggattggtggcttatagagctgtgaaatgggcttctccgactgagtttgttactggaggatatggttttggtttgcaattgtgggatcagaggaagtctggtgaagctgtttcacaactcaaagggaactggtttcaaggcaaaacttctgcaattgtccactccattgacattcatccatctcggaagcacacttgcattgcaggaggttcttcaggtactgtatttgcttgggatcttcggtggccacagcaacccattgttctttctggggttggagcaagtgagaatataaacaatcctctgtctgaaagtgaggtatgggaagttcagtatgactcatacacaaaatccaacgtctcatcctcaaggattctccctgttatgacctgctctgaagatggaatccttggtatcatagaacaaggggaagaaccaatcgagcttctggctgaaccttgtgccattaacagttttgacatcgacaggcaaaatccacaggatgtgatatgtagcttggagtgggaatcaatagcagttttctcaaggccttagtataatatggaactgtgcacggtatgctatgttttcttctgcgagctacaacgaagaaattgaggaaggtagtgatagatgatgagagacaagtttaaggaagagggtgtggaatgtgtttataagtttcattataacaagatcttaaaatacagtctgcacaaacagagttttgtattcatcttaaagttagtgtgatcttgaagatttgc

SEQ ID NO: 103972 - protein, 361 aa, Arabidopsis thaliana
  peptide (1)..(361): Ceres Seq. ID no. 13614000
MEMMQDSFQVHRIPQSKYVDGVRWLPQASALNRFFATASYDADCDSSSIEIQSLDPNPRGNHNTNPLIESLSSWTSPSRVSSLEVAGNGGGGGSFKPMVSAATSSGSLHVLMIDLVEGAAIEEFYAAEGERFHVGRVEGVDWREGGECVTVGEDGRVNVVKIVNGEGLRYRKVFDGNGLVAYRAVKWASPTEFVTGGYGFGLQLWDQRKSGEAVSQLKGNWFQGKTSAIVHSIDIHPSRKHTCIAGGSSGTVFAWDLRWPQQPIVLSGVGASENINNPLSESEVWEVQYDSYTKSNVSSSRILPVMTCSEDGILGIIEQGEEPIELLAEPCAINSFDIDRQNPQDVICSLEWESIAVFSRP

SEQ ID NO: 103973 - protein, 359 aa, Arabidopsis thaliana
  peptide (1)..(359): Ceres Seq. ID no. 13614001
MMQDSFQVHRIPQSKYVDGVRWLPQASALNRFFATASYDADCDSSSIEIQSLDPNPRGNHNTNPLIESLSSWTSPSRVSSLEVAGNGGGGGSFKPMVSAATSSGSLHVLMIDLVEGAAIEEFYAAEGERFHVGRVEGVDWREGGECVTVGEDGRVNVVKIVNGEGLRYRKVFDGNGLVAYRAVKWASPTEFVTGGYGFGLQLWDQRKSGEAVSQLKGNWFQGKTSAIVHSIDIHPSRKHTCIAGGSSGTVFAWDLRWPQQPIVLSGVGASENINNPLSESEVWEVQYDSYTKSNVSSSRILPVMTCSEDGILGIIEQGEEPIELLAEPCAINSFDIDRQNPQDVICSLEWESIAVFSRP

SEQ ID NO: 103974 - protein, 358 aa, Arabidopsis thaliana
  peptide (1)..(358): Ceres Seq. ID no. 13614002
MQDSFQVHRIPQSKYVDGVRWLPQASALNRFFATASYDADCDSSSIEIQSLDPNPRGNHNTNPLIESLSSWTSPSRVSSLEVAGNGGGGGSFKPMVSAATSSGSLHVLMIDLVEGAAIEEFYAAEGERFHVGRVEGVDWREGGECVTVGEDGRVNVVKIVNGEGLRYRKVFDGNGLVAYRAVKWASPTEFVTGGYGFGLQLWDQRKSGEAVSQLKGNWFQGKTSAIVHSIDIHPSRKHTCIAGGSSGTVFAWDLRWPQQPIVLSGVGASENINNPLSESEVWEVQYDSYTKSNVSSSRILPVMTCSEDGILGIIEQGEEPIELLAEPCAINSFDIDRQNPQDVICSLEWESIAVFSRP

SEQ ID NO: 103975 - DNA, 1922 bp, Arabidopsis thaliana
  misc_feature (1)..(1922): Ceres Seq. ID no. 13614011
  misc_feature (1)..(1922): Ortholog of  Ceres SEQ ID NO 14315134 as cited in SEQ ID NO 59476
  misc_feature (1)..(1922): Ortholog of  Ceres SEQ ID NO 12616332 as cited in SEQ ID NO 63449
  misc_feature (1)..(1922): Ortholog of  Ceres SEQ ID NO 13597498 as cited in SEQ ID NO 64648
  misc_feature (1)..(1922): Ortholog of  Ceres SEQ ID NO 14308053 as cited in SEQ ID NO 67790
tatactttctctgtttacattctcgtttccgaggagaaaagtctcgatcttctggatctggggtttggtttggtttggggttgactcggttttgactcgggacaagtcgtctcgtgagatggatgtctctcgtttattagtatctctttgagagtctgtctttctgggttcaatagattcttatagtttcgcttagaaacacgcacaaaaagatgtcgttgaagcatcatcacagaggattagagctctctgcttcgaagagttttgtctcaaagaaatggactttatttctctgtatcggtttcttctgcgcaggaattctcttctccgacagaatgtggccagagcctgaatccaatgttgtatcaagggacacagtagcatcagatgaacggctgcggttagagtctgaggactgtgattcatcaaaaaagggtttaaagcgtgaatcgaaagacatccttggagatgtttacaagagtccagatgcaattcaaacgcttgataaaacgatttcaaagctggaaacagaactggccgatgcaagagctgcgcaagaatctatcatgaatggttcaccagtttctgatgactttaagctccctgaaactgtcactaaaagaaagtatctgatggttgttggtgttaatactgcgtttagcagcagaaagcgcagggattcagtccgtgctacttggatgcctcccggtgaggagagaaagaagctcgaggaagagaaagggatcgtgatgcggtttgtgataggccatagttctactcccggtggaattcttgatagagcgattcaggctgaagaaagtaaacatggagacttcttgaggctggatcatgttgaaggttatctcgagctgtcagcaaagactaaaacttactttaccacggcttttgcaatgtgggatgcagacttctacgtcaaagtcgatgatgatgtgcatgtaaatatagccacgcttggagcagaattagcaagataccggatgaagccccgagtgtacattggttgcatgaaatctggacctgttcttgctcagaaaggagtgagatatcatgaacccgaatactggaaatttggagaagagggtaacaaatacttccgccatgccacaggtcagctctatgcaatatccagggagttggcgtcttacatatcgataaaccaaaacgtacttcacaaatatgtgaatgaagatgtctctttaggatcatggtttcttggattagatgtggagcatgtagatgaccgtaggctatgttgtggtacaacagattgtgagtggaaggcgcaggcgggcaacatctgtgttgcctcgttcgattggagctgcagtgggatttgtagatcagcggataggatgaaggatgttcatcgtaggtgtggagaaggtgaaaaggcccttctggctgcatctttctgaacacaataactaaagaaacacattgaggaagaagagtacagagacaaatccgctcgacagtctacacttggtagtatagacacacagtcaaactctctctatatatgtatgtatgtatgtatgtatgtatgtatcttgtgaactgagatgagaagggtgctttttgccctcctttcttgtttctttatgcttttctcaattctctgaaggtctggagttctttgcacacagaaaatgcagattttagctgcaaaggcggactccatgagtgcaccttcagagtcatttcattgaggcgttttctctgccttttgagcttttcttcttcatttctttttggattttgcctattttgttcattttttcctttgccatgattgtggtgaaacatgggttgtttatgtgtgtacttgaaacacaaaactagtcaataaagattagaccatatgagaagaaattcagaagcttaataaaaacttttcttgg

SEQ ID NO: 103976 - protein, 407 aa, Arabidopsis thaliana; identical to SEQ ID NO: 42577
  peptide (1)..(407): Ceres Seq. ID no. 13614012

SEQ ID NO: 103977 - protein, 366 aa, Arabidopsis thaliana; identical to SEQ ID NO: 42578
  peptide (1)..(366): Ceres Seq. ID no. 13614013

SEQ ID NO: 103978 - protein, 289 aa, Arabidopsis thaliana; identical to SEQ ID NO: 42579
  peptide (1)..(289): Ceres Seq. ID no. 13614014

SEQ ID NO: 103979 - DNA, 2713 bp, Arabidopsis thaliana
  misc_feature (1)..(2713): Ceres Seq. ID no. 13614027
  misc_feature (1)..(2713): Ortholog of  Ceres SEQ ID NO 13593987 as cited in SEQ ID NO 54961
aagggtggcgattcgaggagtttccatggtggaacagaaaccctagagcctttatgctgccactaattatcactcttcactattgaattggggatggactcagagaaaatcctcaatccaagacttgtttcgattaatagcaccagccgcaaaggtatgtccgttgagttgccgcagaaaccgccgccaccgccgtcgttgttagaccggtttaaagctttgcttaatcagcgtgaagatgagttcggtggtggtgaagaggttttgcctccgagtatggatgagattgttcagctttatgaggttgttttgggtgagcttactttcaattctaagcctattatcactgatctcactattatcgctggtgaacaacgggaacatggtgaaggaatcgctaatgctatttgcactcgaatccttgaggctcctgttgagcaaaagttgccatctctgtatcttttagacagcattgttaagaacattgggcgggattatggtcgctatttctcatcccgtctacccgaggtcttctgccttgcatataggcaagcacatccgagtttacatccgtcaatgcgtcacctgtttgggacttggtcgagtgtttttccaccacctgtactacgcaagattgatatgcaattgcaactttcatctgcagcaaaccaatcttccgtaggggcttctgagcctagtcaaccaacgagaggtatacatgttaatccaaaatatcttcgcaggctggagccctcagccgccgaaaataatttgagaggaattaattccagtgcaagagtttatggccaaaattcactcggtgggtataatgatttcgaagatcagttagagagcccatcttcactgtctagtacaccagatggttttaccaggaggtctaatgatggagctaatccttctaatcaagcttttaactatggaatgggtcgagctactagcagagatgatgaacatatggaatggcgaagaaaggaaaacttaggccaaggaaatgatcacgaaagacctagagcgttgatagatgcatatggagttgacaccagcaaacacgtaacgatcaataaaccaattcgcgatatgaatggcatgcacagtaagatggttacaccatggcagaacactgaggaagaagagtttgattgggaagatatgagccctaccctagatcgtagcagagctggtgaatttttgcgatcatctgtaccagcattaggaagtgtaagggcaagacccagagtaggaaacacaagtgattttcatttagattctgacattaagaatggtgtaagtcatcagctacgagaaaattggagtttgtcacaaaattatccacatacatccaaccgtgttgatacaagagcaggaaaagacttgaaagtattggcttcatctgtagggttagtttcatcaaacagtgaattcggggctcctccatttgatagcattcaagatgttaactcacgttttggccgggctcttcctgatgggacatggccccatttgagtgctagaggacccaactctctccctgtaccttctgctcatttgcatcatttggcaaatcccggtaatgcgatgtcaaatcgcttgcaaggtaagcctttatataggcccgaaaaccaggtctctcagagtcatcttaatgatatgactcaacagaatcagatgctagttaattatttgccatcctcatctgctatggctccaaggccaatgcaatcgttgttaacccacgtaagtcatgggtaccctccacatgggtcaaccattagaccatctttatcaatccaaggtggggaagccatgcatcctctttcttcaggagttttatctcagataggagcctctaatcaaccaccaggtggcgcattctctggtctgattggctctctcatggctcaaggtttgatctcattgaacaatcagcctgctggtcagggaccattggggttggagtttgatgcagacatgctcaagatacgtaatgagtctgcaatcagtgctttatatggggatctcccgaggcaatgcacaacctgtggtctacgcttcaagtgccaagaagagcacagtaagcacatggattggcatgtaaccaagaacaggatgtccaagaaccataagcagaacccttctcggaaatggtttgtaagtgctagcatgtggctcagtggtgcagaagcacttggagctgaagcagtaccagggttcttgcccacggagccaacaacagaaaagaaggatgacgaagatatggcagttcctgcagatgaagaccaaacttcatgtgcattatgtggtgagccatttgaagacttttatagtgatgaaaccgaggaatggatgtacaaaggtgcggtatacatgaatgctcctgaagaatcaacaacagatatggacaagtctcagttaggtcctatagtgcatgcaaagtgcaggccagagtccaatgggggtgatatggaagagggtagtcagaggaaaaagatgcggagttagatcccttagaccgaattttaggtctttttcttgactacatttaagttacattcttatttcttcatcatctatatgcacttagtcacagaataccaccaatgaagagaaatgatggagagagtcttctttctcctaaaactgtaccattgaaaaaaagaggtttacacccacatatattatcattctttatgcc

SEQ ID NO: 103980 - protein, 808 aa, Arabidopsis thaliana
  peptide (1)..(808): Ceres Seq. ID no. 13614028
MDSEKILNPRLVSINSTSRKGMSVELPQKPPPPPSLLDRFKALLNQREDEFGGGEEVLPPSMDEIVQLYEVVLGELTFNSKPIITDLTIIAGEQREHGEGIANAICTRILEAPVEQKLPSLYLLDSIVKNIGRDYGRYFSSRLPEVFCLAYRQAHPSLHPSMRHLFGTWSSVFPPPVLRKIDMQLQLSSAANQSSVGASEPSQPTRGIHVNPKYLRRLEPSAAENNLRGINSSARVYGQNSLGGYNDFEDQLESPSSLSSTPDGFTRRSNDGANPSNQAFNYGMGRATSRDDEHMEWRRKENLGQGNDHERPRALIDAYGVDTSKHVTINKPIRDMNGMHSKMVTPWQNTEEEEFDWEDMSPTLDRSRAGEFLRSSVPALGSVRARPRVGNTSDFHLDSDIKNGVSHQLRENWSLSQNYPHTSNRVDTRAGKDLKVLASSVGLVSSNSEFGAPPFDSIQDVNSRFGRALPDGTWPHLSARGPNSLPVPSAHLHHLANPGNAMSNRLQGKPLYRPENQVSQSHLNDMTQQNQMLVNYLPSSSAMAPRPMQSLLTHVSHGYPPHGSTIRPSLSIQGGEAMHPLSSGVLSQIGASNQPPGGAFSGLIGSLMAQGLISLNNQPAGQGPLGLEFDADMLKIRNESAISALYGDLPRQCTTCGLRFKCQEEHSKHMDWHVTKNRMSKNHKQNPSRKWFVSASMWLSGAEALGAEAVPGFLPTEPTTEKKDDEDMAVPADEDQTSCALCGEPFEDFYSDETEEWMYKGAVYMNAPEESTTDMDKSQLGPIVHAKCRPESNGGDMEEGSQRKKMRS

SEQ ID NO: 103981 - protein, 787 aa, Arabidopsis thaliana
  peptide (1)..(787): Ceres Seq. ID no. 13614029
MSVELPQKPPPPPSLLDRFKALLNQREDEFGGGEEVLPPSMDEIVQLYEVVLGELTFNSKPIITDLTIIAGEQREHGEGIANAICTRILEAPVEQKLPSLYLLDSIVKNIGRDYGRYFSSRLPEVFCLAYRQAHPSLHPSMRHLFGTWSSVFPPPVLRKIDMQLQLSSAANQSSVGASEPSQPTRGIHVNPKYLRRLEPSAAENNLRGINSSARVYGQNSLGGYNDFEDQLESPSSLSSTPDGFTRRSNDGANPSNQAFNYGMGRATSRDDEHMEWRRKENLGQGNDHERPRALIDAYGVDTSKHVTINKPIRDMNGMHSKMVTPWQNTEEEEFDWEDMSPTLDRSRAGEFLRSSVPALGSVRARPRVGNTSDFHLDSDIKNGVSHQLRENWSLSQNYPHTSNRVDTRAGKDLKVLASSVGLVSSNSEFGAPPFDSIQDVNSRFGRALPDGTWPHLSARGPNSLPVPSAHLHHLANPGNAMSNRLQGKPLYRPENQVSQSHLNDMTQQNQMLVNYLPSSSAMAPRPMQSLLTHVSHGYPPHGSTIRPSLSIQGGEAMHPLSSGVLSQIGASNQPPGGAFSGLIGSLMAQGLISLNNQPAGQGPLGLEFDADMLKIRNESAISALYGDLPRQCTTCGLRFKCQEEHSKHMDWHVTKNRMSKNHKQNPSRKWFVSASMWLSGAEALGAEAVPGFLPTEPTTEKKDDEDMAVPADEDQTSCALCGEPFEDFYSDETEEWMYKGAVYMNAPEESTTDMDKSQLGPIVHAKCRPESNGGDMEEGSQRKKMRS

SEQ ID NO: 103982 - protein, 747 aa, Arabidopsis thaliana
  peptide (1)..(747): Ceres Seq. ID no. 13614030
MDEIVQLYEVVLGELTFNSKPIITDLTIIAGEQREHGEGIANAICTRILEAPVEQKLPSLYLLDSIVKNIGRDYGRYFSSRLPEVFCLAYRQAHPSLHPSMRHLFGTWSSVFPPPVLRKIDMQLQLSSAANQSSVGASEPSQPTRGIHVNPKYLRRLEPSAAENNLRGINSSARVYGQNSLGGYNDFEDQLESPSSLSSTPDGFTRRSNDGANPSNQAFNYGMGRATSRDDEHMEWRRKENLGQGNDHERPRALIDAYGVDTSKHVTINKPIRDMNGMHSKMVTPWQNTEEEEFDWEDMSPTLDRSRAGEFLRSSVPALGSVRARPRVGNTSDFHLDSDIKNGVSHQLRENWSLSQNYPHTSNRVDTRAGKDLKVLASSVGLVSSNSEFGAPPFDSIQDVNSRFGRALPDGTWPHLSARGPNSLPVPSAHLHHLANPGNAMSNRLQGKPLYRPENQVSQSHLNDMTQQNQMLVNYLPSSSAMAPRPMQSLLTHVSHGYPPHGSTIRPSLSIQGGEAMHPLSSGVLSQIGASNQPPGGAFSGLIGSLMAQGLISLNNQPAGQGPLGLEFDADMLKIRNESAISALYGDLPRQCTTCGLRFKCQEEHSKHMDWHVTKNRMSKNHKQNPSRKWFVSASMWLSGAEALGAEAVPGFLPTEPTTEKKDDEDMAVPADEDQTSCALCGEPFEDFYSDETEEWMYKGAVYMNAPEESTTDMDKSQLGPIVHAKCRPESNGGDMEEGSQRKKMRS

SEQ ID NO: 103983 - DNA, 1741 bp, Arabidopsis thaliana
  misc_feature (1)..(1741): Ceres Seq. ID no. 13614031
  misc_feature (1)..(1741): Ortholog of  Ceres SEQ ID NO 13597407 as cited in SEQ ID NO 64106
ccccgagtgggctcaacgttgtcattagctatattctagtttaatggttatcatcagaaaatctgaaatcaaatttttggattgtaatccatggctgctcttggtaaaggacataaaacagctttcatctcttgaatggcttcgtctcttttgcaatttttgagttagccaagtgctcaagggagatacataatacctgaagatgtccaaggcaagtgatgccgtcagagaaccattggtggacaagaatatggctggatcaaaaccagaccagccgtggatggtttatctcagcacattcgttgcggtctgtggttcttttgcgttcggttcttgtgcgggatactcttcacctgctcaggctgcaattaggaatgacctttcattgactatagctgagttttcactctttggttctttactaacttttggcgcaatgatcggtgctataacaagcgggcctatagctgatttagttggaagaaagggggcgatgagagtttcctctgcattttgtgtagtcgggtggctagcaatcatctttgccaagggagtagtggctctggaccttggaagactggcaacgggatatggaatgggagcattttcctatgtggtgccaatctttatagcagaaattgcacctaaaactttcagaggggctctaaccacactgaaccagattctgatctgcactggagtgtcggtttccttcatcataggcacactagtgacgtggagagtcttggcattaataggaatcatcccatgcgctgcctccttccttggcctcttttttatccctgagtctccaagatggctggcaaaagtggggcgtgatacggagtttgaagctgcactgaggaagctccgtgggaagaaggctgatatttcggaggaggcagcagagatccaggattatatcgaaactctggaaaggctaccgaaagccaagatgctggatttgtttcagaggagatacatacgctctgttcttatagctttcgggttgatggtgtttcagcagtttggaggaatcaacggaatatgtttctacacaagctcgatatttgagcaagcaggttttcccacaagacttgggatgataatatatgctgttcttcaggtggtaatcactgcgcttaatgcaccgatagttgacagagccggaagaaaaccattgctactggtttctgcaacagggttagtgataggctgtttgatagcagcggtttctttctatctcaaggttcacgacatggcgcacgaagcagtcccagtcctggctgttgttggtataatggtgtacataggatcgttttcagcaggaatgggagcaatgccgtgggtggtcatgtctgagatatttcccataaacataaaaggagtagcaggaggcatggcgacgctggtgaactggtttggagcgtgggctgtttcttacactttcaacttcctcatgtcctggagctcttacggaactttcctcatttacgctgccatcaacgcgctggccattgtcttcgtcattgccatcgtgcctgagacaaaagggaagacattggagcagatccaagctatagtcaatccatagctcaaacacttcctagatgttcgtttctattagccagctgggacataaattgcaatcttggatctctttgcttttatgattctttactgagttcaattgttatcactctctctatttctaatctcttcttaatgaactttggacttc

SEQ ID NO: 103984 - protein, 463 aa, Arabidopsis thaliana; identical to SEQ ID NO: 40571
  peptide (1)..(463): Ceres Seq. ID no. 13614032

SEQ ID NO: 103985 - protein, 447 aa, Arabidopsis thaliana; identical to SEQ ID NO: 40572
  peptide (1)..(447): Ceres Seq. ID no. 13614033

SEQ ID NO: 103986 - protein, 437 aa, Arabidopsis thaliana; identical to SEQ ID NO: 40573
  peptide (1)..(437): Ceres Seq. ID no. 13614034

SEQ ID NO: 103987 - DNA, 944 bp, Arabidopsis thaliana
  misc_feature (1)..(944): Ceres Seq. ID no. 13614053
  misc_feature (1)..(944): Ortholog of  Ceres SEQ ID NO 14304536 as cited in SEQ ID NO 53436
  misc_feature (1)..(944): Ortholog of  Ceres SEQ ID NO 14315438 as cited in SEQ ID NO 57205
atcaatatcaaattgtcgaatttacacgaagaacaaaaataaggaatcgagagagagagagagataggcgcatatatgggaagaaaatgagagaaaaatggaaactttgaccgccattgaacactcacgagatctcttcttcttgtatttcttctctctcctctctgtctgatgcgtgttcttgattcatcggctcagatcagtcaccaaatagaataaatagcaaacaagatcctctgtggaatttgatacatagagaaactgtctagtgctgtggtgtcttttgagattttcttgtggttctgtggattgtttgttggttggttgcttcttggataaatggcagaagtccataatcaactagagatcaagtttcggttaaccgatggttcggatatcggtcctaaagcattccctgatgctacaactgtttcggctttgaaggaaactgttatttctgaatggccaagagagaaggagaatgggccgaaaacagtgaaagaggtgaagttgataagcgcagggaaggtattggagaacagcaagacggttaaagactaccgaagtcctgtctctaatctcgcaggcgctgtcaccacaatgcacgttatcatccaagctccggttacggaaaaagaaaagaagcctaaaggtgacccgaagatgaacaaatgcgtctgttcagtcatgtaagagagtagcaaaatctcaagagagactcatcagatttctggtccttaagtttggtctttcttgtggttagtatagattgtttactaatacagatacagaattaaagagtattgaaccatttttttttataataaaaaaaaatagtataaatcaaagctctactctagcttgttgcaagattgaaagagatcatcaataaatcaaggtactggtgattcagttcctcttaatggagtctctgttttagctct

SEQ ID NO: 103988 - protein, 117 aa, Arabidopsis thaliana; identical to SEQ ID NO: 21367
  peptide (1)..(117): Ceres Seq. ID no. 13614054
